United States Patent Application Publication US 2021/0170017 A1 - sequence listing, part 8

SEQ ID NO: 10874 - RNA, 1082 nt, Artificial Sequence
  mRNA product Design f-3 comprising derived and/or modified sequence from HRSV(A2)__P03421.1__P (opt4)
gggagagucccgcagucggcguccagcggcucugcuuguucgugugugugucguugcaggccuuauucaagcuuaccauggagaaguucgcccccgaguuccacggcgaggacgccaacaacagagccaccaaguuccuggagagcaucaagggcaaguucaccagccccaaggaccccaagaagaaggacagcaucaucagcgugaacagcaucgacaucgaggugaccaaggagagccccaucaccagcaacagcaccaucaucaaccccaccaacgagaccgacgacaccgccggcaacaagcccaacuaccagagaaagccccuggugagcuucaaggaggaccccacccccagcgacaaccccuucagcaagcuguacaaggagaccaucgagaccuucgacaacaacgaggaggagagcagcuacagcuacgaggagaucaacgaccagaccaacgacaacaucaccgccagacuggacagaaucgacgagaagcugagcgagauccugggcaugcugcacacccuggugguggccagcgccggccccaccagcgccagagacggcaucagagacgccaugaucggccugagagaggagaugaucgagaagaucagaaccgaggcccugaugaccaacgacagacuggaggccauggccagacugagaaacgaggagagcgagaagauggccaaggacaccagcgacgaggugagccugaaccccaccagcgagaagcugaacaaccugcuggagggcaacgacagcgacaacgaccugagccuggaggacuucugaggacuaguacuggcugcaucucccuuuccucuguccuccauccuucucccaggauggugaagggggaccugguacccagugauccccaccccaggauccuaaaucaugacuuaccugcuaauaaaaacucauuggaaaagugagaagaucuaaaaaaaaaaaaaaaaaaaaaaaaaaaaaaaaaaaaaaaaaaaaaaaaaaaaaaaaaaaaaaaaugcaucccccccccccccccccccccccccccccccaaaggcucuuuucagagccaccagaauu

SEQ ID NO: 10875 - RNA, 1082 nt, Artificial Sequence
  mRNA product Design f-3 comprising derived and/or modified sequence from HRSV(A2)__P03421.1__P (opt5)
gggagagucccgcagucggcguccagcggcucugcuuguucgugugugugucguugcaggccuuauucaagcuuaccauggagaaguucgcccccgaauuucacggcgaggacgcuaacaauagagccaccaaauuccuggaaagcaucaaggggaaauuuacauccccuaaggauccgaaaaagaaggacucuauuaucagcgugaacuccauugauaucgaggucacgaaagaaucucccauuaccagcaauuccacaaucaucaacccuaccaaugagacagacgauaccgcgggaaacaagcccaauuaccagcggaaaccucucguuucuuucaaggaggaccccacaccuagcgauaacccguuuuccaaacuguauaaggaaaccauugagacguucgacaauaacgaagaggagagcucuuacuccuaugaagagaucaaugaucaaaccaacgacaauauuacagcucgccuugauagaaucgacgaaaagcugagcgagauucucggcaugcugcauacccuugugguggccucugccgggcccacauccgcucgggauggaauccgcgacgccaugauuggccugagagaagagaugaucgagaaaauccggaccgaagcucucaugacgaacgaccgccuggaggccauggcgagacugcggaaugaagagagcgaaaagauggccaaagauacaucugacgaggucucccucaacccuaccagcgagaagcugaacaaucuucuggaagggaacgauuccgacaaugaucucucucuggaggacuuuugaggacuaguacuggcugcaucucccuuuccucuguccuccauccuucucccaggauggugaagggggaccugguacccagugauccccaccccaggauccuaaaucaugacuuaccugcuaauaaaaacucauuggaaaagugagaagaucuaaaaaaaaaaaaaaaaaaaaaaaaaaaaaaaaaaaaaaaaaaaaaaaaaaaaaaaaaaaaaaaaugcaucccccccccccccccccccccccccccccccaaaggcucuuuucagagccaccagaauu

SEQ ID NO: 10876 - RNA, 1082 nt, Artificial Sequence
  mRNA product Design f-3 comprising derived and/or modified sequence from HRSV(A2)__P03421.1__P (opt6)
gggagagucccgcagucggcguccagcggcucugcuuguucgugugugugucguugcaggccuuauucaagcuuaccauggaaaaauucgcaccagaauuucacggagaagacgcaaacaacagagcaacaaaauucuuagaaucaaucaaaggaaaauucacaagcccaaaagacccaaaaaaaaaagacucaauaauaagcguaaacucaauagacauagaaguaacaaaagaaagcccaauaacaagcaacagcacaauaauaaacccaacaaacgaaacagaugacacagcuggaaauaaaccaaacuaccaaagaaaaccccuagucagcuucaaagaagaccccacaccaucagacaacccauucagcaaacuauauaaagaaacaauagaaacauuugacaacaacgaagaagaaucaucauacucauacgaagaaauaaacgaccaaacaaacgacaacauaaccgcaagauuagacagaauagaugaaaaacuaucagaaauacuaggaaugcuacacacauuaguaguagcaagcgcaggaccaacaucagcaagagacggaauaagagacgcaaugauaggacucagagaagaaaugauagaaaaaauaagaacagaagcacuaaugacaaacgacagauuagaagcaauggcaagacuaagaaaugaagaaucggaaaaaauggcaaaagacacaucagacgaaguaagccuaaacccaacaucagaaaaauuaaauaaccuacuagaaggaaacgacagcgacaacgacuuaucacuagaagacuucuaaggacuaguacuggcugcaucucccuuuccucuguccuccauccuucucccaggauggugaagggggaccugguacccagugauccccaccccaggauccuaaaucaugacuuaccugcuaauaaaaacucauuggaaaagugagaagaucuaaaaaaaaaaaaaaaaaaaaaaaaaaaaaaaaaaaaaaaaaaaaaaaaaaaaaaaaaaaaaaaaugcaucccccccccccccccccccccccccccccccaaaggcucuuuucagagccaccagaauu

SEQ ID NO: 10877 - RNA, 1082 nt, Artificial Sequence
  mRNA product Design f-3 comprising derived and/or modified sequence from HRSV(A2)__P03421.1__P (opt11)
gggagagucccgcagucggcguccagcggcucugcuuguucgugugugugucguugcaggccuuauucaagcuuaccauggaaaaauucgcgcccgaguuccacggcgaggacgcgaacaaccgcgcgacaaaguuccuagaaucaaucaagggcaaauucacgagcccgaaagaccccaagaaaaaggacucaaucauaagcgugaacucgaucgacaucgaggucacgaaagagagcccgaucacaagcaacagcaccauaauaaacccgaccaacgaaacagacgacaccgcgggcaacaaaccgaacuaccaaagaaaaccgcucgugagcuucaaagaagacccgaccccaagcgacaacccguucucaaaacuauacaaggaaacgaucgagaccuucgacaacaacgaggaagagagcucguacucguacgaggaaauaaacgaccaaacaaacgacaacauaaccgcacgccuagacaggaucgacgaaaaacucucggaaauacucgggaugcuacacacgcucguggucgcgagcgcaggcccgaccucggccagggacggcaucagggacgcaaugauaggccugcgagaggaaaugaucgagaaaauacgcaccgaagcacucaugaccaacgacagacucgaagccauggccaggcucaggaacgaagaauccgaaaagauggcgaaagacaccucggacgaggucucgcucaaccccacgagcgagaaacugaacaaccuacuggaagggaacgacagcgacaacgaccuuucccucgaggacuucugaggacuaguacuggcugcaucucccuuuccucuguccuccauccuucucccaggauggugaagggggaccugguacccagugauccccaccccaggauccuaaaucaugacuuaccugcuaauaaaaacucauuggaaaagugagaagaucuaaaaaaaaaaaaaaaaaaaaaaaaaaaaaaaaaaaaaaaaaaaaaaaaaaaaaaaaaaaaaaaaugcaucccccccccccccccccccccccccccccccaaaggcucuuuucagagccaccagaauu

SEQ ID NO: 10878 - RNA, 1298 nt, Artificial Sequence
  mRNA product Design f-4 comprising derived and/or modified sequence from HRSV(A2)__P03421.1__P (wt)
gggagagucccgcagucggcguccagcggcucugcuuguucgugugugugucguugcaggccuuauucaagcuuaccauggaaaaguuugcuccugaauuccauggagaagaugcaaacaacagggcuacuaaauuccuagaaucaauaaagggcaaauucacaucacccaaagaucccaagaaaaaagauaguaucauaucugucaacucaauagauauagaaguaaccaaagaaagcccuauaacaucaaauucaacuauuaucaacccaacaaaugagacagaugauacugcagggaacaagcccaauuaucaaagaaaaccucuaguaaguuucaaagaagacccuacaccaagugauaaucccuuuucuaaacuauacaaagaaaccauagaaacauuugauaacaaugaagaagaauccagcuauucauacgaagaaauaaaugaucagacaaacgauaauauaacagcaagauuagauaggauugaugaaaaauuaagugaaauacuaggaaugcuucacacauuaguaguggcaagugcaggaccuacaucugcucgggaugguauaagagaugccaugauugguuuaagagaagaaaugauagaaaaaaucagaacugaagcauuaaugaccaaugacagauuagaagcuauggcaagacucaggaaugaggaaagugaaaagauggcaaaagacacaucagaugaagugucucucaauccaacaucagagaaauugaacaaccuauuggaagggaaugauagugacaaugaucuaucacuugaagauuucugaggacuagugaagggaacacccaaauuuaauucagccuuaagcacaauuaauuaagagugaaacguaauuguacaagcaguuggucacccaccauagggcaugaucaacaccgcaaccuuuccuuuuucccccagugauucugaaaaaccccucuucccuucagcuugcuuagauguuccaaauuuaguaagcuuaaggcggccuacagaagaaaaagaaaaaaaaggccacaaaaguucccucucacuuucaguaaauaaaauaaaagcagcaacagaaauaaagaaauaaaugaaauucaaaaugaaauaaauauuguguugugcagcauuaaaaaaucaauaaaaauuaaaaaugagcaagaucuaaaaaaaaaaaaaaaaaaaaaaaaaaaaaaaaaaaaaaaaaaaaaaaaaaaaaaaaaaaaaaaaugcaucccccccccccccccccccccccccccccccaaaggcucuuuucagagccaccagaauu

SEQ ID NO: 10879 - RNA, 1298 nt, Artificial Sequence
  mRNA product Design f-4 comprising derived and/or modified sequence from HRSV(A2)__P03421.1__P (opt1)
gggagagucccgcagucggcguccagcggcucugcuuguucgugugugugucguugcaggccuuauucaagcuuaccauggagaaguucgcccccgaguuccacggcgaggacgccaacaaccgcgcgaccaaguuccuggagagcaucaaggggaaguucaccuccccgaaggaccccaagaagaaggacagcaucaucuccgugaacagcaucgacaucgaggucacgaaggagucccccaucaccagcaacuccaccaucaucaaccccaccaacgagacggacgacaccgccggcaacaagccgaacuaccagcggaagccccucgugagcuucaaggaggaccccacccccuccgacaacccguucagcaagcuguacaaggagaccaucgagacguucgacaacaacgaggaggaguccagcuacuccuacgaggagaucaacgaccagaccaacgacaacaucaccgcccgccuggaccggaucgacgagaagcucagcgagauccuggggaugcugcacacccucguggucgccuccgccggccccacgagcgcgcgcgacgggauccgggacgccaugaucggccugcgcgaggagaugaucgagaagauccggaccgaggcccugaugaccaacgaccgccucgaggccauggcgcggcugcgcaacgaggaguccgagaagauggccaaggacaccagcgacgaggugucccugaaccccacgagcgagaagcucaacaaccugcuggagggcaacgacagcgacaacgaccucucccuggaggacuucugaggacuagugaagggaacacccaaauuuaauucagccuuaagcacaauuaauuaagagugaaacguaauuguacaagcaguuggucacccaccauagggcaugaucaacaccgcaaccuuuccuuuuucccccagugauucugaaaaaccccucuucccuucagcuugcuuagauguuccaaauuuaguaagcuuaaggcggccuacagaagaaaaagaaaaaaaaggccacaaaaguucccucucacuuucaguaaauaaaauaaaagcagcaacagaaauaaagaaauaaaugaaauucaaaaugaaauaaauauuguguugugcagcauuaaaaaaucaauaaaaauuaaaaaugagcaagaucuaaaaaaaaaaaaaaaaaaaaaaaaaaaaaaaaaaaaaaaaaaaaaaaaaaaaaaaaaaaaaaaaugcaucccccccccccccccccccccccccccccccaaaggcucuuuucagagccaccagaauu

SEQ ID NO: 10880 - RNA, 1298 nt, Artificial Sequence
  mRNA product Design f-4 comprising derived and/or modified sequence from HRSV(A2)__P03421.1__P (opt2)
gggagagucccgcagucggcguccagcggcucugcuuguucgugugugugucguugcaggccuuauucaagcuuaccauggagaaguucgcccccgaguuccacggcgaggacgccaacaaccgcgccaccaaguuccucgaguccaucaagggcaaguucaccucccccaaggaccccaagaagaaggacuccaucaucuccgucaacuccaucgacaucgaggucaccaaggagucccccaucaccuccaacuccaccaucaucaaccccaccaacgagaccgacgacaccgccggcaacaagcccaacuaccagcgcaagccccucgucuccuucaaggaggaccccacccccuccgacaaccccuucuccaagcucuacaaggagaccaucgagaccuucgacaacaacgaggaggaguccuccuacuccuacgaggagaucaacgaccagaccaacgacaacaucaccgcccgccucgaccgcaucgacgagaagcucuccgagauccucggcaugcuccacacccucgucgucgccuccgccggccccaccuccgcccgcgacggcauccgcgacgccaugaucggccuccgcgaggagaugaucgagaagauccgcaccgaggcccucaugaccaacgaccgccucgaggccauggcccgccuccgcaacgaggaguccgagaagauggccaaggacaccuccgacgaggucucccucaaccccaccuccgagaagcucaacaaccuccucgagggcaacgacuccgacaacgaccucucccucgaggacuucugaggacuagugaagggaacacccaaauuuaauucagccuuaagcacaauuaauuaagagugaaacguaauuguacaagcaguuggucacccaccauagggcaugaucaacaccgcaaccuuuccuuuuucccccagugauucugaaaaaccccucuucccuucagcuugcuuagauguuccaaauuuaguaagcuuaaggcggccuacagaagaaaaagaaaaaaaaggccacaaaaguucccucucacuuucaguaaauaaaauaaaagcagcaacagaaauaaagaaauaaaugaaauucaaaaugaaauaaauauuguguugugcagcauuaaaaaaucaauaaaaauuaaaaaugagcaagaucuaaaaaaaaaaaaaaaaaaaaaaaaaaaaaaaaaaaaaaaaaaaaaaaaaaaaaaaaaaaaaaaaugcaucccccccccccccccccccccccccccccccaaaggcucuuuucagagccaccagaauu

SEQ ID NO: 10881 - RNA, 1298 nt, Artificial Sequence
  mRNA product Design f-4 comprising derived and/or modified sequence from HRSV(A2)__P03421.1__P (opt3)
gggagagucccgcagucggcguccagcggcucugcuuguucgugugugugucguugcaggccuuauucaagcuuaccauggagaaguucgcccccgaauuucacggcgaggacgcuaacaauagagcaaccaaauuccuggaaagcaucaaggggaaauuuacauccccuaaggauccgaaaaagaaggacucuauuauaucagugaacaguaucgauauugaggucacuaaagaaagcccaaucacguccaauucuaccauuaucaaccccacaaaugagacugacgauaccgccggaaacaagccuaauuaccagaggaaaccacucguuucguucaaggaggaccccacaccuucagauaacccauuuagcaaacuuuauaaggaaaccauagagacuuucgacaauaacgaagaggagaguuccuacucuuaugaagagaucaaugaucaaacaaacgacaauauuaccgcgcggcuggaucgcaucgacgaaaaguugagcgagauuuuagguaugcugcauacgcuagugguagcuuccgccggccccacuucagcacgagaugggauccgugacgccaugauaggacucagagaagagaugauugagaaaaucaggaccgaagcucugaugacaaacgaccggcuugaggcaauggcccgccugagaaaugaagagagugaaaagauggcuaaagauacuagcgacgaggugucuuugaacccuaccuccgagaagcucaacaaucugcuggaaggcaacgauucagacaaugaucucagcuuagaggacuuuugaggacuagugaagggaacacccaaauuuaauucagccuuaagcacaauuaauuaagagugaaacguaauuguacaagcaguuggucacccaccauagggcaugaucaacaccgcaaccuuuccuuuuucccccagugauucugaaaaaccccucuucccuucagcuugcuuagauguuccaaauuuaguaagcuuaaggcggccuacagaagaaaaagaaaaaaaaggccacaaaaguucccucucacuuucaguaaauaaaauaaaagcagcaacagaaauaaagaaauaaaugaaauucaaaaugaaauaaauauuguguugugcagcauuaaaaaaucaauaaaaauuaaaaaugagcaagaucuaaaaaaaaaaaaaaaaaaaaaaaaaaaaaaaaaaaaaaaaaaaaaaaaaaaaaaaaaaaaaaaaugcaucccccccccccccccccccccccccccccccaaaggcucuuuucagagccaccagaauu

SEQ ID NO: 10882 - RNA, 1298 nt, Artificial Sequence
  mRNA product Design f-4 comprising derived and/or modified sequence from HRSV(A2)__P03421.1__P (opt4)
gggagagucccgcagucggcguccagcggcucugcuuguucgugugugugucguugcaggccuuauucaagcuuaccauggagaaguucgcccccgaguuccacggcgaggacgccaacaacagagccaccaaguuccuggagagcaucaagggcaaguucaccagccccaaggaccccaagaagaaggacagcaucaucagcgugaacagcaucgacaucgaggugaccaaggagagccccaucaccagcaacagcaccaucaucaaccccaccaacgagaccgacgacaccgccggcaacaagcccaacuaccagagaaagccccuggugagcuucaaggaggaccccacccccagcgacaaccccuucagcaagcuguacaaggagaccaucgagaccuucgacaacaacgaggaggagagcagcuacagcuacgaggagaucaacgaccagaccaacgacaacaucaccgccagacuggacagaaucgacgagaagcugagcgagauccugggcaugcugcacacccuggugguggccagcgccggccccaccagcgccagagacggcaucagagacgccaugaucggccugagagaggagaugaucgagaagaucagaaccgaggcccugaugaccaacgacagacuggaggccauggccagacugagaaacgaggagagcgagaagauggccaaggacaccagcgacgaggugagccugaaccccaccagcgagaagcugaacaaccugcuggagggcaacgacagcgacaacgaccugagccuggaggacuucugaggacuagugaagggaacacccaaauuuaauucagccuuaagcacaauuaauuaagagugaaacguaauuguacaagcaguuggucacccaccauagggcaugaucaacaccgcaaccuuuccuuuuucccccagugauucugaaaaaccccucuucccuucagcuugcuuagauguuccaaauuuaguaagcuuaaggcggccuacagaagaaaaagaaaaaaaaggccacaaaaguucccucucacuuucaguaaauaaaauaaaagcagcaacagaaauaaagaaauaaaugaaauucaaaaugaaauaaauauuguguugugcagcauuaaaaaaucaauaaaaauuaaaaaugagcaagaucuaaaaaaaaaaaaaaaaaaaaaaaaaaaaaaaaaaaaaaaaaaaaaaaaaaaaaaaaaaaaaaaaugcaucccccccccccccccccccccccccccccccaaaggcucuuuucagagccaccagaauu

SEQ ID NO: 10883 - RNA, 1298 nt, Artificial Sequence
  mRNA product Design f-4 comprising derived and/or modified sequence from HRSV(A2)__P03421.1__P (opt5)
gggagagucccgcagucggcguccagcggcucugcuuguucgugugugugucguugcaggccuuauucaagcuuaccauggagaaguucgcccccgaauuucacggcgaggacgcuaacaauagagccaccaaauuccuggaaagcaucaaggggaaauuuacauccccuaaggauccgaaaaagaaggacucuauuaucagcgugaacuccauugauaucgaggucacgaaagaaucucccauuaccagcaauuccacaaucaucaacccuaccaaugagacagacgauaccgcgggaaacaagcccaauuaccagcggaaaccucucguuucuuucaaggaggaccccacaccuagcgauaacccguuuuccaaacuguauaaggaaaccauugagacguucgacaauaacgaagaggagagcucuuacuccuaugaagagaucaaugaucaaaccaacgacaauauuacagcucgccuugauagaaucgacgaaaagcugagcgagauucucggcaugcugcauacccuugugguggccucugccgggcccacauccgcucgggauggaauccgcgacgccaugauuggccugagagaagagaugaucgagaaaauccggaccgaagcucucaugacgaacgaccgccuggaggccauggcgagacugcggaaugaagagagcgaaaagauggccaaagauacaucugacgaggucucccucaacccuaccagcgagaagcugaacaaucuucuggaagggaacgauuccgacaaugaucucucucuggaggacuuuugaggacuagugaagggaacacccaaauuuaauucagccuuaagcacaauuaauuaagagugaaacguaauuguacaagcaguuggucacccaccauagggcaugaucaacaccgcaaccuuuccuuuuucccccagugauucugaaaaaccccucuucccuucagcuugcuuagauguuccaaauuuaguaagcuuaaggcggccuacagaagaaaaagaaaaaaaaggccacaaaaguucccucucacuuucaguaaauaaaauaaaagcagcaacagaaauaaagaaauaaaugaaauucaaaaugaaauaaauauuguguugugcagcauuaaaaaaucaauaaaaauuaaaaaugagcaagaucuaaaaaaaaaaaaaaaaaaaaaaaaaaaaaaaaaaaaaaaaaaaaaaaaaaaaaaaaaaaaaaaaugcaucccccccccccccccccccccccccccccccaaaggcucuuuucagagccaccagaauu

SEQ ID NO: 10884 - RNA, 1298 nt, Artificial Sequence
  mRNA product Design f-4 comprising derived and/or modified sequence from HRSV(A2)__P03421.1__P (opt6)
gggagagucccgcagucggcguccagcggcucugcuuguucgugugugugucguugcaggccuuauucaagcuuaccauggaaaaauucgcaccagaauuucacggagaagacgcaaacaacagagcaacaaaauucuuagaaucaaucaaaggaaaauucacaagcccaaaagacccaaaaaaaaaagacucaauaauaagcguaaacucaauagacauagaaguaacaaaagaaagcccaauaacaagcaacagcacaauaauaaacccaacaaacgaaacagaugacacagcuggaaauaaaccaaacuaccaaagaaaaccccuagucagcuucaaagaagaccccacaccaucagacaacccauucagcaaacuauauaaagaaacaauagaaacauuugacaacaacgaagaagaaucaucauacucauacgaagaaauaaacgaccaaacaaacgacaacauaaccgcaagauuagacagaauagaugaaaaacuaucagaaauacuaggaaugcuacacacauuaguaguagcaagcgcaggaccaacaucagcaagagacggaauaagagacgcaaugauaggacucagagaagaaaugauagaaaaaauaagaacagaagcacuaaugacaaacgacagauuagaagcaauggcaagacuaagaaaugaagaaucggaaaaaauggcaaaagacacaucagacgaaguaagccuaaacccaacaucagaaaaauuaaauaaccuacuagaaggaaacgacagcgacaacgacuuaucacuagaagacuucuaaggacuagugaagggaacacccaaauuuaauucagccuuaagcacaauuaauuaagagugaaacguaauuguacaagcaguuggucacccaccauagggcaugaucaacaccgcaaccuuuccuuuuucccccagugauucugaaaaaccccucuucccuucagcuugcuuagauguuccaaauuuaguaagcuuaaggcggccuacagaagaaaaagaaaaaaaaggccacaaaaguucccucucacuuucaguaaauaaaauaaaagcagcaacagaaauaaagaaauaaaugaaauucaaaaugaaauaaauauuguguugugcagcauuaaaaaaucaauaaaaauuaaaaaugagcaagaucuaaaaaaaaaaaaaaaaaaaaaaaaaaaaaaaaaaaaaaaaaaaaaaaaaaaaaaaaaaaaaaaaugcaucccccccccccccccccccccccccccccccaaaggcucuuuucagagccaccagaauu

SEQ ID NO: 10885 - RNA, 1298 nt, Artificial Sequence
  mRNA product Design f-4 comprising derived and/or modified sequence from HRSV(A2)__P03421.1__P (opt11)
gggagagucccgcagucggcguccagcggcucugcuuguucgugugugugucguugcaggccuuauucaagcuuaccauggaaaaauucgcgcccgaguuccacggcgaggacgcgaacaaccgcgcgacaaaguuccuagaaucaaucaagggcaaauucacgagcccgaaagaccccaagaaaaaggacucaaucauaagcgugaacucgaucgacaucgaggucacgaaagagagcccgaucacaagcaacagcaccauaauaaacccgaccaacgaaacagacgacaccgcgggcaacaaaccgaacuaccaaagaaaaccgcucgugagcuucaaagaagacccgaccccaagcgacaacccguucucaaaacuauacaaggaaacgaucgagaccuucgacaacaacgaggaagagagcucguacucguacgaggaaauaaacgaccaaacaaacgacaacauaaccgcacgccuagacaggaucgacgaaaaacucucggaaauacucgggaugcuacacacgcucguggucgcgagcgcaggcccgaccucggccagggacggcaucagggacgcaaugauaggccugcgagaggaaaugaucgagaaaauacgcaccgaagcacucaugaccaacgacagacucgaagccauggccaggcucaggaacgaagaauccgaaaagauggcgaaagacaccucggacgaggucucgcucaaccccacgagcgagaaacugaacaaccuacuggaagggaacgacagcgacaacgaccuuucccucgaggacuucugaggacuagugaagggaacacccaaauuuaauucagccuuaagcacaauuaauuaagagugaaacguaauuguacaagcaguuggucacccaccauagggcaugaucaacaccgcaaccuuuccuuuuucccccagugauucugaaaaaccccucuucccuucagcuugcuuagauguuccaaauuuaguaagcuuaaggcggccuacagaagaaaaagaaaaaaaaggccacaaaaguucccucucacuuucaguaaauaaaauaaaagcagcaacagaaauaaagaaauaaaugaaauucaaaaugaaauaaauauuguguugugcagcauuaaaaaaucaauaaaaauuaaaaaugagcaagaucuaaaaaaaaaaaaaaaaaaaaaaaaaaaaaaaaaaaaaaaaaaaaaaaaaaaaaaaaaaaaaaaaugcaucccccccccccccccccccccccccccccccaaaggcucuuuucagagccaccagaauu

SEQ ID NO: 10886 - RNA, 1074 nt, Artificial Sequence
  mRNA product Design f-5 comprising derived and/or modified sequence from HRSV(A2)__P03421.1__P (wt)
gggagacuuucccauucuguagcagaauuugguguugccuguggucuuggucccgcggagaagcuuaccauggaaaaguuugcuccugaauuccauggagaagaugcaaacaacagggcuacuaaauuccuagaaucaauaaagggcaaauucacaucacccaaagaucccaagaaaaaagauaguaucauaucugucaacucaauagauauagaaguaaccaaagaaagcccuauaacaucaaauucaacuauuaucaacccaacaaaugagacagaugauacugcagggaacaagcccaauuaucaaagaaaaccucuaguaaguuucaaagaagacccuacaccaagugauaaucccuuuucuaaacuauacaaagaaaccauagaaacauuugauaacaaugaagaagaauccagcuauucauacgaagaaauaaaugaucagacaaacgauaauauaacagcaagauuagauaggauugaugaaaaauuaagugaaauacuaggaaugcuucacacauuaguaguggcaagugcaggaccuacaucugcucgggaugguauaagagaugccaugauugguuuaagagaagaaaugauagaaaaaaucagaacugaagcauuaaugaccaaugacagauuagaagcuauggcaagacucaggaaugaggaaagugaaaagauggcaaaagacacaucagaugaagugucucucaauccaacaucagagaaauugaacaaccuauuggaagggaaugauagugacaaugaucuaucacuugaagauuucugaggacuaguacuggcugcaucucccuuuccucuguccuccauccuucucccaggauggugaagggggaccugguacccagugauccccaccccaggauccuaaaucaugacuuaccugcuaauaaaaacucauuggaaaagugagaagaucuaaaaaaaaaaaaaaaaaaaaaaaaaaaaaaaaaaaaaaaaaaaaaaaaaaaaaaaaaaaaaaaaugcaucccccccccccccccccccccccccccccccaaaggcucuuuucagagccaccagaauu

SEQ ID NO: 10887 - RNA, 1074 nt, Artificial Sequence
  mRNA product Design f-5 comprising derived and/or modified sequence from HRSV(A2)__P03421.1__P (opt1)
gggagacuuucccauucuguagcagaauuugguguugccuguggucuuggucccgcggagaagcuuaccauggagaaguucgcccccgaguuccacggcgaggacgccaacaaccgcgcgaccaaguuccuggagagcaucaaggggaaguucaccuccccgaaggaccccaagaagaaggacagcaucaucuccgugaacagcaucgacaucgaggucacgaaggagucccccaucaccagcaacuccaccaucaucaaccccaccaacgagacggacgacaccgccggcaacaagccgaacuaccagcggaagccccucgugagcuucaaggaggaccccacccccuccgacaacccguucagcaagcuguacaaggagaccaucgagacguucgacaacaacgaggaggaguccagcuacuccuacgaggagaucaacgaccagaccaacgacaacaucaccgcccgccuggaccggaucgacgagaagcucagcgagauccuggggaugcugcacacccucguggucgccuccgccggccccacgagcgcgcgcgacgggauccgggacgccaugaucggccugcgcgaggagaugaucgagaagauccggaccgaggcccugaugaccaacgaccgccucgaggccauggcgcggcugcgcaacgaggaguccgagaagauggccaaggacaccagcgacgaggugucccugaaccccacgagcgagaagcucaacaaccugcuggagggcaacgacagcgacaacgaccucucccuggaggacuucugaggacuaguacuggcugcaucucccuuuccucuguccuccauccuucucccaggauggugaagggggaccugguacccagugauccccaccccaggauccuaaaucaugacuuaccugcuaauaaaaacucauuggaaaagugagaagaucuaaaaaaaaaaaaaaaaaaaaaaaaaaaaaaaaaaaaaaaaaaaaaaaaaaaaaaaaaaaaaaaaugcaucccccccccccccccccccccccccccccccaaaggcucuuuucagagccaccagaauu

SEQ ID NO: 10888 - RNA, 1074 nt, Artificial Sequence
  mRNA product Design f-5 comprising derived and/or modified sequence from HRSV(A2)__P03421.1__P (opt2)
gggagacuuucccauucuguagcagaauuugguguugccuguggucuuggucccgcggagaagcuuaccauggagaaguucgcccccgaguuccacggcgaggacgccaacaaccgcgccaccaaguuccucgaguccaucaagggcaaguucaccucccccaaggaccccaagaagaaggacuccaucaucuccgucaacuccaucgacaucgaggucaccaaggagucccccaucaccuccaacuccaccaucaucaaccccaccaacgagaccgacgacaccgccggcaacaagcccaacuaccagcgcaagccccucgucuccuucaaggaggaccccacccccuccgacaaccccuucuccaagcucuacaaggagaccaucgagaccuucgacaacaacgaggaggaguccuccuacuccuacgaggagaucaacgaccagaccaacgacaacaucaccgcccgccucgaccgcaucgacgagaagcucuccgagauccucggcaugcuccacacccucgucgucgccuccgccggccccaccuccgcccgcgacggcauccgcgacgccaugaucggccuccgcgaggagaugaucgagaagauccgcaccgaggcccucaugaccaacgaccgccucgaggccauggcccgccuccgcaacgaggaguccgagaagauggccaaggacaccuccgacgaggucucccucaaccccaccuccgagaagcucaacaaccuccucgagggcaacgacuccgacaacgaccucucccucgaggacuucugaggacuaguacuggcugcaucucccuuuccucuguccuccauccuucucccaggauggugaagggggaccugguacccagugauccccaccccaggauccuaaaucaugacuuaccugcuaauaaaaacucauuggaaaagugagaagaucuaaaaaaaaaaaaaaaaaaaaaaaaaaaaaaaaaaaaaaaaaaaaaaaaaaaaaaaaaaaaaaaaugcaucccccccccccccccccccccccccccccccaaaggcucuuuucagagccaccagaauu

SEQ ID NO: 10889 - RNA, 1074 nt, Artificial Sequence
  mRNA product Design f-5 comprising derived and/or modified sequence from HRSV(A2)__P03421.1__P (opt3)
gggagacuuucccauucuguagcagaauuugguguugccuguggucuuggucccgcggagaagcuuaccauggagaaguucgcccccgaauuucacggcgaggacgcuaacaauagagcaaccaaauuccuggaaagcaucaaggggaaauuuacauccccuaaggauccgaaaaagaaggacucuauuauaucagugaacaguaucgauauugaggucacuaaagaaagcccaaucacguccaauucuaccauuaucaaccccacaaaugagacugacgauaccgccggaaacaagccuaauuaccagaggaaaccacucguuucguucaaggaggaccccacaccuucagauaacccauuuagcaaacuuuauaaggaaaccauagagacuuucgacaauaacgaagaggagaguuccuacucuuaugaagagaucaaugaucaaacaaacgacaauauuaccgcgcggcuggaucgcaucgacgaaaaguugagcgagauuuuagguaugcugcauacgcuagugguagcuuccgccggccccacuucagcacgagaugggauccgugacgccaugauaggacucagagaagagaugauugagaaaaucaggaccgaagcucugaugacaaacgaccggcuugaggcaauggcccgccugagaaaugaagagagugaaaagauggcuaaagauacuagcgacgaggugucuuugaacccuaccuccgagaagcucaacaaucugcuggaaggcaacgauucagacaaugaucucagcuuagaggacuuuugaggacuaguacuggcugcaucucccuuuccucuguccuccauccuucucccaggauggugaagggggaccugguacccagugauccccaccccaggauccuaaaucaugacuuaccugcuaauaaaaacucauuggaaaagugagaagaucuaaaaaaaaaaaaaaaaaaaaaaaaaaaaaaaaaaaaaaaaaaaaaaaaaaaaaaaaaaaaaaaaugcaucccccccccccccccccccccccccccccccaaaggcucuuuucagagccaccagaauu

SEQ ID NO: 10890 - RNA, 1074 nt, Artificial Sequence
  mRNA product Design f-5 comprising derived and/or modified sequence from HRSV(A2)__P03421.1__P (opt4)
gggagacuuucccauucuguagcagaauuugguguugccuguggucuuggucccgcggagaagcuuaccauggagaaguucgcccccgaguuccacggcgaggacgccaacaacagagccaccaaguuccuggagagcaucaagggcaaguucaccagccccaaggaccccaagaagaaggacagcaucaucagcgugaacagcaucgacaucgaggugaccaaggagagccccaucaccagcaacagcaccaucaucaaccccaccaacgagaccgacgacaccgccggcaacaagcccaacuaccagagaaagccccuggugagcuucaaggaggaccccacccccagcgacaaccccuucagcaagcuguacaaggagaccaucgagaccuucgacaacaacgaggaggagagcagcuacagcuacgaggagaucaacgaccagaccaacgacaacaucaccgccagacuggacagaaucgacgagaagcugagcgagauccugggcaugcugcacacccuggugguggccagcgccggccccaccagcgccagagacggcaucagagacgccaugaucggccugagagaggagaugaucgagaagaucagaaccgaggcccugaugaccaacgacagacuggaggccauggccagacugagaaacgaggagagcgagaagauggccaaggacaccagcgacgaggugagccugaaccccaccagcgagaagcugaacaaccugcuggagggcaacgacagcgacaacgaccugagccuggaggacuucugaggacuaguacuggcugcaucucccuuuccucuguccuccauccuucucccaggauggugaagggggaccugguacccagugauccccaccccaggauccuaaaucaugacuuaccugcuaauaaaaacucauuggaaaagugagaagaucuaaaaaaaaaaaaaaaaaaaaaaaaaaaaaaaaaaaaaaaaaaaaaaaaaaaaaaaaaaaaaaaaugcaucccccccccccccccccccccccccccccccaaaggcucuuuucagagccaccagaauu

SEQ ID NO: 10891 - RNA, 1074 nt, Artificial Sequence
  mRNA product Design f-5 comprising derived and/or modified sequence from HRSV(A2)__P03421.1__P (opt5)
gggagacuuucccauucuguagcagaauuugguguugccuguggucuuggucccgcggagaagcuuaccauggagaaguucgcccccgaauuucacggcgaggacgcuaacaauagagccaccaaauuccuggaaagcaucaaggggaaauuuacauccccuaaggauccgaaaaagaaggacucuauuaucagcgugaacuccauugauaucgaggucacgaaagaaucucccauuaccagcaauuccacaaucaucaacccuaccaaugagacagacgauaccgcgggaaacaagcccaauuaccagcggaaaccucucguuucuuucaaggaggaccccacaccuagcgauaacccguuuuccaaacuguauaaggaaaccauugagacguucgacaauaacgaagaggagagcucuuacuccuaugaagagaucaaugaucaaaccaacgacaauauuacagcucgccuugauagaaucgacgaaaagcugagcgagauucucggcaugcugcauacccuugugguggccucugccgggcccacauccgcucgggauggaauccgcgacgccaugauuggccugagagaagagaugaucgagaaaauccggaccgaagcucucaugacgaacgaccgccuggaggccauggcgagacugcggaaugaagagagcgaaaagauggccaaagauacaucugacgaggucucccucaacccuaccagcgagaagcugaacaaucuucuggaagggaacgauuccgacaaugaucucucucuggaggacuuuugaggacuaguacuggcugcaucucccuuuccucuguccuccauccuucucccaggauggugaagggggaccugguacccagugauccccaccccaggauccuaaaucaugacuuaccugcuaauaaaaacucauuggaaaagugagaagaucuaaaaaaaaaaaaaaaaaaaaaaaaaaaaaaaaaaaaaaaaaaaaaaaaaaaaaaaaaaaaaaaaugcaucccccccccccccccccccccccccccccccaaaggcucuuuucagagccaccagaauu

SEQ ID NO: 10892 - RNA, 1074 nt, Artificial Sequence
  mRNA product Design f-5 comprising derived and/or modified sequence from HRSV(A2)__P03421.1__P (opt6)
gggagacuuucccauucuguagcagaauuugguguugccuguggucuuggucccgcggagaagcuuaccauggaaaaauucgcaccagaauuucacggagaagacgcaaacaacagagcaacaaaauucuuagaaucaaucaaaggaaaauucacaagcccaaaagacccaaaaaaaaaagacucaauaauaagcguaaacucaauagacauagaaguaacaaaagaaagcccaauaacaagcaacagcacaauaauaaacccaacaaacgaaacagaugacacagcuggaaauaaaccaaacuaccaaagaaaaccccuagucagcuucaaagaagaccccacaccaucagacaacccauucagcaaacuauauaaagaaacaauagaaacauuugacaacaacgaagaagaaucaucauacucauacgaagaaauaaacgaccaaacaaacgacaacauaaccgcaagauuagacagaauagaugaaaaacuaucagaaauacuaggaaugcuacacacauuaguaguagcaagcgcaggaccaacaucagcaagagacggaauaagagacgcaaugauaggacucagagaagaaaugauagaaaaaauaagaacagaagcacuaaugacaaacgacagauuagaagcaauggcaagacuaagaaaugaagaaucggaaaaaauggcaaaagacacaucagacgaaguaagccuaaacccaacaucagaaaaauuaaauaaccuacuagaaggaaacgacagcgacaacgacuuaucacuagaagacuucuaaggacuaguacuggcugcaucucccuuuccucuguccuccauccuucucccaggauggugaagggggaccugguacccagugauccccaccccaggauccuaaaucaugacuuaccugcuaauaaaaacucauuggaaaagugagaagaucuaaaaaaaaaaaaaaaaaaaaaaaaaaaaaaaaaaaaaaaaaaaaaaaaaaaaaaaaaaaaaaaaugcaucccccccccccccccccccccccccccccccaaaggcucuuuucagagccaccagaauu

SEQ ID NO: 10893 - RNA, 1074 nt, Artificial Sequence
  mRNA product Design f-5 comprising derived and/or modified sequence from HRSV(A2)__P03421.1__P (opt11)
gggagacuuucccauucuguagcagaauuugguguugccuguggucuuggucccgcggagaagcuuaccauggaaaaauucgcgcccgaguuccacggcgaggacgcgaacaaccgcgcgacaaaguuccuagaaucaaucaagggcaaauucacgagcccgaaagaccccaagaaaaaggacucaaucauaagcgugaacucgaucgacaucgaggucacgaaagagagcccgaucacaagcaacagcaccauaauaaacccgaccaacgaaacagacgacaccgcgggcaacaaaccgaacuaccaaagaaaaccgcucgugagcuucaaagaagacccgaccccaagcgacaacccguucucaaaacuauacaaggaaacgaucgagaccuucgacaacaacgaggaagagagcucguacucguacgaggaaauaaacgaccaaacaaacgacaacauaaccgcacgccuagacaggaucgacgaaaaacucucggaaauacucgggaugcuacacacgcucguggucgcgagcgcaggcccgaccucggccagggacggcaucagggacgcaaugauaggccugcgagaggaaaugaucgagaaaauacgcaccgaagcacucaugaccaacgacagacucgaagccauggccaggcucaggaacgaagaauccgaaaagauggcgaaagacaccucggacgaggucucgcucaaccccacgagcgagaaacugaacaaccuacuggaagggaacgacagcgacaacgaccuuucccucgaggacuucugaggacuaguacuggcugcaucucccuuuccucuguccuccauccuucucccaggauggugaagggggaccugguacccagugauccccaccccaggauccuaaaucaugacuuaccugcuaauaaaaacucauuggaaaagugagaagaucuaaaaaaaaaaaaaaaaaaaaaaaaaaaaaaaaaaaaaaaaaaaaaaaaaaaaaaaaaaaaaaaaugcaucccccccccccccccccccccccccccccccaaaggcucuuuucagagccaccagaauu

SEQ ID NO: 10894 - RNA, 1070 nt, Artificial Sequence
  mRNA product Design g-1 comprising derived and/or modified sequence from HRSV(A2)__P03421.1__P (wt)
gggagacuuucccauucuguagcagaauuugguguugccuguggucuuggucccgcggagaagcuuaccauggaaaaguuugcuccugaauuccauggagaagaugcaaacaacagggcuacuaaauuccuagaaucaauaaagggcaaauucacaucacccaaagaucccaagaaaaaagauaguaucauaucugucaacucaauagauauagaaguaaccaaagaaagcccuauaacaucaaauucaacuauuaucaacccaacaaaugagacagaugauacugcagggaacaagcccaauuaucaaagaaaaccucuaguaaguuucaaagaagacccuacaccaagugauaaucccuuuucuaaacuauacaaagaaaccauagaaacauuugauaacaaugaagaagaauccagcuauucauacgaagaaauaaaugaucagacaaacgauaauauaacagcaagauuagauaggauugaugaaaaauuaagugaaauacuaggaaugcuucacacauuaguaguggcaagugcaggaccuacaucugcucgggaugguauaagagaugccaugauugguuuaagagaagaaaugauagaaaaaaucagaacugaagcauuaaugaccaaugacagauuagaagcuauggcaagacucaggaaugaggaaagugaaaagauggcaaaagacacaucagaugaagugucucucaauccaacaucagagaaauugaacaaccuauuggaagggaaugauagugacaaugaucuaucacuugaagauuucugaggacuaguggaagcauuuuccuggcugauuaaaagaaauuacucagcuauggucaucuguuccuguuagaaggcuaugcagcauauuauauacuaugcgcauguuaugaaaugcauaauaaaaaauuuuaaaaaaucuaaaagaucuaaaaaaaaaaaaaaaaaaaaaaaaaaaaaaaaaaaaaaaaaaaaaaaaaaaaaaaaaaaaaaaaugcaucccccccccccccccccccccccccccccccaaaggcucuuuucagagccaccagaauu

SEQ ID NO: 10895 - RNA, 1070 nt, Artificial Sequence
  mRNA product Design g-1 comprising derived and/or modified sequence from HRSV(A2)__P03421.1__P (opt1)
gggagacuuucccauucuguagcagaauuugguguugccuguggucuuggucccgcggagaagcuuaccauggagaaguucgcccccgaguuccacggcgaggacgccaacaaccgcgcgaccaaguuccuggagagcaucaaggggaaguucaccuccccgaaggaccccaagaagaaggacagcaucaucuccgugaacagcaucgacaucgaggucacgaaggagucccccaucaccagcaacuccaccaucaucaaccccaccaacgagacggacgacaccgccggcaacaagccgaacuaccagcggaagccccucgugagcuucaaggaggaccccacccccuccgacaacccguucagcaagcuguacaaggagaccaucgagacguucgacaacaacgaggaggaguccagcuacuccuacgaggagaucaacgaccagaccaacgacaacaucaccgcccgccuggaccggaucgacgagaagcucagcgagauccuggggaugcugcacacccucguggucgccuccgccggccccacgagcgcgcgcgacgggauccgggacgccaugaucggccugcgcgaggagaugaucgagaagauccggaccgaggcccugaugaccaacgaccgccucgaggccauggcgcggcugcgcaacgaggaguccgagaagauggccaaggacaccagcgacgaggugucccugaaccccacgagcgagaagcucaacaaccugcuggagggcaacgacagcgacaacgaccucucccuggaggacuucugaggacuaguggaagcauuuuccuggcugauuaaaagaaauuacucagcuauggucaucuguuccuguuagaaggcuaugcagcauauuauauacuaugcgcauguuaugaaaugcauaauaaaaaauuuuaaaaaaucuaaaagaucuaaaaaaaaaaaaaaaaaaaaaaaaaaaaaaaaaaaaaaaaaaaaaaaaaaaaaaaaaaaaaaaaugcaucccccccccccccccccccccccccccccccaaaggcucuuuucagagccaccagaauu

SEQ ID NO: 10896 - RNA, 1070 nt, Artificial Sequence
  mRNA product Design g-1 comprising derived and/or modified sequence from HRSV(A2)__P03421.1__P (opt2)
gggagacuuucccauucuguagcagaauuugguguugccuguggucuuggucccgcggagaagcuuaccauggagaaguucgcccccgaguuccacggcgaggacgccaacaaccgcgccaccaaguuccucgaguccaucaagggcaaguucaccucccccaaggaccccaagaagaaggacuccaucaucuccgucaacuccaucgacaucgaggucaccaaggagucccccaucaccuccaacuccaccaucaucaaccccaccaacgagaccgacgacaccgccggcaacaagcccaacuaccagcgcaagccccucgucuccuucaaggaggaccccacccccuccgacaaccccuucuccaagcucuacaaggagaccaucgagaccuucgacaacaacgaggaggaguccuccuacuccuacgaggagaucaacgaccagaccaacgacaacaucaccgcccgccucgaccgcaucgacgagaagcucuccgagauccucggcaugcuccacacccucgucgucgccuccgccggccccaccuccgcccgcgacggcauccgcgacgccaugaucggccuccgcgaggagaugaucgagaagauccgcaccgaggcccucaugaccaacgaccgccucgaggccauggcccgccuccgcaacgaggaguccgagaagauggccaaggacaccuccgacgaggucucccucaaccccaccuccgagaagcucaacaaccuccucgagggcaacgacuccgacaacgaccucucccucgaggacuucugaggacuaguggaagcauuuuccuggcugauuaaaagaaauuacucagcuauggucaucuguuccuguuagaaggcuaugcagcauauuauauacuaugcgcauguuaugaaaugcauaauaaaaaauuuuaaaaaaucuaaaagaucuaaaaaaaaaaaaaaaaaaaaaaaaaaaaaaaaaaaaaaaaaaaaaaaaaaaaaaaaaaaaaaaaugcaucccccccccccccccccccccccccccccccaaaggcucuuuucagagccaccagaauu

SEQ ID NO: 10897 - RNA, 1070 nt, Artificial Sequence
  mRNA product Design g-1 comprising derived and/or modified sequence from HRSV(A2)__P03421.1__P (opt3)
gggagacuuucccauucuguagcagaauuugguguugccuguggucuuggucccgcggagaagcuuaccauggagaaguucgcccccgaauuucacggcgaggacgcuaacaauagagcaaccaaauuccuggaaagcaucaaggggaaauuuacauccccuaaggauccgaaaaagaaggacucuauuauaucagugaacaguaucgauauugaggucacuaaagaaagcccaaucacguccaauucuaccauuaucaaccccacaaaugagacugacgauaccgccggaaacaagccuaauuaccagaggaaaccacucguuucguucaaggaggaccccacaccuucagauaacccauuuagcaaacuuuauaaggaaaccauagagacuuucgacaauaacgaagaggagaguuccuacucuuaugaagagaucaaugaucaaacaaacgacaauauuaccgcgcggcuggaucgcaucgacgaaaaguugagcgagauuuuagguaugcugcauacgcuagugguagcuuccgccggccccacuucagcacgagaugggauccgugacgccaugauaggacucagagaagagaugauugagaaaaucaggaccgaagcucugaugacaaacgaccggcuugaggcaauggcccgccugagaaaugaagagagugaaaagauggcuaaagauacuagcgacgaggugucuuugaacccuaccuccgagaagcucaacaaucugcuggaaggcaacgauucagacaaugaucucagcuuagaggacuuuugaggacuaguggaagcauuuuccuggcugauuaaaagaaauuacucagcuauggucaucuguuccuguuagaaggcuaugcagcauauuauauacuaugcgcauguuaugaaaugcauaauaaaaaauuuuaaaaaaucuaaaagaucuaaaaaaaaaaaaaaaaaaaaaaaaaaaaaaaaaaaaaaaaaaaaaaaaaaaaaaaaaaaaaaaaugcaucccccccccccccccccccccccccccccccaaaggcucuuuucagagccaccagaauu

SEQ ID NO: 10898 - RNA, 1070 nt, Artificial Sequence
  mRNA product Design g-1 comprising derived and/or modified sequence from HRSV(A2)__P03421.1__P (opt4)
gggagacuuucccauucuguagcagaauuugguguugccuguggucuuggucccgcggagaagcuuaccauggagaaguucgcccccgaguuccacggcgaggacgccaacaacagagccaccaaguuccuggagagcaucaagggcaaguucaccagccccaaggaccccaagaagaaggacagcaucaucagcgugaacagcaucgacaucgaggugaccaaggagagccccaucaccagcaacagcaccaucaucaaccccaccaacgagaccgacgacaccgccggcaacaagcccaacuaccagagaaagccccuggugagcuucaaggaggaccccacccccagcgacaaccccuucagcaagcuguacaaggagaccaucgagaccuucgacaacaacgaggaggagagcagcuacagcuacgaggagaucaacgaccagaccaacgacaacaucaccgccagacuggacagaaucgacgagaagcugagcgagauccugggcaugcugcacacccuggugguggccagcgccggccccaccagcgccagagacggcaucagagacgccaugaucggccugagagaggagaugaucgagaagaucagaaccgaggcccugaugaccaacgacagacuggaggccauggccagacugagaaacgaggagagcgagaagauggccaaggacaccagcgacgaggugagccugaaccccaccagcgagaagcugaacaaccugcuggagggcaacgacagcgacaacgaccugagccuggaggacuucugaggacuaguggaagcauuuuccuggcugauuaaaagaaauuacucagcuauggucaucuguuccuguuagaaggcuaugcagcauauuauauacuaugcgcauguuaugaaaugcauaauaaaaaauuuuaaaaaaucuaaaagaucuaaaaaaaaaaaaaaaaaaaaaaaaaaaaaaaaaaaaaaaaaaaaaaaaaaaaaaaaaaaaaaaaugcaucccccccccccccccccccccccccccccccaaaggcucuuuucagagccaccagaauu

SEQ ID NO: 10899 - RNA, 1070 nt, Artificial Sequence
  mRNA product Design g-1 comprising derived and/or modified sequence from HRSV(A2)__P03421.1__P (opt5)
gggagacuuucccauucuguagcagaauuugguguugccuguggucuuggucccgcggagaagcuuaccauggagaaguucgcccccgaauuucacggcgaggacgcuaacaauagagccaccaaauuccuggaaagcaucaaggggaaauuuacauccccuaaggauccgaaaaagaaggacucuauuaucagcgugaacuccauugauaucgaggucacgaaagaaucucccauuaccagcaauuccacaaucaucaacccuaccaaugagacagacgauaccgcgggaaacaagcccaauuaccagcggaaaccucucguuucuuucaaggaggaccccacaccuagcgauaacccguuuuccaaacuguauaaggaaaccauugagacguucgacaauaacgaagaggagagcucuuacuccuaugaagagaucaaugaucaaaccaacgacaauauuacagcucgccuugauagaaucgacgaaaagcugagcgagauucucggcaugcugcauacccuugugguggccucugccgggcccacauccgcucgggauggaauccgcgacgccaugauuggccugagagaagagaugaucgagaaaauccggaccgaagcucucaugacgaacgaccgccuggaggccauggcgagacugcggaaugaagagagcgaaaagauggccaaagauacaucugacgaggucucccucaacccuaccagcgagaagcugaacaaucuucuggaagggaacgauuccgacaaugaucucucucuggaggacuuuugaggacuaguggaagcauuuuccuggcugauuaaaagaaauuacucagcuauggucaucuguuccuguuagaaggcuaugcagcauauuauauacuaugcgcauguuaugaaaugcauaauaaaaaauuuuaaaaaaucuaaaagaucuaaaaaaaaaaaaaaaaaaaaaaaaaaaaaaaaaaaaaaaaaaaaaaaaaaaaaaaaaaaaaaaaugcaucccccccccccccccccccccccccccccccaaaggcucuuuucagagccaccagaauu

SEQ ID NO: 10900 - RNA, 1070 nt, Artificial Sequence
  mRNA product Design g-1 comprising derived and/or modified sequence from HRSV(A2)__P03421.1__P (opt6)
gggagacuuucccauucuguagcagaauuugguguugccuguggucuuggucccgcggagaagcuuaccauggaaaaauucgcaccagaauuucacggagaagacgcaaacaacagagcaacaaaauucuuagaaucaaucaaaggaaaauucacaagcccaaaagacccaaaaaaaaaagacucaauaauaagcguaaacucaauagacauagaaguaacaaaagaaagcccaauaacaagcaacagcacaauaauaaacccaacaaacgaaacagaugacacagcuggaaauaaaccaaacuaccaaagaaaaccccuagucagcuucaaagaagaccccacaccaucagacaacccauucagcaaacuauauaaagaaacaauagaaacauuugacaacaacgaagaagaaucaucauacucauacgaagaaauaaacgaccaaacaaacgacaacauaaccgcaagauuagacagaauagaugaaaaacuaucagaaauacuaggaaugcuacacacauuaguaguagcaagcgcaggaccaacaucagcaagagacggaauaagagacgcaaugauaggacucagagaagaaaugauagaaaaaauaagaacagaagcacuaaugacaaacgacagauuagaagcaauggcaagacuaagaaaugaagaaucggaaaaaauggcaaaagacacaucagacgaaguaagccuaaacccaacaucagaaaaauuaaauaaccuacuagaaggaaacgacagcgacaacgacuuaucacuagaagacuucuaaggacuaguggaagcauuuuccuggcugauuaaaagaaauuacucagcuauggucaucuguuccuguuagaaggcuaugcagcauauuauauacuaugcgcauguuaugaaaugcauaauaaaaaauuuuaaaaaaucuaaaagaucuaaaaaaaaaaaaaaaaaaaaaaaaaaaaaaaaaaaaaaaaaaaaaaaaaaaaaaaaaaaaaaaaugcaucccccccccccccccccccccccccccccccaaaggcucuuuucagagccaccagaauu

SEQ ID NO: 10901 - RNA, 1070 nt, Artificial Sequence
  mRNA product Design g-1 comprising derived and/or modified sequence from HRSV(A2)__P03421.1__P (opt11)
gggagacuuucccauucuguagcagaauuugguguugccuguggucuuggucccgcggagaagcuuaccauggaaaaauucgcgcccgaguuccacggcgaggacgcgaacaaccgcgcgacaaaguuccuagaaucaaucaagggcaaauucacgagcccgaaagaccccaagaaaaaggacucaaucauaagcgugaacucgaucgacaucgaggucacgaaagagagcccgaucacaagcaacagcaccauaauaaacccgaccaacgaaacagacgacaccgcgggcaacaaaccgaacuaccaaagaaaaccgcucgugagcuucaaagaagacccgaccccaagcgacaacccguucucaaaacuauacaaggaaacgaucgagaccuucgacaacaacgaggaagagagcucguacucguacgaggaaauaaacgaccaaacaaacgacaacauaaccgcacgccuagacaggaucgacgaaaaacucucggaaauacucgggaugcuacacacgcucguggucgcgagcgcaggcccgaccucggccagggacggcaucagggacgcaaugauaggccugcgagaggaaaugaucgagaaaauacgcaccgaagcacucaugaccaacgacagacucgaagccauggccaggcucaggaacgaagaauccgaaaagauggcgaaagacaccucggacgaggucucgcucaaccccacgagcgagaaacugaacaaccuacuggaagggaacgacagcgacaacgaccuuucccucgaggacuucugaggacuaguggaagcauuuuccuggcugauuaaaagaaauuacucagcuauggucaucuguuccuguuagaaggcuaugcagcauauuauauacuaugcgcauguuaugaaaugcauaauaaaaaauuuuaaaaaaucuaaaagaucuaaaaaaaaaaaaaaaaaaaaaaaaaaaaaaaaaaaaaaaaaaaaaaaaaaaaaaaaaaaaaaaaugcaucccccccccccccccccccccccccccccccaaaggcucuuuucagagccaccagaauu

SEQ ID NO: 10902 - RNA, 1085 nt, Artificial Sequence
  mRNA product Design g-2 comprising derived and/or modified sequence from HRSV(A2)__P03421.1__P (wt)
gggagaguccgcucagccagguugcagaagcggcuuagcguguguccuaaucuucucucugcguguagguaggccugugccgcaaacaagcuuaccauggaaaaguuugcuccugaauuccauggagaagaugcaaacaacagggcuacuaaauuccuagaaucaauaaagggcaaauucacaucacccaaagaucccaagaaaaaagauaguaucauaucugucaacucaauagauauagaaguaaccaaagaaagcccuauaacaucaaauucaacuauuaucaacccaacaaaugagacagaugauacugcagggaacaagcccaauuaucaaagaaaaccucuaguaaguuucaaagaagacccuacaccaagugauaaucccuuuucuaaacuauacaaagaaaccauagaaacauuugauaacaaugaagaagaauccagcuauucauacgaagaaauaaaugaucagacaaacgauaauauaacagcaagauuagauaggauugaugaaaaauuaagugaaauacuaggaaugcuucacacauuaguaguggcaagugcaggaccuacaucugcucgggaugguauaagagaugccaugauugguuuaagagaagaaaugauagaaaaaaucagaacugaagcauuaaugaccaaugacagauuagaagcuauggcaagacucaggaaugaggaaagugaaaagauggcaaaagacacaucagaugaagugucucucaauccaacaucagagaaauugaacaaccuauuggaagggaaugauagugacaaugaucuaucacuugaagauuucugaggacuaguaauaaggaaacuguaugaaugucugugggcaggaagugaagagauccuucuguaaagguuuuuggaauuaugucugcugaauaauaaacuuuuuugaaauaauaaaucugguagaaaaaugagaucuaaaaaaaaaaaaaaaaaaaaaaaaaaaaaaaaaaaaaaaaaaaaaaaaaaaaaaaaaaaaaaaaugcaucccccccccccccccccccccccccccccccaaaggcucuuuucagagccaccagaauu

SEQ ID NO: 10903 - RNA, 1085 nt, Artificial Sequence
  mRNA product Design g-2 comprising derived and/or modified sequence from HRSV(A2)__P03421.1__P (opt1)
gggagaguccgcucagccagguugcagaagcggcuuagcguguguccuaaucuucucucugcguguagguaggccugugccgcaaacaagcuuaccauggagaaguucgcccccgaguuccacggcgaggacgccaacaaccgcgcgaccaaguuccuggagagcaucaaggggaaguucaccuccccgaaggaccccaagaagaaggacagcaucaucuccgugaacagcaucgacaucgaggucacgaaggagucccccaucaccagcaacuccaccaucaucaaccccaccaacgagacggacgacaccgccggcaacaagccgaacuaccagcggaagccccucgugagcuucaaggaggaccccacccccuccgacaacccguucagcaagcuguacaaggagaccaucgagacguucgacaacaacgaggaggaguccagcuacuccuacgaggagaucaacgaccagaccaacgacaacaucaccgcccgccuggaccggaucgacgagaagcucagcgagauccuggggaugcugcacacccucguggucgccuccgccggccccacgagcgcgcgcgacgggauccgggacgccaugaucggccugcgcgaggagaugaucgagaagauccggaccgaggcccugaugaccaacgaccgccucgaggccauggcgcggcugcgcaacgaggaguccgagaagauggccaaggacaccagcgacgaggugucccugaaccccacgagcgagaagcucaacaaccugcuggagggcaacgacagcgacaacgaccucucccuggaggacuucugaggacuaguaauaaggaaacuguaugaaugucugugggcaggaagugaagagauccuucuguaaagguuuuuggaauuaugucugcugaauaauaaacuuuuuugaaauaauaaaucugguagaaaaaugagaucuaaaaaaaaaaaaaaaaaaaaaaaaaaaaaaaaaaaaaaaaaaaaaaaaaaaaaaaaaaaaaaaaugcaucccccccccccccccccccccccccccccccaaaggcucuuuucagagccaccagaauu

SEQ ID NO: 10904 - RNA, 1085 nt, Artificial Sequence
  mRNA product Design g-2 comprising derived and/or modified sequence from HRSV(A2)__P03421.1__P (opt2)
gggagaguccgcucagccagguugcagaagcggcuuagcguguguccuaaucuucucucugcguguagguaggccugugccgcaaacaagcuuaccauggagaaguucgcccccgaguuccacggcgaggacgccaacaaccgcgccaccaaguuccucgaguccaucaagggcaaguucaccucccccaaggaccccaagaagaaggacuccaucaucuccgucaacuccaucgacaucgaggucaccaaggagucccccaucaccuccaacuccaccaucaucaaccccaccaacgagaccgacgacaccgccggcaacaagcccaacuaccagcgcaagccccucgucuccuucaaggaggaccccacccccuccgacaaccccuucuccaagcucuacaaggagaccaucgagaccuucgacaacaacgaggaggaguccuccuacuccuacgaggagaucaacgaccagaccaacgacaacaucaccgcccgccucgaccgcaucgacgagaagcucuccgagauccucggcaugcuccacacccucgucgucgccuccgccggccccaccuccgcccgcgacggcauccgcgacgccaugaucggccuccgcgaggagaugaucgagaagauccgcaccgaggcccucaugaccaacgaccgccucgaggccauggcccgccuccgcaacgaggaguccgagaagauggccaaggacaccuccgacgaggucucccucaaccccaccuccgagaagcucaacaaccuccucgagggcaacgacuccgacaacgaccucucccucgaggacuucugaggacuaguaauaaggaaacuguaugaaugucugugggcaggaagugaagagauccuucuguaaagguuuuuggaauuaugucugcugaauaauaaacuuuuuugaaauaauaaaucugguagaaaaaugagaucuaaaaaaaaaaaaaaaaaaaaaaaaaaaaaaaaaaaaaaaaaaaaaaaaaaaaaaaaaaaaaaaaugcaucccccccccccccccccccccccccccccccaaaggcucuuuucagagccaccagaauu

SEQ ID NO: 10905 - RNA, 1085 nt, Artificial Sequence
  mRNA product Design g-2 comprising derived and/or modified sequence from HRSV(A2)__P03421.1__P (opt3)
gggagaguccgcucagccagguugcagaagcggcuuagcguguguccuaaucuucucucugcguguagguaggccugugccgcaaacaagcuuaccauggagaaguucgcccccgaauuucacggcgaggacgcuaacaauagagcaaccaaauuccuggaaagcaucaaggggaaauuuacauccccuaaggauccgaaaaagaaggacucuauuauaucagugaacaguaucgauauugaggucacuaaagaaagcccaaucacguccaauucuaccauuaucaaccccacaaaugagacugacgauaccgccggaaacaagccuaauuaccagaggaaaccacucguuucguucaaggaggaccccacaccuucagauaacccauuuagcaaacuuuauaaggaaaccauagagacuuucgacaauaacgaagaggagaguuccuacucuuaugaagagaucaaugaucaaacaaacgacaauauuaccgcgcggcuggaucgcaucgacgaaaaguugagcgagauuuuagguaugcugcauacgcuagugguagcuuccgccggccccacuucagcacgagaugggauccgugacgccaugauaggacucagagaagagaugauugagaaaaucaggaccgaagcucugaugacaaacgaccggcuugaggcaauggcccgccugagaaaugaagagagugaaaagauggcuaaagauacuagcgacgaggugucuuugaacccuaccuccgagaagcucaacaaucugcuggaaggcaacgauucagacaaugaucucagcuuagaggacuuuugaggacuaguaauaaggaaacuguaugaaugucugugggcaggaagugaagagauccuucuguaaagguuuuuggaauuaugucugcugaauaauaaacuuuuuugaaauaauaaaucugguagaaaaaugagaucuaaaaaaaaaaaaaaaaaaaaaaaaaaaaaaaaaaaaaaaaaaaaaaaaaaaaaaaaaaaaaaaaugcaucccccccccccccccccccccccccccccccaaaggcucuuuucagagccaccagaauu

SEQ ID NO: 10906 - RNA, 1085 nt, Artificial Sequence
  mRNA product Design g-2 comprising derived and/or modified sequence from HRSV(A2)__P03421.1__P (opt4)
gggagaguccgcucagccagguugcagaagcggcuuagcguguguccuaaucuucucucugcguguagguaggccugugccgcaaacaagcuuaccauggagaaguucgcccccgaguuccacggcgaggacgccaacaacagagccaccaaguuccuggagagcaucaagggcaaguucaccagccccaaggaccccaagaagaaggacagcaucaucagcgugaacagcaucgacaucgaggugaccaaggagagccccaucaccagcaacagcaccaucaucaaccccaccaacgagaccgacgacaccgccggcaacaagcccaacuaccagagaaagccccuggugagcuucaaggaggaccccacccccagcgacaaccccuucagcaagcuguacaaggagaccaucgagaccuucgacaacaacgaggaggagagcagcuacagcuacgaggagaucaacgaccagaccaacgacaacaucaccgccagacuggacagaaucgacgagaagcugagcgagauccugggcaugcugcacacccuggugguggccagcgccggccccaccagcgccagagacggcaucagagacgccaugaucggccugagagaggagaugaucgagaagaucagaaccgaggcccugaugaccaacgacagacuggaggccauggccagacugagaaacgaggagagcgagaagauggccaaggacaccagcgacgaggugagccugaaccccaccagcgagaagcugaacaaccugcuggagggcaacgacagcgacaacgaccugagccuggaggacuucugaggacuaguaauaaggaaacuguaugaaugucugugggcaggaagugaagagauccuucuguaaagguuuuuggaauuaugucugcugaauaauaaacuuuuuugaaauaauaaaucugguagaaaaaugagaucuaaaaaaaaaaaaaaaaaaaaaaaaaaaaaaaaaaaaaaaaaaaaaaaaaaaaaaaaaaaaaaaaugcaucccccccccccccccccccccccccccccccaaaggcucuuuucagagccaccagaauu

SEQ ID NO: 10907 - RNA, 1085 nt, Artificial Sequence
  mRNA product Design g-2 comprising derived and/or modified sequence from HRSV(A2)__P03421.1__P (opt5)
gggagaguccgcucagccagguugcagaagcggcuuagcguguguccuaaucuucucucugcguguagguaggccugugccgcaaacaagcuuaccauggagaaguucgcccccgaauuucacggcgaggacgcuaacaauagagccaccaaauuccuggaaagcaucaaggggaaauuuacauccccuaaggauccgaaaaagaaggacucuauuaucagcgugaacuccauugauaucgaggucacgaaagaaucucccauuaccagcaauuccacaaucaucaacccuaccaaugagacagacgauaccgcgggaaacaagcccaauuaccagcggaaaccucucguuucuuucaaggaggaccccacaccuagcgauaacccguuuuccaaacuguauaaggaaaccauugagacguucgacaauaacgaagaggagagcucuuacuccuaugaagagaucaaugaucaaaccaacgacaauauuacagcucgccuugauagaaucgacgaaaagcugagcgagauucucggcaugcugcauacccuugugguggccucugccgggcccacauccgcucgggauggaauccgcgacgccaugauuggccugagagaagagaugaucgagaaaauccggaccgaagcucucaugacgaacgaccgccuggaggccauggcgagacugcggaaugaagagagcgaaaagauggccaaagauacaucugacgaggucucccucaacccuaccagcgagaagcugaacaaucuucuggaagggaacgauuccgacaaugaucucucucuggaggacuuuugaggacuaguaauaaggaaacuguaugaaugucugugggcaggaagugaagagauccuucuguaaagguuuuuggaauuaugucugcugaauaauaaacuuuuuugaaauaauaaaucugguagaaaaaugagaucuaaaaaaaaaaaaaaaaaaaaaaaaaaaaaaaaaaaaaaaaaaaaaaaaaaaaaaaaaaaaaaaaugcaucccccccccccccccccccccccccccccccaaaggcucuuuucagagccaccagaauu

SEQ ID NO: 10908 - RNA, 1085 nt, Artificial Sequence
  mRNA product Design g-2 comprising derived and/or modified sequence from HRSV(A2)__P03421.1__P (opt6)
gggagaguccgcucagccagguugcagaagcggcuuagcguguguccuaaucuucucucugcguguagguaggccugugccgcaaacaagcuuaccauggaaaaauucgcaccagaauuucacggagaagacgcaaacaacagagcaacaaaauucuuagaaucaaucaaaggaaaauucacaagcccaaaagacccaaaaaaaaaagacucaauaauaagcguaaacucaauagacauagaaguaacaaaagaaagcccaauaacaagcaacagcacaauaauaaacccaacaaacgaaacagaugacacagcuggaaauaaaccaaacuaccaaagaaaaccccuagucagcuucaaagaagaccccacaccaucagacaacccauucagcaaacuauauaaagaaacaauagaaacauuugacaacaacgaagaagaaucaucauacucauacgaagaaauaaacgaccaaacaaacgacaacauaaccgcaagauuagacagaauagaugaaaaacuaucagaaauacuaggaaugcuacacacauuaguaguagcaagcgcaggaccaacaucagcaagagacggaauaagagacgcaaugauaggacucagagaagaaaugauagaaaaaauaagaacagaagcacuaaugacaaacgacagauuagaagcaauggcaagacuaagaaaugaagaaucggaaaaaauggcaaaagacacaucagacgaaguaagccuaaacccaacaucagaaaaauuaaauaaccuacuagaaggaaacgacagcgacaacgacuuaucacuagaagacuucuaaggacuaguaauaaggaaacuguaugaaugucugugggcaggaagugaagagauccuucuguaaagguuuuuggaauuaugucugcugaauaauaaacuuuuuugaaauaauaaaucugguagaaaaaugagaucuaaaaaaaaaaaaaaaaaaaaaaaaaaaaaaaaaaaaaaaaaaaaaaaaaaaaaaaaaaaaaaaaugcaucccccccccccccccccccccccccccccccaaaggcucuuuucagagccaccagaauu

SEQ ID NO: 10909 - RNA, 1085 nt, Artificial Sequence
  mRNA product Design g-2 comprising derived and/or modified sequence from HRSV(A2)__P03421.1__P (opt11)
gggagaguccgcucagccagguugcagaagcggcuuagcguguguccuaaucuucucucugcguguagguaggccugugccgcaaacaagcuuaccauggaaaaauucgcgcccgaguuccacggcgaggacgcgaacaaccgcgcgacaaaguuccuagaaucaaucaagggcaaauucacgagcccgaaagaccccaagaaaaaggacucaaucauaagcgugaacucgaucgacaucgaggucacgaaagagagcccgaucacaagcaacagcaccauaauaaacccgaccaacgaaacagacgacaccgcgggcaacaaaccgaacuaccaaagaaaaccgcucgugagcuucaaagaagacccgaccccaagcgacaacccguucucaaaacuauacaaggaaacgaucgagaccuucgacaacaacgaggaagagagcucguacucguacgaggaaauaaacgaccaaacaaacgacaacauaaccgcacgccuagacaggaucgacgaaaaacucucggaaauacucgggaugcuacacacgcucguggucgcgagcgcaggcccgaccucggccagggacggcaucagggacgcaaugauaggccugcgagaggaaaugaucgagaaaauacgcaccgaagcacucaugaccaacgacagacucgaagccauggccaggcucaggaacgaagaauccgaaaagauggcgaaagacaccucggacgaggucucgcucaaccccacgagcgagaaacugaacaaccuacuggaagggaacgacagcgacaacgaccuuucccucgaggacuucugaggacuaguaauaaggaaacuguaugaaugucugugggcaggaagugaagagauccuucuguaaagguuuuuggaauuaugucugcugaauaauaaacuuuuuugaaauaauaaaucugguagaaaaaugagaucuaaaaaaaaaaaaaaaaaaaaaaaaaaaaaaaaaaaaaaaaaaaaaaaaaaaaaaaaaaaaaaaaugcaucccccccccccccccccccccccccccccccaaaggcucuuuucagagccaccagaauu

SEQ ID NO: 10910 - RNA, 1317 nt, Artificial Sequence
  mRNA product Design g-3 comprising derived and/or modified sequence from HRSV(A2)__P03421.1__P (wt)
gggagaguccgcucagccagguugcagaagcggcuuagcguguguccuaaucuucucucugcguguagguaggccugugccgcaaacaagcuuaccauggaaaaguuugcuccugaauuccauggagaagaugcaaacaacagggcuacuaaauuccuagaaucaauaaagggcaaauucacaucacccaaagaucccaagaaaaaagauaguaucauaucugucaacucaauagauauagaaguaaccaaagaaagcccuauaacaucaaauucaacuauuaucaacccaacaaaugagacagaugauacugcagggaacaagcccaauuaucaaagaaaaccucuaguaaguuucaaagaagacccuacaccaagugauaaucccuuuucuaaacuauacaaagaaaccauagaaacauuugauaacaaugaagaagaauccagcuauucauacgaagaaauaaaugaucagacaaacgauaauauaacagcaagauuagauaggauugaugaaaaauuaagugaaauacuaggaaugcuucacacauuaguaguggcaagugcaggaccuacaucugcucgggaugguauaagagaugccaugauugguuuaagagaagaaaugauagaaaaaaucagaacugaagcauuaaugaccaaugacagauuagaagcuauggcaagacucaggaaugaggaaagugaaaagauggcaaaagacacaucagaugaagugucucucaauccaacaucagagaaauugaacaaccuauuggaagggaaugauagugacaaugaucuaucacuugaagauuucugaggacuagugaagggaacacccaaauuuaauucagccuuaagcacaauuaauuaagagugaaacguaauuguacaagcaguuggucacccaccauagggcaugaucaacaccgcaaccuuuccuuuuucccccagugauucugaaaaaccccucuucccuucagcuugcuuagauguuccaaauuuaguaagcuuaaggcggccuacagaagaaaaagaaaaaaaaggccacaaaaguucccucucacuuucaguaaauaaaauaaaagcagcaacagaaauaaagaaauaaaugaaauucaaaaugaaauaaauauuguguugugcagcauuaaaaaaucaauaaaaauuaaaaaugagcaagaucuaaaaaaaaaaaaaaaaaaaaaaaaaaaaaaaaaaaaaaaaaaaaaaaaaaaaaaaaaaaaaaaaugcaucccccccccccccccccccccccccccccccaaaggcucuuuucagagccaccagaauu

SEQ ID NO: 10911 - RNA, 1317 nt, Artificial Sequence
  mRNA product Design g-3 comprising derived and/or modified sequence from HRSV(A2)__P03421.1__P (opt1)
gggagaguccgcucagccagguugcagaagcggcuuagcguguguccuaaucuucucucugcguguagguaggccugugccgcaaacaagcuuaccauggagaaguucgcccccgaguuccacggcgaggacgccaacaaccgcgcgaccaaguuccuggagagcaucaaggggaaguucaccuccccgaaggaccccaagaagaaggacagcaucaucuccgugaacagcaucgacaucgaggucacgaaggagucccccaucaccagcaacuccaccaucaucaaccccaccaacgagacggacgacaccgccggcaacaagccgaacuaccagcggaagccccucgugagcuucaaggaggaccccacccccuccgacaacccguucagcaagcuguacaaggagaccaucgagacguucgacaacaacgaggaggaguccagcuacuccuacgaggagaucaacgaccagaccaacgacaacaucaccgcccgccuggaccggaucgacgagaagcucagcgagauccuggggaugcugcacacccucguggucgccuccgccggccccacgagcgcgcgcgacgggauccgggacgccaugaucggccugcgcgaggagaugaucgagaagauccggaccgaggcccugaugaccaacgaccgccucgaggccauggcgcggcugcgcaacgaggaguccgagaagauggccaaggacaccagcgacgaggugucccugaaccccacgagcgagaagcucaacaaccugcuggagggcaacgacagcgacaacgaccucucccuggaggacuucugaggacuagugaagggaacacccaaauuuaauucagccuuaagcacaauuaauuaagagugaaacguaauuguacaagcaguuggucacccaccauagggcaugaucaacaccgcaaccuuuccuuuuucccccagugauucugaaaaaccccucuucccuucagcuugcuuagauguuccaaauuuaguaagcuuaaggcggccuacagaagaaaaagaaaaaaaaggccacaaaaguucccucucacuuucaguaaauaaaauaaaagcagcaacagaaauaaagaaauaaaugaaauucaaaaugaaauaaauauuguguugugcagcauuaaaaaaucaauaaaaauuaaaaaugagcaagaucuaaaaaaaaaaaaaaaaaaaaaaaaaaaaaaaaaaaaaaaaaaaaaaaaaaaaaaaaaaaaaaaaugcaucccccccccccccccccccccccccccccccaaaggcucuuuucagagccaccagaauu

SEQ ID NO: 10912 - RNA, 1317 nt, Artificial Sequence
  mRNA product Design g-3 comprising derived and/or modified sequence from HRSV(A2)__P03421.1__P (opt2)
gggagaguccgcucagccagguugcagaagcggcuuagcguguguccuaaucuucucucugcguguagguaggccugugccgcaaacaagcuuaccauggagaaguucgcccccgaguuccacggcgaggacgccaacaaccgcgccaccaaguuccucgaguccaucaagggcaaguucaccucccccaaggaccccaagaagaaggacuccaucaucuccgucaacuccaucgacaucgaggucaccaaggagucccccaucaccuccaacuccaccaucaucaaccccaccaacgagaccgacgacaccgccggcaacaagcccaacuaccagcgcaagccccucgucuccuucaaggaggaccccacccccuccgacaaccccuucuccaagcucuacaaggagaccaucgagaccuucgacaacaacgaggaggaguccuccuacuccuacgaggagaucaacgaccagaccaacgacaacaucaccgcccgccucgaccgcaucgacgagaagcucuccgagauccucggcaugcuccacacccucgucgucgccuccgccggccccaccuccgcccgcgacggcauccgcgacgccaugaucggccuccgcgaggagaugaucgagaagauccgcaccgaggcccucaugaccaacgaccgccucgaggccauggcccgccuccgcaacgaggaguccgagaagauggccaaggacaccuccgacgaggucucccucaaccccaccuccgagaagcucaacaaccuccucgagggcaacgacuccgacaacgaccucucccucgaggacuucugaggacuagugaagggaacacccaaauuuaauucagccuuaagcacaauuaauuaagagugaaacguaauuguacaagcaguuggucacccaccauagggcaugaucaacaccgcaaccuuuccuuuuucccccagugauucugaaaaaccccucuucccuucagcuugcuuagauguuccaaauuuaguaagcuuaaggcggccuacagaagaaaaagaaaaaaaaggccacaaaaguucccucucacuuucaguaaauaaaauaaaagcagcaacagaaauaaagaaauaaaugaaauucaaaaugaaauaaauauuguguugugcagcauuaaaaaaucaauaaaaauuaaaaaugagcaagaucuaaaaaaaaaaaaaaaaaaaaaaaaaaaaaaaaaaaaaaaaaaaaaaaaaaaaaaaaaaaaaaaaugcaucccccccccccccccccccccccccccccccaaaggcucuuuucagagccaccagaauu

SEQ ID NO: 10913 - RNA, 1317 nt, Artificial Sequence
  mRNA product Design g-3 comprising derived and/or modified sequence from HRSV(A2)__P03421.1__P (opt3)
gggagaguccgcucagccagguugcagaagcggcuuagcguguguccuaaucuucucucugcguguagguaggccugugccgcaaacaagcuuaccauggagaaguucgcccccgaauuucacggcgaggacgcuaacaauagagcaaccaaauuccuggaaagcaucaaggggaaauuuacauccccuaaggauccgaaaaagaaggacucuauuauaucagugaacaguaucgauauugaggucacuaaagaaagcccaaucacguccaauucuaccauuaucaaccccacaaaugagacugacgauaccgccggaaacaagccuaauuaccagaggaaaccacucguuucguucaaggaggaccccacaccuucagauaacccauuuagcaaacuuuauaaggaaaccauagagacuuucgacaauaacgaagaggagaguuccuacucuuaugaagagaucaaugaucaaacaaacgacaauauuaccgcgcggcuggaucgcaucgacgaaaaguugagcgagauuuuagguaugcugcauacgcuagugguagcuuccgccggccccacuucagcacgagaugggauccgugacgccaugauaggacucagagaagagaugauugagaaaaucaggaccgaagcucugaugacaaacgaccggcuugaggcaauggcccgccugagaaaugaagagagugaaaagauggcuaaagauacuagcgacgaggugucuuugaacccuaccuccgagaagcucaacaaucugcuggaaggcaacgauucagacaaugaucucagcuuagaggacuuuugaggacuagugaagggaacacccaaauuuaauucagccuuaagcacaauuaauuaagagugaaacguaauuguacaagcaguuggucacccaccauagggcaugaucaacaccgcaaccuuuccuuuuucccccagugauucugaaaaaccccucuucccuucagcuugcuuagauguuccaaauuuaguaagcuuaaggcggccuacagaagaaaaagaaaaaaaaggccacaaaaguucccucucacuuucaguaaauaaaauaaaagcagcaacagaaauaaagaaauaaaugaaauucaaaaugaaauaaauauuguguugugcagcauuaaaaaaucaauaaaaauuaaaaaugagcaagaucuaaaaaaaaaaaaaaaaaaaaaaaaaaaaaaaaaaaaaaaaaaaaaaaaaaaaaaaaaaaaaaaaugcaucccccccccccccccccccccccccccccccaaaggcucuuuucagagccaccagaauu

SEQ ID NO: 10914 - RNA, 1317 nt, Artificial Sequence
  mRNA product Design g-3 comprising derived and/or modified sequence from HRSV(A2)__P03421.1__P (opt4)
gggagaguccgcucagccagguugcagaagcggcuuagcguguguccuaaucuucucucugcguguagguaggccugugccgcaaacaagcuuaccauggagaaguucgcccccgaguuccacggcgaggacgccaacaacagagccaccaaguuccuggagagcaucaagggcaaguucaccagccccaaggaccccaagaagaaggacagcaucaucagcgugaacagcaucgacaucgaggugaccaaggagagccccaucaccagcaacagcaccaucaucaaccccaccaacgagaccgacgacaccgccggcaacaagcccaacuaccagagaaagccccuggugagcuucaaggaggaccccacccccagcgacaaccccuucagcaagcuguacaaggagaccaucgagaccuucgacaacaacgaggaggagagcagcuacagcuacgaggagaucaacgaccagaccaacgacaacaucaccgccagacuggacagaaucgacgagaagcugagcgagauccugggcaugcugcacacccuggugguggccagcgccggccccaccagcgccagagacggcaucagagacgccaugaucggccugagagaggagaugaucgagaagaucagaaccgaggcccugaugaccaacgacagacuggaggccauggccagacugagaaacgaggagagcgagaagauggccaaggacaccagcgacgaggugagccugaaccccaccagcgagaagcugaacaaccugcuggagggcaacgacagcgacaacgaccugagccuggaggacuucugaggacuagugaagggaacacccaaauuuaauucagccuuaagcacaauuaauuaagagugaaacguaauuguacaagcaguuggucacccaccauagggcaugaucaacaccgcaaccuuuccuuuuucccccagugauucugaaaaaccccucuucccuucagcuugcuuagauguuccaaauuuaguaagcuuaaggcggccuacagaagaaaaagaaaaaaaaggccacaaaaguucccucucacuuucaguaaauaaaauaaaagcagcaacagaaauaaagaaauaaaugaaauucaaaaugaaauaaauauuguguugugcagcauuaaaaaaucaauaaaaauuaaaaaugagcaagaucuaaaaaaaaaaaaaaaaaaaaaaaaaaaaaaaaaaaaaaaaaaaaaaaaaaaaaaaaaaaaaaaaugcaucccccccccccccccccccccccccccccccaaaggcucuuuucagagccaccagaauu

SEQ ID NO: 10915 - RNA, 1317 nt, Artificial Sequence
  mRNA product Design g-3 comprising derived and/or modified sequence from HRSV(A2)__P03421.1__P (opt5)
gggagaguccgcucagccagguugcagaagcggcuuagcguguguccuaaucuucucucugcguguagguaggccugugccgcaaacaagcuuaccauggagaaguucgcccccgaauuucacggcgaggacgcuaacaauagagccaccaaauuccuggaaagcaucaaggggaaauuuacauccccuaaggauccgaaaaagaaggacucuauuaucagcgugaacuccauugauaucgaggucacgaaagaaucucccauuaccagcaauuccacaaucaucaacccuaccaaugagacagacgauaccgcgggaaacaagcccaauuaccagcggaaaccucucguuucuuucaaggaggaccccacaccuagcgauaacccguuuuccaaacuguauaaggaaaccauugagacguucgacaauaacgaagaggagagcucuuacuccuaugaagagaucaaugaucaaaccaacgacaauauuacagcucgccuugauagaaucgacgaaaagcugagcgagauucucggcaugcugcauacccuugugguggccucugccgggcccacauccgcucgggauggaauccgcgacgccaugauuggccugagagaagagaugaucgagaaaauccggaccgaagcucucaugacgaacgaccgccuggaggccauggcgagacugcggaaugaagagagcgaaaagauggccaaagauacaucugacgaggucucccucaacccuaccagcgagaagcugaacaaucuucuggaagggaacgauuccgacaaugaucucucucuggaggacuuuugaggacuagugaagggaacacccaaauuuaauucagccuuaagcacaauuaauuaagagugaaacguaauuguacaagcaguuggucacccaccauagggcaugaucaacaccgcaaccuuuccuuuuucccccagugauucugaaaaaccccucuucccuucagcuugcuuagauguuccaaauuuaguaagcuuaaggcggccuacagaagaaaaagaaaaaaaaggccacaaaaguucccucucacuuucaguaaauaaaauaaaagcagcaacagaaauaaagaaauaaaugaaauucaaaaugaaauaaauauuguguugugcagcauuaaaaaaucaauaaaaauuaaaaaugagcaagaucuaaaaaaaaaaaaaaaaaaaaaaaaaaaaaaaaaaaaaaaaaaaaaaaaaaaaaaaaaaaaaaaaugcaucccccccccccccccccccccccccccccccaaaggcucuuuucagagccaccagaauu

SEQ ID NO: 10916 - RNA, 1317 nt, Artificial Sequence
  mRNA product Design g-3 comprising derived and/or modified sequence from HRSV(A2)__P03421.1__P (opt6)
gggagaguccgcucagccagguugcagaagcggcuuagcguguguccuaaucuucucucugcguguagguaggccugugccgcaaacaagcuuaccauggaaaaauucgcaccagaauuucacggagaagacgcaaacaacagagcaacaaaauucuuagaaucaaucaaaggaaaauucacaagcccaaaagacccaaaaaaaaaagacucaauaauaagcguaaacucaauagacauagaaguaacaaaagaaagcccaauaacaagcaacagcacaauaauaaacccaacaaacgaaacagaugacacagcuggaaauaaaccaaacuaccaaagaaaaccccuagucagcuucaaagaagaccccacaccaucagacaacccauucagcaaacuauauaaagaaacaauagaaacauuugacaacaacgaagaagaaucaucauacucauacgaagaaauaaacgaccaaacaaacgacaacauaaccgcaagauuagacagaauagaugaaaaacuaucagaaauacuaggaaugcuacacacauuaguaguagcaagcgcaggaccaacaucagcaagagacggaauaagagacgcaaugauaggacucagagaagaaaugauagaaaaaauaagaacagaagcacuaaugacaaacgacagauuagaagcaauggcaagacuaagaaaugaagaaucggaaaaaauggcaaaagacacaucagacgaaguaagccuaaacccaacaucagaaaaauuaaauaaccuacuagaaggaaacgacagcgacaacgacuuaucacuagaagacuucuaaggacuagugaagggaacacccaaauuuaauucagccuuaagcacaauuaauuaagagugaaacguaauuguacaagcaguuggucacccaccauagggcaugaucaacaccgcaaccuuuccuuuuucccccagugauucugaaaaaccccucuucccuucagcuugcuuagauguuccaaauuuaguaagcuuaaggcggccuacagaagaaaaagaaaaaaaaggccacaaaaguucccucucacuuucaguaaauaaaauaaaagcagcaacagaaauaaagaaauaaaugaaauucaaaaugaaauaaauauuguguugugcagcauuaaaaaaucaauaaaaauuaaaaaugagcaagaucuaaaaaaaaaaaaaaaaaaaaaaaaaaaaaaaaaaaaaaaaaaaaaaaaaaaaaaaaaaaaaaaaugcaucccccccccccccccccccccccccccccccaaaggcucuuuucagagccaccagaauu

SEQ ID NO: 10917 - RNA, 1317 nt, Artificial Sequence
  mRNA product Design g-3 comprising derived and/or modified sequence from HRSV(A2)__P03421.1__P (opt11)
gggagaguccgcucagccagguugcagaagcggcuuagcguguguccuaaucuucucucugcguguagguaggccugugccgcaaacaagcuuaccauggaaaaauucgcgcccgaguuccacggcgaggacgcgaacaaccgcgcgacaaaguuccuagaaucaaucaagggcaaauucacgagcccgaaagaccccaagaaaaaggacucaaucauaagcgugaacucgaucgacaucgaggucacgaaagagagcccgaucacaagcaacagcaccauaauaaacccgaccaacgaaacagacgacaccgcgggcaacaaaccgaacuaccaaagaaaaccgcucgugagcuucaaagaagacccgaccccaagcgacaacccguucucaaaacuauacaaggaaacgaucgagaccuucgacaacaacgaggaagagagcucguacucguacgaggaaauaaacgaccaaacaaacgacaacauaaccgcacgccuagacaggaucgacgaaaaacucucggaaauacucgggaugcuacacacgcucguggucgcgagcgcaggcccgaccucggccagggacggcaucagggacgcaaugauaggccugcgagaggaaaugaucgagaaaauacgcaccgaagcacucaugaccaacgacagacucgaagccauggccaggcucaggaacgaagaauccgaaaagauggcgaaagacaccucggacgaggucucgcucaaccccacgagcgagaaacugaacaaccuacuggaagggaacgacagcgacaacgaccuuucccucgaggacuucugaggacuagugaagggaacacccaaauuuaauucagccuuaagcacaauuaauuaagagugaaacguaauuguacaagcaguuggucacccaccauagggcaugaucaacaccgcaaccuuuccuuuuucccccagugauucugaaaaaccccucuucccuucagcuugcuuagauguuccaaauuuaguaagcuuaaggcggccuacagaagaaaaagaaaaaaaaggccacaaaaguucccucucacuuucaguaaauaaaauaaaagcagcaacagaaauaaagaaauaaaugaaauucaaaaugaaauaaauauuguguugugcagcauuaaaaaaucaauaaaaauuaaaaaugagcaagaucuaaaaaaaaaaaaaaaaaaaaaaaaaaaaaaaaaaaaaaaaaaaaaaaaaaaaaaaaaaaaaaaaugcaucccccccccccccccccccccccccccccccaaaggcucuuuucagagccaccagaauu

SEQ ID NO: 10918 - RNA, 1112 nt, Artificial Sequence
  mRNA product Design g-4 comprising derived and/or modified sequence from HRSV(A2)__P03421.1__P (wt)
gggagacuccugucgggcggaaguaggaggaguagaguuuaaaaacaguacucuuuuuccgguucgggacguaguugaagcaacgacaagccggauaaccgcucuugagacaggaagcuuaccauggaaaaguuugcuccugaauuccauggagaagaugcaaacaacagggcuacuaaauuccuagaaucaauaaagggcaaauucacaucacccaaagaucccaagaaaaaagauaguaucauaucugucaacucaauagauauagaaguaaccaaagaaagcccuauaacaucaaauucaacuauuaucaacccaacaaaugagacagaugauacugcagggaacaagcccaauuaucaaagaaaaccucuaguaaguuucaaagaagacccuacaccaagugauaaucccuuuucuaaacuauacaaagaaaccauagaaacauuugauaacaaugaagaagaauccagcuauucauacgaagaaauaaaugaucagacaaacgauaauauaacagcaagauuagauaggauugaugaaaaauuaagugaaauacuaggaaugcuucacacauuaguaguggcaagugcaggaccuacaucugcucgggaugguauaagagaugccaugauugguuuaagagaagaaaugauagaaaaaaucagaacugaagcauuaaugaccaaugacagauuagaagcuauggcaagacucaggaaugaggaaagugaaaagauggcaaaagacacaucagaugaagugucucucaauccaacaucagagaaauugaacaaccuauuggaagggaaugauagugacaaugaucuaucacuugaagauuucugaggacuaguaauaaggaaacuguaugaaugucugugggcaggaagugaagagauccuucuguaaagguuuuuggaauuaugucugcugaauaauaaacuuuuuugaaauaauaaaucugguagaaaaaugagaucuaaaaaaaaaaaaaaaaaaaaaaaaaaaaaaaaaaaaaaaaaaaaaaaaaaaaaaaaaaaaaaaaugcaucccccccccccccccccccccccccccccccaaaggcucuuuucagagccaccagaauu

SEQ ID NO: 10919 - RNA, 1112 nt, Artificial Sequence
  mRNA product Design g-4 comprising derived and/or modified sequence from HRSV(A2)__P03421.1__P (opt1)
gggagacuccugucgggcggaaguaggaggaguagaguuuaaaaacaguacucuuuuuccgguucgggacguaguugaagcaacgacaagccggauaaccgcucuugagacaggaagcuuaccauggagaaguucgcccccgaguuccacggcgaggacgccaacaaccgcgcgaccaaguuccuggagagcaucaaggggaaguucaccuccccgaaggaccccaagaagaaggacagcaucaucuccgugaacagcaucgacaucgaggucacgaaggagucccccaucaccagcaacuccaccaucaucaaccccaccaacgagacggacgacaccgccggcaacaagccgaacuaccagcggaagccccucgugagcuucaaggaggaccccacccccuccgacaacccguucagcaagcuguacaaggagaccaucgagacguucgacaacaacgaggaggaguccagcuacuccuacgaggagaucaacgaccagaccaacgacaacaucaccgcccgccuggaccggaucgacgagaagcucagcgagauccuggggaugcugcacacccucguggucgccuccgccggccccacgagcgcgcgcgacgggauccgggacgccaugaucggccugcgcgaggagaugaucgagaagauccggaccgaggcccugaugaccaacgaccgccucgaggccauggcgcggcugcgcaacgaggaguccgagaagauggccaaggacaccagcgacgaggugucccugaaccccacgagcgagaagcucaacaaccugcuggagggcaacgacagcgacaacgaccucucccuggaggacuucugaggacuaguaauaaggaaacuguaugaaugucugugggcaggaagugaagagauccuucuguaaagguuuuuggaauuaugucugcugaauaauaaacuuuuuugaaauaauaaaucugguagaaaaaugagaucuaaaaaaaaaaaaaaaaaaaaaaaaaaaaaaaaaaaaaaaaaaaaaaaaaaaaaaaaaaaaaaaaugcaucccccccccccccccccccccccccccccccaaaggcucuuuucagagccaccagaauu

SEQ ID NO: 10920 - RNA, 1112 nt, Artificial Sequence
  mRNA product Design g-4 comprising derived and/or modified sequence from HRSV(A2)__P03421.1__P (opt2)
gggagacuccugucgggcggaaguaggaggaguagaguuuaaaaacaguacucuuuuuccgguucgggacguaguugaagcaacgacaagccggauaaccgcucuugagacaggaagcuuaccauggagaaguucgcccccgaguuccacggcgaggacgccaacaaccgcgccaccaaguuccucgaguccaucaagggcaaguucaccucccccaaggaccccaagaagaaggacuccaucaucuccgucaacuccaucgacaucgaggucaccaaggagucccccaucaccuccaacuccaccaucaucaaccccaccaacgagaccgacgacaccgccggcaacaagcccaacuaccagcgcaagccccucgucuccuucaaggaggaccccacccccuccgacaaccccuucuccaagcucuacaaggagaccaucgagaccuucgacaacaacgaggaggaguccuccuacuccuacgaggagaucaacgaccagaccaacgacaacaucaccgcccgccucgaccgcaucgacgagaagcucuccgagauccucggcaugcuccacacccucgucgucgccuccgccggccccaccuccgcccgcgacggcauccgcgacgccaugaucggccuccgcgaggagaugaucgagaagauccgcaccgaggcccucaugaccaacgaccgccucgaggccauggcccgccuccgcaacgaggaguccgagaagauggccaaggacaccuccgacgaggucucccucaaccccaccuccgagaagcucaacaaccuccucgagggcaacgacuccgacaacgaccucucccucgaggacuucugaggacuaguaauaaggaaacuguaugaaugucugugggcaggaagugaagagauccuucuguaaagguuuuuggaauuaugucugcugaauaauaaacuuuuuugaaauaauaaaucugguagaaaaaugagaucuaaaaaaaaaaaaaaaaaaaaaaaaaaaaaaaaaaaaaaaaaaaaaaaaaaaaaaaaaaaaaaaaugcaucccccccccccccccccccccccccccccccaaaggcucuuuucagagccaccagaauu

SEQ ID NO: 10921 - RNA, 1112 nt, Artificial Sequence
  mRNA product Design g-4 comprising derived and/or modified sequence from HRSV(A2)__P03421.1__P (opt3)
gggagacuccugucgggcggaaguaggaggaguagaguuuaaaaacaguacucuuuuuccgguucgggacguaguugaagcaacgacaagccggauaaccgcucuugagacaggaagcuuaccauggagaaguucgcccccgaauuucacggcgaggacgcuaacaauagagcaaccaaauuccuggaaagcaucaaggggaaauuuacauccccuaaggauccgaaaaagaaggacucuauuauaucagugaacaguaucgauauugaggucacuaaagaaagcccaaucacguccaauucuaccauuaucaaccccacaaaugagacugacgauaccgccggaaacaagccuaauuaccagaggaaaccacucguuucguucaaggaggaccccacaccuucagauaacccauuuagcaaacuuuauaaggaaaccauagagacuuucgacaauaacgaagaggagaguuccuacucuuaugaagagaucaaugaucaaacaaacgacaauauuaccgcgcggcuggaucgcaucgacgaaaaguugagcgagauuuuagguaugcugcauacgcuagugguagcuuccgccggccccacuucagcacgagaugggauccgugacgccaugauaggacucagagaagagaugauugagaaaaucaggaccgaagcucugaugacaaacgaccggcuugaggcaauggcccgccugagaaaugaagagagugaaaagauggcuaaagauacuagcgacgaggugucuuugaacccuaccuccgagaagcucaacaaucugcuggaaggcaacgauucagacaaugaucucagcuuagaggacuuuugaggacuaguaauaaggaaacuguaugaaugucugugggcaggaagugaagagauccuucuguaaagguuuuuggaauuaugucugcugaauaauaaacuuuuuugaaauaauaaaucugguagaaaaaugagaucuaaaaaaaaaaaaaaaaaaaaaaaaaaaaaaaaaaaaaaaaaaaaaaaaaaaaaaaaaaaaaaaaugcaucccccccccccccccccccccccccccccccaaaggcucuuuucagagccaccagaauu

SEQ ID NO: 10922 - RNA, 1112 nt, Artificial Sequence
  mRNA product Design g-4 comprising derived and/or modified sequence from HRSV(A2)__P03421.1__P (opt4)
gggagacuccugucgggcggaaguaggaggaguagaguuuaaaaacaguacucuuuuuccgguucgggacguaguugaagcaacgacaagccggauaaccgcucuugagacaggaagcuuaccauggagaaguucgcccccgaguuccacggcgaggacgccaacaacagagccaccaaguuccuggagagcaucaagggcaaguucaccagccccaaggaccccaagaagaaggacagcaucaucagcgugaacagcaucgacaucgaggugaccaaggagagccccaucaccagcaacagcaccaucaucaaccccaccaacgagaccgacgacaccgccggcaacaagcccaacuaccagagaaagccccuggugagcuucaaggaggaccccacccccagcgacaaccccuucagcaagcuguacaaggagaccaucgagaccuucgacaacaacgaggaggagagcagcuacagcuacgaggagaucaacgaccagaccaacgacaacaucaccgccagacuggacagaaucgacgagaagcugagcgagauccugggcaugcugcacacccuggugguggccagcgccggccccaccagcgccagagacggcaucagagacgccaugaucggccugagagaggagaugaucgagaagaucagaaccgaggcccugaugaccaacgacagacuggaggccauggccagacugagaaacgaggagagcgagaagauggccaaggacaccagcgacgaggugagccugaaccccaccagcgagaagcugaacaaccugcuggagggcaacgacagcgacaacgaccugagccuggaggacuucugaggacuaguaauaaggaaacuguaugaaugucugugggcaggaagugaagagauccuucuguaaagguuuuuggaauuaugucugcugaauaauaaacuuuuuugaaauaauaaaucugguagaaaaaugagaucuaaaaaaaaaaaaaaaaaaaaaaaaaaaaaaaaaaaaaaaaaaaaaaaaaaaaaaaaaaaaaaaaugcaucccccccccccccccccccccccccccccccaaaggcucuuuucagagccaccagaauu

SEQ ID NO: 10923 - RNA, 1112 nt, Artificial Sequence
  mRNA product Design g-4 comprising derived and/or modified sequence from HRSV(A2)__P03421.1__P (opt5)
gggagacuccugucgggcggaaguaggaggaguagaguuuaaaaacaguacucuuuuuccgguucgggacguaguugaagcaacgacaagccggauaaccgcucuugagacaggaagcuuaccauggagaaguucgcccccgaauuucacggcgaggacgcuaacaauagagccaccaaauuccuggaaagcaucaaggggaaauuuacauccccuaaggauccgaaaaagaaggacucuauuaucagcgugaacuccauugauaucgaggucacgaaagaaucucccauuaccagcaauuccacaaucaucaacccuaccaaugagacagacgauaccgcgggaaacaagcccaauuaccagcggaaaccucucguuucuuucaaggaggaccccacaccuagcgauaacccguuuuccaaacuguauaaggaaaccauugagacguucgacaauaacgaagaggagagcucuuacuccuaugaagagaucaaugaucaaaccaacgacaauauuacagcucgccuugauagaaucgacgaaaagcugagcgagauucucggcaugcugcauacccuugugguggccucugccgggcccacauccgcucgggauggaauccgcgacgccaugauuggccugagagaagagaugaucgagaaaauccggaccgaagcucucaugacgaacgaccgccuggaggccauggcgagacugcggaaugaagagagcgaaaagauggccaaagauacaucugacgaggucucccucaacccuaccagcgagaagcugaacaaucuucuggaagggaacgauuccgacaaugaucucucucuggaggacuuuugaggacuaguaauaaggaaacuguaugaaugucugugggcaggaagugaagagauccuucuguaaagguuuuuggaauuaugucugcugaauaauaaacuuuuuugaaauaauaaaucugguagaaaaaugagaucuaaaaaaaaaaaaaaaaaaaaaaaaaaaaaaaaaaaaaaaaaaaaaaaaaaaaaaaaaaaaaaaaugcaucccccccccccccccccccccccccccccccaaaggcucuuuucagagccaccagaauu

SEQ ID NO: 10924 - RNA, 1112 nt, Artificial Sequence
  mRNA product Design g-4 comprising derived and/or modified sequence from HRSV(A2)__P03421.1__P (opt6)
gggagacuccugucgggcggaaguaggaggaguagaguuuaaaaacaguacucuuuuuccgguucgggacguaguugaagcaacgacaagccggauaaccgcucuugagacaggaagcuuaccauggaaaaauucgcaccagaauuucacggagaagacgcaaacaacagagcaacaaaauucuuagaaucaaucaaaggaaaauucacaagcccaaaagacccaaaaaaaaaagacucaauaauaagcguaaacucaauagacauagaaguaacaaaagaaagcccaauaacaagcaacagcacaauaauaaacccaacaaacgaaacagaugacacagcuggaaauaaaccaaacuaccaaagaaaaccccuagucagcuucaaagaagaccccacaccaucagacaacccauucagcaaacuauauaaagaaacaauagaaacauuugacaacaacgaagaagaaucaucauacucauacgaagaaauaaacgaccaaacaaacgacaacauaaccgcaagauuagacagaauagaugaaaaacuaucagaaauacuaggaaugcuacacacauuaguaguagcaagcgcaggaccaacaucagcaagagacggaauaagagacgcaaugauaggacucagagaagaaaugauagaaaaaauaagaacagaagcacuaaugacaaacgacagauuagaagcaauggcaagacuaagaaaugaagaaucggaaaaaauggcaaaagacacaucagacgaaguaagccuaaacccaacaucagaaaaauuaaauaaccuacuagaaggaaacgacagcgacaacgacuuaucacuagaagacuucuaaggacuaguaauaaggaaacuguaugaaugucugugggcaggaagugaagagauccuucuguaaagguuuuuggaauuaugucugcugaauaauaaacuuuuuugaaauaauaaaucugguagaaaaaugagaucuaaaaaaaaaaaaaaaaaaaaaaaaaaaaaaaaaaaaaaaaaaaaaaaaaaaaaaaaaaaaaaaaugcaucccccccccccccccccccccccccccccccaaaggcucuuuucagagccaccagaauu

SEQ ID NO: 10925 - RNA, 1112 nt, Artificial Sequence
  mRNA product Design g-4 comprising derived and/or modified sequence from HRSV(A2)__P03421.1__P (opt11)
gggagacuccugucgggcggaaguaggaggaguagaguuuaaaaacaguacucuuuuuccgguucgggacguaguugaagcaacgacaagccggauaaccgcucuugagacaggaagcuuaccauggaaaaauucgcgcccgaguuccacggcgaggacgcgaacaaccgcgcgacaaaguuccuagaaucaaucaagggcaaauucacgagcccgaaagaccccaagaaaaaggacucaaucauaagcgugaacucgaucgacaucgaggucacgaaagagagcccgaucacaagcaacagcaccauaauaaacccgaccaacgaaacagacgacaccgcgggcaacaaaccgaacuaccaaagaaaaccgcucgugagcuucaaagaagacccgaccccaagcgacaacccguucucaaaacuauacaaggaaacgaucgagaccuucgacaacaacgaggaagagagcucguacucguacgaggaaauaaacgaccaaacaaacgacaacauaaccgcacgccuagacaggaucgacgaaaaacucucggaaauacucgggaugcuacacacgcucguggucgcgagcgcaggcccgaccucggccagggacggcaucagggacgcaaugauaggccugcgagaggaaaugaucgagaaaauacgcaccgaagcacucaugaccaacgacagacucgaagccauggccaggcucaggaacgaagaauccgaaaagauggcgaaagacaccucggacgaggucucgcucaaccccacgagcgagaaacugaacaaccuacuggaagggaacgacagcgacaacgaccuuucccucgaggacuucugaggacuaguaauaaggaaacuguaugaaugucugugggcaggaagugaagagauccuucuguaaagguuuuuggaauuaugucugcugaauaauaaacuuuuuugaaauaauaaaucugguagaaaaaugagaucuaaaaaaaaaaaaaaaaaaaaaaaaaaaaaaaaaaaaaaaaaaaaaaaaaaaaaaaaaaaaaaaaugcaucccccccccccccccccccccccccccccccaaaggcucuuuucagagccaccagaauu

SEQ ID NO: 10926 - RNA, 1088 nt, Artificial Sequence
  mRNA product Design g-5 comprising derived and/or modified sequence from HRSV(A2)__P03421.1__P (wt)
gggagacccgugacccggaaguuguacggcuacgcgacuuucccucccacaaacccucgcgcccuuccuuuccuacuugggcccggcagaaagcuuaccauggaaaaguuugcuccugaauuccauggagaagaugcaaacaacagggcuacuaaauuccuagaaucaauaaagggcaaauucacaucacccaaagaucccaagaaaaaagauaguaucauaucugucaacucaauagauauagaaguaaccaaagaaagcccuauaacaucaaauucaacuauuaucaacccaacaaaugagacagaugauacugcagggaacaagcccaauuaucaaagaaaaccucuaguaaguuucaaagaagacccuacaccaagugauaaucccuuuucuaaacuauacaaagaaaccauagaaacauuugauaacaaugaagaagaauccagcuauucauacgaagaaauaaaugaucagacaaacgauaauauaacagcaagauuagauaggauugaugaaaaauuaagugaaauacuaggaaugcuucacacauuaguaguggcaagugcaggaccuacaucugcucgggaugguauaagagaugccaugauugguuuaagagaagaaaugauagaaaaaaucagaacugaagcauuaaugaccaaugacagauuagaagcuauggcaagacucaggaaugaggaaagugaaaagauggcaaaagacacaucagaugaagugucucucaauccaacaucagagaaauugaacaaccuauuggaagggaaugauagugacaaugaucuaucacuugaagauuucugaggacuaguaauaaggaaacuguaugaaugucugugggcaggaagugaagagauccuucuguaaagguuuuuggaauuaugucugcugaauaauaaacuuuuuugaaauaauaaaucugguagaaaaaugagaucuaaaaaaaaaaaaaaaaaaaaaaaaaaaaaaaaaaaaaaaaaaaaaaaaaaaaaaaaaaaaaaaaugcaucccccccccccccccccccccccccccccccaaaggcucuuuucagagccaccagaauu

SEQ ID NO: 10927 - RNA, 1088 nt, Artificial Sequence
  mRNA product Design g-5 comprising derived and/or modified sequence from HRSV(A2)__P03421.1__P (opt1)
gggagacccgugacccggaaguuguacggcuacgcgacuuucccucccacaaacccucgcgcccuuccuuuccuacuugggcccggcagaaagcuuaccauggagaaguucgcccccgaguuccacggcgaggacgccaacaaccgcgcgaccaaguuccuggagagcaucaaggggaaguucaccuccccgaaggaccccaagaagaaggacagcaucaucuccgugaacagcaucgacaucgaggucacgaaggagucccccaucaccagcaacuccaccaucaucaaccccaccaacgagacggacgacaccgccggcaacaagccgaacuaccagcggaagccccucgugagcuucaaggaggaccccacccccuccgacaacccguucagcaagcuguacaaggagaccaucgagacguucgacaacaacgaggaggaguccagcuacuccuacgaggagaucaacgaccagaccaacgacaacaucaccgcccgccuggaccggaucgacgagaagcucagcgagauccuggggaugcugcacacccucguggucgccuccgccggccccacgagcgcgcgcgacgggauccgggacgccaugaucggccugcgcgaggagaugaucgagaagauccggaccgaggcccugaugaccaacgaccgccucgaggccauggcgcggcugcgcaacgaggaguccgagaagauggccaaggacaccagcgacgaggugucccugaaccccacgagcgagaagcucaacaaccugcuggagggcaacgacagcgacaacgaccucucccuggaggacuucugaggacuaguaauaaggaaacuguaugaaugucugugggcaggaagugaagagauccuucuguaaagguuuuuggaauuaugucugcugaauaauaaacuuuuuugaaauaauaaaucugguagaaaaaugagaucuaaaaaaaaaaaaaaaaaaaaaaaaaaaaaaaaaaaaaaaaaaaaaaaaaaaaaaaaaaaaaaaaugcaucccccccccccccccccccccccccccccccaaaggcucuuuucagagccaccagaauu

SEQ ID NO: 10928 - RNA, 1088 nt, Artificial Sequence
  mRNA product Design g-5 comprising derived and/or modified sequence from HRSV(A2)__P03421.1__P (opt2)
gggagacccgugacccggaaguuguacggcuacgcgacuuucccucccacaaacccucgcgcccuuccuuuccuacuugggcccggcagaaagcuuaccauggagaaguucgcccccgaguuccacggcgaggacgccaacaaccgcgccaccaaguuccucgaguccaucaagggcaaguucaccucccccaaggaccccaagaagaaggacuccaucaucuccgucaacuccaucgacaucgaggucaccaaggagucccccaucaccuccaacuccaccaucaucaaccccaccaacgagaccgacgacaccgccggcaacaagcccaacuaccagcgcaagccccucgucuccuucaaggaggaccccacccccuccgacaaccccuucuccaagcucuacaaggagaccaucgagaccuucgacaacaacgaggaggaguccuccuacuccuacgaggagaucaacgaccagaccaacgacaacaucaccgcccgccucgaccgcaucgacgagaagcucuccgagauccucggcaugcuccacacccucgucgucgccuccgccggccccaccuccgcccgcgacggcauccgcgacgccaugaucggccuccgcgaggagaugaucgagaagauccgcaccgaggcccucaugaccaacgaccgccucgaggccauggcccgccuccgcaacgaggaguccgagaagauggccaaggacaccuccgacgaggucucccucaaccccaccuccgagaagcucaacaaccuccucgagggcaacgacuccgacaacgaccucucccucgaggacuucugaggacuaguaauaaggaaacuguaugaaugucugugggcaggaagugaagagauccuucuguaaagguuuuuggaauuaugucugcugaauaauaaacuuuuuugaaauaauaaaucugguagaaaaaugagaucuaaaaaaaaaaaaaaaaaaaaaaaaaaaaaaaaaaaaaaaaaaaaaaaaaaaaaaaaaaaaaaaaugcaucccccccccccccccccccccccccccccccaaaggcucuuuucagagccaccagaauu

SEQ ID NO: 10929 - RNA, 1088 nt, Artificial Sequence
  mRNA product Design g-5 comprising derived and/or modified sequence from HRSV(A2)__P03421.1__P (opt3)
gggagacccgugacccggaaguuguacggcuacgcgacuuucccucccacaaacccucgcgcccuuccuuuccuacuugggcccggcagaaagcuuaccauggagaaguucgcccccgaauuucacggcgaggacgcuaacaauagagcaaccaaauuccuggaaagcaucaaggggaaauuuacauccccuaaggauccgaaaaagaaggacucuauuauaucagugaacaguaucgauauugaggucacuaaagaaagcccaaucacguccaauucuaccauuaucaaccccacaaaugagacugacgauaccgccggaaacaagccuaauuaccagaggaaaccacucguuucguucaaggaggaccccacaccuucagauaacccauuuagcaaacuuuauaaggaaaccauagagacuuucgacaauaacgaagaggagaguuccuacucuuaugaagagaucaaugaucaaacaaacgacaauauuaccgcgcggcuggaucgcaucgacgaaaaguugagcgagauuuuagguaugcugcauacgcuagugguagcuuccgccggccccacuucagcacgagaugggauccgugacgccaugauaggacucagagaagagaugauugagaaaaucaggaccgaagcucugaugacaaacgaccggcuugaggcaauggcccgccugagaaaugaagagagugaaaagauggcuaaagauacuagcgacgaggugucuuugaacccuaccuccgagaagcucaacaaucugcuggaaggcaacgauucagacaaugaucucagcuuagaggacuuuugaggacuaguaauaaggaaacuguaugaaugucugugggcaggaagugaagagauccuucuguaaagguuuuuggaauuaugucugcugaauaauaaacuuuuuugaaauaauaaaucugguagaaaaaugagaucuaaaaaaaaaaaaaaaaaaaaaaaaaaaaaaaaaaaaaaaaaaaaaaaaaaaaaaaaaaaaaaaaugcaucccccccccccccccccccccccccccccccaaaggcucuuuucagagccaccagaauu

SEQ ID NO: 10930 - RNA, 1088 nt, Artificial Sequence
  mRNA product Design g-5 comprising derived and/or modified sequence from HRSV(A2)__P03421.1__P (opt4)
gggagacccgugacccggaaguuguacggcuacgcgacuuucccucccacaaacccucgcgcccuuccuuuccuacuugggcccggcagaaagcuuaccauggagaaguucgcccccgaguuccacggcgaggacgccaacaacagagccaccaaguuccuggagagcaucaagggcaaguucaccagccccaaggaccccaagaagaaggacagcaucaucagcgugaacagcaucgacaucgaggugaccaaggagagccccaucaccagcaacagcaccaucaucaaccccaccaacgagaccgacgacaccgccggcaacaagcccaacuaccagagaaagccccuggugagcuucaaggaggaccccacccccagcgacaaccccuucagcaagcuguacaaggagaccaucgagaccuucgacaacaacgaggaggagagcagcuacagcuacgaggagaucaacgaccagaccaacgacaacaucaccgccagacuggacagaaucgacgagaagcugagcgagauccugggcaugcugcacacccuggugguggccagcgccggccccaccagcgccagagacggcaucagagacgccaugaucggccugagagaggagaugaucgagaagaucagaaccgaggcccugaugaccaacgacagacuggaggccauggccagacugagaaacgaggagagcgagaagauggccaaggacaccagcgacgaggugagccugaaccccaccagcgagaagcugaacaaccugcuggagggcaacgacagcgacaacgaccugagccuggaggacuucugaggacuaguaauaaggaaacuguaugaaugucugugggcaggaagugaagagauccuucuguaaagguuuuuggaauuaugucugcugaauaauaaacuuuuuugaaauaauaaaucugguagaaaaaugagaucuaaaaaaaaaaaaaaaaaaaaaaaaaaaaaaaaaaaaaaaaaaaaaaaaaaaaaaaaaaaaaaaaugcaucccccccccccccccccccccccccccccccaaaggcucuuuucagagccaccagaauu

SEQ ID NO: 10931 - RNA, 1088 nt, Artificial Sequence
  mRNA product Design g-5 comprising derived and/or modified sequence from HRSV(A2)__P03421.1__P (opt5)
gggagacccgugacccggaaguuguacggcuacgcgacuuucccucccacaaacccucgcgcccuuccuuuccuacuugggcccggcagaaagcuuaccauggagaaguucgcccccgaauuucacggcgaggacgcuaacaauagagccaccaaauuccuggaaagcaucaaggggaaauuuacauccccuaaggauccgaaaaagaaggacucuauuaucagcgugaacuccauugauaucgaggucacgaaagaaucucccauuaccagcaauuccacaaucaucaacccuaccaaugagacagacgauaccgcgggaaacaagcccaauuaccagcggaaaccucucguuucuuucaaggaggaccccacaccuagcgauaacccguuuuccaaacuguauaaggaaaccauugagacguucgacaauaacgaagaggagagcucuuacuccuaugaagagaucaaugaucaaaccaacgacaauauuacagcucgccuugauagaaucgacgaaaagcugagcgagauucucggcaugcugcauacccuugugguggccucugccgggcccacauccgcucgggauggaauccgcgacgccaugauuggccugagagaagagaugaucgagaaaauccggaccgaagcucucaugacgaacgaccgccuggaggccauggcgagacugcggaaugaagagagcgaaaagauggccaaagauacaucugacgaggucucccucaacccuaccagcgagaagcugaacaaucuucuggaagggaacgauuccgacaaugaucucucucuggaggacuuuugaggacuaguaauaaggaaacuguaugaaugucugugggcaggaagugaagagauccuucuguaaagguuuuuggaauuaugucugcugaauaauaaacuuuuuugaaauaauaaaucugguagaaaaaugagaucuaaaaaaaaaaaaaaaaaaaaaaaaaaaaaaaaaaaaaaaaaaaaaaaaaaaaaaaaaaaaaaaaugcaucccccccccccccccccccccccccccccccaaaggcucuuuucagagccaccagaauu

SEQ ID NO: 10932 - RNA, 1088 nt, Artificial Sequence
  mRNA product Design g-5 comprising derived and/or modified sequence from HRSV(A2)__P03421.1__P (opt6)
gggagacccgugacccggaaguuguacggcuacgcgacuuucccucccacaaacccucgcgcccuuccuuuccuacuugggcccggcagaaagcuuaccauggaaaaauucgcaccagaauuucacggagaagacgcaaacaacagagcaacaaaauucuuagaaucaaucaaaggaaaauucacaagcccaaaagacccaaaaaaaaaagacucaauaauaagcguaaacucaauagacauagaaguaacaaaagaaagcccaauaacaagcaacagcacaauaauaaacccaacaaacgaaacagaugacacagcuggaaauaaaccaaacuaccaaagaaaaccccuagucagcuucaaagaagaccccacaccaucagacaacccauucagcaaacuauauaaagaaacaauagaaacauuugacaacaacgaagaagaaucaucauacucauacgaagaaauaaacgaccaaacaaacgacaacauaaccgcaagauuagacagaauagaugaaaaacuaucagaaauacuaggaaugcuacacacauuaguaguagcaagcgcaggaccaacaucagcaagagacggaauaagagacgcaaugauaggacucagagaagaaaugauagaaaaaauaagaacagaagcacuaaugacaaacgacagauuagaagcaauggcaagacuaagaaaugaagaaucggaaaaaauggcaaaagacacaucagacgaaguaagccuaaacccaacaucagaaaaauuaaauaaccuacuagaaggaaacgacagcgacaacgacuuaucacuagaagacuucuaaggacuaguaauaaggaaacuguaugaaugucugugggcaggaagugaagagauccuucuguaaagguuuuuggaauuaugucugcugaauaauaaacuuuuuugaaauaauaaaucugguagaaaaaugagaucuaaaaaaaaaaaaaaaaaaaaaaaaaaaaaaaaaaaaaaaaaaaaaaaaaaaaaaaaaaaaaaaaugcaucccccccccccccccccccccccccccccccaaaggcucuuuucagagccaccagaauu

SEQ ID NO: 10933 - RNA, 1088 nt, Artificial Sequence
  mRNA product Design g-5 comprising derived and/or modified sequence from HRSV(A2)__P03421.1__P (opt11)
gggagacccgugacccggaaguuguacggcuacgcgacuuucccucccacaaacccucgcgcccuuccuuuccuacuugggcccggcagaaagcuuaccauggaaaaauucgcgcccgaguuccacggcgaggacgcgaacaaccgcgcgacaaaguuccuagaaucaaucaagggcaaauucacgagcccgaaagaccccaagaaaaaggacucaaucauaagcgugaacucgaucgacaucgaggucacgaaagagagcccgaucacaagcaacagcaccauaauaaacccgaccaacgaaacagacgacaccgcgggcaacaaaccgaacuaccaaagaaaaccgcucgugagcuucaaagaagacccgaccccaagcgacaacccguucucaaaacuauacaaggaaacgaucgagaccuucgacaacaacgaggaagagagcucguacucguacgaggaaauaaacgaccaaacaaacgacaacauaaccgcacgccuagacaggaucgacgaaaaacucucggaaauacucgggaugcuacacacgcucguggucgcgagcgcaggcccgaccucggccagggacggcaucagggacgcaaugauaggccugcgagaggaaaugaucgagaaaauacgcaccgaagcacucaugaccaacgacagacucgaagccauggccaggcucaggaacgaagaauccgaaaagauggcgaaagacaccucggacgaggucucgcucaaccccacgagcgagaaacugaacaaccuacuggaagggaacgacagcgacaacgaccuuucccucgaggacuucugaggacuaguaauaaggaaacuguaugaaugucugugggcaggaagugaagagauccuucuguaaagguuuuuggaauuaugucugcugaauaauaaacuuuuuugaaauaauaaaucugguagaaaaaugagaucuaaaaaaaaaaaaaaaaaaaaaaaaaaaaaaaaaaaaaaaaaaaaaaaaaaaaaaaaaaaaaaaaugcaucccccccccccccccccccccccccccccccaaaggcucuuuucagagccaccagaauu

SEQ ID NO: 10934 - RNA, 1104 nt, Artificial Sequence
  mRNA product Design h-1 comprising derived and/or modified sequence from HRSV(A2)__P03421.1__P (wt)
gggagacccgugacccggaaguuguacggcuacgcgacuuucccucccacaaacccucgcgcccuuccuuuccuacuugggcccggcagaaagcuuaccauggaaaaguuugcuccugaauuccauggagaagaugcaaacaacagggcuacuaaauuccuagaaucaauaaagggcaaauucacaucacccaaagaucccaagaaaaaagauaguaucauaucugucaacucaauagauauagaaguaaccaaagaaagcccuauaacaucaaauucaacuauuaucaacccaacaaaugagacagaugauacugcagggaacaagcccaauuaucaaagaaaaccucuaguaaguuucaaagaagacccuacaccaagugauaaucccuuuucuaaacuauacaaagaaaccauagaaacauuugauaacaaugaagaagaauccagcuauucauacgaagaaauaaaugaucagacaaacgauaauauaacagcaagauuagauaggauugaugaaaaauuaagugaaauacuaggaaugcuucacacauuaguaguggcaagugcaggaccuacaucugcucgggaugguauaagagaugccaugauugguuuaagagaagaaaugauagaaaaaaucagaacugaagcauuaaugaccaaugacagauuagaagcuauggcaagacucaggaaugaggaaagugaaaagauggcaaaagacacaucagaugaagugucucucaauccaacaucagagaaauugaacaaccuauuggaagggaaugauagugacaaugaucuaucacuugaagauuucugaggacuaguacuggcugcaucucccuuuccucuguccuccauccuucucccaggauggugaagggggaccugguacccagugauccccaccccaggauccuaaaucaugacuuaccugcuaauaaaaacucauuggaaaagugagaagaucuaaaaaaaaaaaaaaaaaaaaaaaaaaaaaaaaaaaaaaaaaaaaaaaaaaaaaaaaaaaaaaaaugcaucccccccccccccccccccccccccccccccaaaggcucuuuucagagccaccagaauu

SEQ ID NO: 10935 - RNA, 1104 nt, Artificial Sequence
  mRNA product Design h-1 comprising derived and/or modified sequence from HRSV(A2)__P03421.1__P (opt1)
gggagacccgugacccggaaguuguacggcuacgcgacuuucccucccacaaacccucgcgcccuuccuuuccuacuugggcccggcagaaagcuuaccauggagaaguucgcccccgaguuccacggcgaggacgccaacaaccgcgcgaccaaguuccuggagagcaucaaggggaaguucaccuccccgaaggaccccaagaagaaggacagcaucaucuccgugaacagcaucgacaucgaggucacgaaggagucccccaucaccagcaacuccaccaucaucaaccccaccaacgagacggacgacaccgccggcaacaagccgaacuaccagcggaagccccucgugagcuucaaggaggaccccacccccuccgacaacccguucagcaagcuguacaaggagaccaucgagacguucgacaacaacgaggaggaguccagcuacuccuacgaggagaucaacgaccagaccaacgacaacaucaccgcccgccuggaccggaucgacgagaagcucagcgagauccuggggaugcugcacacccucguggucgccuccgccggccccacgagcgcgcgcgacgggauccgggacgccaugaucggccugcgcgaggagaugaucgagaagauccggaccgaggcccugaugaccaacgaccgccucgaggccauggcgcggcugcgcaacgaggaguccgagaagauggccaaggacaccagcgacgaggugucccugaaccccacgagcgagaagcucaacaaccugcuggagggcaacgacagcgacaacgaccucucccuggaggacuucugaggacuaguacuggcugcaucucccuuuccucuguccuccauccuucucccaggauggugaagggggaccugguacccagugauccccaccccaggauccuaaaucaugacuuaccugcuaauaaaaacucauuggaaaagugagaagaucuaaaaaaaaaaaaaaaaaaaaaaaaaaaaaaaaaaaaaaaaaaaaaaaaaaaaaaaaaaaaaaaaugcaucccccccccccccccccccccccccccccccaaaggcucuuuucagagccaccagaauu

SEQ ID NO: 10936 - RNA, 1104 nt, Artificial Sequence
  mRNA product Design h-1 comprising derived and/or modified sequence from HRSV(A2)__P03421.1__P (opt2)
gggagacccgugacccggaaguuguacggcuacgcgacuuucccucccacaaacccucgcgcccuuccuuuccuacuugggcccggcagaaagcuuaccauggagaaguucgcccccgaguuccacggcgaggacgccaacaaccgcgccaccaaguuccucgaguccaucaagggcaaguucaccucccccaaggaccccaagaagaaggacuccaucaucuccgucaacuccaucgacaucgaggucaccaaggagucccccaucaccuccaacuccaccaucaucaaccccaccaacgagaccgacgacaccgccggcaacaagcccaacuaccagcgcaagccccucgucuccuucaaggaggaccccacccccuccgacaaccccuucuccaagcucuacaaggagaccaucgagaccuucgacaacaacgaggaggaguccuccuacuccuacgaggagaucaacgaccagaccaacgacaacaucaccgcccgccucgaccgcaucgacgagaagcucuccgagauccucggcaugcuccacacccucgucgucgccuccgccggccccaccuccgcccgcgacggcauccgcgacgccaugaucggccuccgcgaggagaugaucgagaagauccgcaccgaggcccucaugaccaacgaccgccucgaggccauggcccgccuccgcaacgaggaguccgagaagauggccaaggacaccuccgacgaggucucccucaaccccaccuccgagaagcucaacaaccuccucgagggcaacgacuccgacaacgaccucucccucgaggacuucugaggacuaguacuggcugcaucucccuuuccucuguccuccauccuucucccaggauggugaagggggaccugguacccagugauccccaccccaggauccuaaaucaugacuuaccugcuaauaaaaacucauuggaaaagugagaagaucuaaaaaaaaaaaaaaaaaaaaaaaaaaaaaaaaaaaaaaaaaaaaaaaaaaaaaaaaaaaaaaaaugcaucccccccccccccccccccccccccccccccaaaggcucuuuucagagccaccagaauu

SEQ ID NO: 10937 - RNA, 1104 nt, Artificial Sequence
  mRNA product Design h-1 comprising derived and/or modified sequence from HRSV(A2)__P03421.1__P (opt3)
gggagacccgugacccggaaguuguacggcuacgcgacuuucccucccacaaacccucgcgcccuuccuuuccuacuugggcccggcagaaagcuuaccauggagaaguucgcccccgaauuucacggcgaggacgcuaacaauagagcaaccaaauuccuggaaagcaucaaggggaaauuuacauccccuaaggauccgaaaaagaaggacucuauuauaucagugaacaguaucgauauugaggucacuaaagaaagcccaaucacguccaauucuaccauuaucaaccccacaaaugagacugacgauaccgccggaaacaagccuaauuaccagaggaaaccacucguuucguucaaggaggaccccacaccuucagauaacccauuuagcaaacuuuauaaggaaaccauagagacuuucgacaauaacgaagaggagaguuccuacucuuaugaagagaucaaugaucaaacaaacgacaauauuaccgcgcggcuggaucgcaucgacgaaaaguugagcgagauuuuagguaugcugcauacgcuagugguagcuuccgccggccccacuucagcacgagaugggauccgugacgccaugauaggacucagagaagagaugauugagaaaaucaggaccgaagcucugaugacaaacgaccggcuugaggcaauggcccgccugagaaaugaagagagugaaaagauggcuaaagauacuagcgacgaggugucuuugaacccuaccuccgagaagcucaacaaucugcuggaaggcaacgauucagacaaugaucucagcuuagaggacuuuugaggacuaguacuggcugcaucucccuuuccucuguccuccauccuucucccaggauggugaagggggaccugguacccagugauccccaccccaggauccuaaaucaugacuuaccugcuaauaaaaacucauuggaaaagugagaagaucuaaaaaaaaaaaaaaaaaaaaaaaaaaaaaaaaaaaaaaaaaaaaaaaaaaaaaaaaaaaaaaaaugcaucccccccccccccccccccccccccccccccaaaggcucuuuucagagccaccagaauu

SEQ ID NO: 10938 - RNA, 1104 nt, Artificial Sequence
  mRNA product Design h-1 comprising derived and/or modified sequence from HRSV(A2)__P03421.1__P (opt4)
gggagacccgugacccggaaguuguacggcuacgcgacuuucccucccacaaacccucgcgcccuuccuuuccuacuugggcccggcagaaagcuuaccauggagaaguucgcccccgaguuccacggcgaggacgccaacaacagagccaccaaguuccuggagagcaucaagggcaaguucaccagccccaaggaccccaagaagaaggacagcaucaucagcgugaacagcaucgacaucgaggugaccaaggagagccccaucaccagcaacagcaccaucaucaaccccaccaacgagaccgacgacaccgccggcaacaagcccaacuaccagagaaagccccuggugagcuucaaggaggaccccacccccagcgacaaccccuucagcaagcuguacaaggagaccaucgagaccuucgacaacaacgaggaggagagcagcuacagcuacgaggagaucaacgaccagaccaacgacaacaucaccgccagacuggacagaaucgacgagaagcugagcgagauccugggcaugcugcacacccuggugguggccagcgccggccccaccagcgccagagacggcaucagagacgccaugaucggccugagagaggagaugaucgagaagaucagaaccgaggcccugaugaccaacgacagacuggaggccauggccagacugagaaacgaggagagcgagaagauggccaaggacaccagcgacgaggugagccugaaccccaccagcgagaagcugaacaaccugcuggagggcaacgacagcgacaacgaccugagccuggaggacuucugaggacuaguacuggcugcaucucccuuuccucuguccuccauccuucucccaggauggugaagggggaccugguacccagugauccccaccccaggauccuaaaucaugacuuaccugcuaauaaaaacucauuggaaaagugagaagaucuaaaaaaaaaaaaaaaaaaaaaaaaaaaaaaaaaaaaaaaaaaaaaaaaaaaaaaaaaaaaaaaaugcaucccccccccccccccccccccccccccccccaaaggcucuuuucagagccaccagaauu

SEQ ID NO: 10939 - RNA, 1104 nt, Artificial Sequence
  mRNA product Design h-1 comprising derived and/or modified sequence from HRSV(A2)__P03421.1__P (opt5)
gggagacccgugacccggaaguuguacggcuacgcgacuuucccucccacaaacccucgcgcccuuccuuuccuacuugggcccggcagaaagcuuaccauggagaaguucgcccccgaauuucacggcgaggacgcuaacaauagagccaccaaauuccuggaaagcaucaaggggaaauuuacauccccuaaggauccgaaaaagaaggacucuauuaucagcgugaacuccauugauaucgaggucacgaaagaaucucccauuaccagcaauuccacaaucaucaacccuaccaaugagacagacgauaccgcgggaaacaagcccaauuaccagcggaaaccucucguuucuuucaaggaggaccccacaccuagcgauaacccguuuuccaaacuguauaaggaaaccauugagacguucgacaauaacgaagaggagagcucuuacuccuaugaagagaucaaugaucaaaccaacgacaauauuacagcucgccuugauagaaucgacgaaaagcugagcgagauucucggcaugcugcauacccuugugguggccucugccgggcccacauccgcucgggauggaauccgcgacgccaugauuggccugagagaagagaugaucgagaaaauccggaccgaagcucucaugacgaacgaccgccuggaggccauggcgagacugcggaaugaagagagcgaaaagauggccaaagauacaucugacgaggucucccucaacccuaccagcgagaagcugaacaaucuucuggaagggaacgauuccgacaaugaucucucucuggaggacuuuugaggacuaguacuggcugcaucucccuuuccucuguccuccauccuucucccaggauggugaagggggaccugguacccagugauccccaccccaggauccuaaaucaugacuuaccugcuaauaaaaacucauuggaaaagugagaagaucuaaaaaaaaaaaaaaaaaaaaaaaaaaaaaaaaaaaaaaaaaaaaaaaaaaaaaaaaaaaaaaaaugcaucccccccccccccccccccccccccccccccaaaggcucuuuucagagccaccagaauu

SEQ ID NO: 10940 - RNA, 1104 nt, Artificial Sequence
  mRNA product Design h-1 comprising derived and/or modified sequence from HRSV(A2)__P03421.1__P (opt6)
gggagacccgugacccggaaguuguacggcuacgcgacuuucccucccacaaacccucgcgcccuuccuuuccuacuugggcccggcagaaagcuuaccauggaaaaauucgcaccagaauuucacggagaagacgcaaacaacagagcaacaaaauucuuagaaucaaucaaaggaaaauucacaagcccaaaagacccaaaaaaaaaagacucaauaauaagcguaaacucaauagacauagaaguaacaaaagaaagcccaauaacaagcaacagcacaauaauaaacccaacaaacgaaacagaugacacagcuggaaauaaaccaaacuaccaaagaaaaccccuagucagcuucaaagaagaccccacaccaucagacaacccauucagcaaacuauauaaagaaacaauagaaacauuugacaacaacgaagaagaaucaucauacucauacgaagaaauaaacgaccaaacaaacgacaacauaaccgcaagauuagacagaauagaugaaaaacuaucagaaauacuaggaaugcuacacacauuaguaguagcaagcgcaggaccaacaucagcaagagacggaauaagagacgcaaugauaggacucagagaagaaaugauagaaaaaauaagaacagaagcacuaaugacaaacgacagauuagaagcaauggcaagacuaagaaaugaagaaucggaaaaaauggcaaaagacacaucagacgaaguaagccuaaacccaacaucagaaaaauuaaauaaccuacuagaaggaaacgacagcgacaacgacuuaucacuagaagacuucuaaggacuaguacuggcugcaucucccuuuccucuguccuccauccuucucccaggauggugaagggggaccugguacccagugauccccaccccaggauccuaaaucaugacuuaccugcuaauaaaaacucauuggaaaagugagaagaucuaaaaaaaaaaaaaaaaaaaaaaaaaaaaaaaaaaaaaaaaaaaaaaaaaaaaaaaaaaaaaaaaugcaucccccccccccccccccccccccccccccccaaaggcucuuuucagagccaccagaauu

SEQ ID NO: 10941 - RNA, 1104 nt, Artificial Sequence
  mRNA product Design h-1 comprising derived and/or modified sequence from HRSV(A2)__P03421.1__P (opt11)
gggagacccgugacccggaaguuguacggcuacgcgacuuucccucccacaaacccucgcgcccuuccuuuccuacuugggcccggcagaaagcuuaccauggaaaaauucgcgcccgaguuccacggcgaggacgcgaacaaccgcgcgacaaaguuccuagaaucaaucaagggcaaauucacgagcccgaaagaccccaagaaaaaggacucaaucauaagcgugaacucgaucgacaucgaggucacgaaagagagcccgaucacaagcaacagcaccauaauaaacccgaccaacgaaacagacgacaccgcgggcaacaaaccgaacuaccaaagaaaaccgcucgugagcuucaaagaagacccgaccccaagcgacaacccguucucaaaacuauacaaggaaacgaucgagaccuucgacaacaacgaggaagagagcucguacucguacgaggaaauaaacgaccaaacaaacgacaacauaaccgcacgccuagacaggaucgacgaaaaacucucggaaauacucgggaugcuacacacgcucguggucgcgagcgcaggcccgaccucggccagggacggcaucagggacgcaaugauaggccugcgagaggaaaugaucgagaaaauacgcaccgaagcacucaugaccaacgacagacucgaagccauggccaggcucaggaacgaagaauccgaaaagauggcgaaagacaccucggacgaggucucgcucaaccccacgagcgagaaacugaacaaccuacuggaagggaacgacagcgacaacgaccuuucccucgaggacuucugaggacuaguacuggcugcaucucccuuuccucuguccuccauccuucucccaggauggugaagggggaccugguacccagugauccccaccccaggauccuaaaucaugacuuaccugcuaauaaaaacucauuggaaaagugagaagaucuaaaaaaaaaaaaaaaaaaaaaaaaaaaaaaaaaaaaaaaaaaaaaaaaaaaaaaaaaaaaaaaaugcaucccccccccccccccccccccccccccccccaaaggcucuuuucagagccaccagaauu

SEQ ID NO: 10942 - RNA, 1320 nt, Artificial Sequence
  mRNA product Design h-2 comprising derived and/or modified sequence from HRSV(A2)__P03421.1__P (wt)
gggagacccgugacccggaaguuguacggcuacgcgacuuucccucccacaaacccucgcgcccuuccuuuccuacuugggcccggcagaaagcuuaccauggaaaaguuugcuccugaauuccauggagaagaugcaaacaacagggcuacuaaauuccuagaaucaauaaagggcaaauucacaucacccaaagaucccaagaaaaaagauaguaucauaucugucaacucaauagauauagaaguaaccaaagaaagcccuauaacaucaaauucaacuauuaucaacccaacaaaugagacagaugauacugcagggaacaagcccaauuaucaaagaaaaccucuaguaaguuucaaagaagacccuacaccaagugauaaucccuuuucuaaacuauacaaagaaaccauagaaacauuugauaacaaugaagaagaauccagcuauucauacgaagaaauaaaugaucagacaaacgauaauauaacagcaagauuagauaggauugaugaaaaauuaagugaaauacuaggaaugcuucacacauuaguaguggcaagugcaggaccuacaucugcucgggaugguauaagagaugccaugauugguuuaagagaagaaaugauagaaaaaaucagaacugaagcauuaaugaccaaugacagauuagaagcuauggcaagacucaggaaugaggaaagugaaaagauggcaaaagacacaucagaugaagugucucucaauccaacaucagagaaauugaacaaccuauuggaagggaaugauagugacaaugaucuaucacuugaagauuucugaggacuagugaagggaacacccaaauuuaauucagccuuaagcacaauuaauuaagagugaaacguaauuguacaagcaguuggucacccaccauagggcaugaucaacaccgcaaccuuuccuuuuucccccagugauucugaaaaaccccucuucccuucagcuugcuuagauguuccaaauuuaguaagcuuaaggcggccuacagaagaaaaagaaaaaaaaggccacaaaaguucccucucacuuucaguaaauaaaauaaaagcagcaacagaaauaaagaaauaaaugaaauucaaaaugaaauaaauauuguguugugcagcauuaaaaaaucaauaaaaauuaaaaaugagcaagaucuaaaaaaaaaaaaaaaaaaaaaaaaaaaaaaaaaaaaaaaaaaaaaaaaaaaaaaaaaaaaaaaaugcaucccccccccccccccccccccccccccccccaaaggcucuuuucagagccaccagaauu

SEQ ID NO: 10943 - RNA, 1320 nt, Artificial Sequence
  mRNA product Design h-2 comprising derived and/or modified sequence from HRSV(A2)__P03421.1__P (opt1)
gggagacccgugacccggaaguuguacggcuacgcgacuuucccucccacaaacccucgcgcccuuccuuuccuacuugggcccggcagaaagcuuaccauggagaaguucgcccccgaguuccacggcgaggacgccaacaaccgcgcgaccaaguuccuggagagcaucaaggggaaguucaccuccccgaaggaccccaagaagaaggacagcaucaucuccgugaacagcaucgacaucgaggucacgaaggagucccccaucaccagcaacuccaccaucaucaaccccaccaacgagacggacgacaccgccggcaacaagccgaacuaccagcggaagccccucgugagcuucaaggaggaccccacccccuccgacaacccguucagcaagcuguacaaggagaccaucgagacguucgacaacaacgaggaggaguccagcuacuccuacgaggagaucaacgaccagaccaacgacaacaucaccgcccgccuggaccggaucgacgagaagcucagcgagauccuggggaugcugcacacccucguggucgccuccgccggccccacgagcgcgcgcgacgggauccgggacgccaugaucggccugcgcgaggagaugaucgagaagauccggaccgaggcccugaugaccaacgaccgccucgaggccauggcgcggcugcgcaacgaggaguccgagaagauggccaaggacaccagcgacgaggugucccugaaccccacgagcgagaagcucaacaaccugcuggagggcaacgacagcgacaacgaccucucccuggaggacuucugaggacuagugaagggaacacccaaauuuaauucagccuuaagcacaauuaauuaagagugaaacguaauuguacaagcaguuggucacccaccauagggcaugaucaacaccgcaaccuuuccuuuuucccccagugauucugaaaaaccccucuucccuucagcuugcuuagauguuccaaauuuaguaagcuuaaggcggccuacagaagaaaaagaaaaaaaaggccacaaaaguucccucucacuuucaguaaauaaaauaaaagcagcaacagaaauaaagaaauaaaugaaauucaaaaugaaauaaauauuguguugugcagcauuaaaaaaucaauaaaaauuaaaaaugagcaagaucuaaaaaaaaaaaaaaaaaaaaaaaaaaaaaaaaaaaaaaaaaaaaaaaaaaaaaaaaaaaaaaaaugcaucccccccccccccccccccccccccccccccaaaggcucuuuucagagccaccagaauu

SEQ ID NO: 10944 - RNA, 1320 nt, Artificial Sequence
  mRNA product Design h-2 comprising derived and/or modified sequence from HRSV(A2)__P03421.1__P (opt2)
gggagacccgugacccggaaguuguacggcuacgcgacuuucccucccacaaacccucgcgcccuuccuuuccuacuugggcccggcagaaagcuuaccauggagaaguucgcccccgaguuccacggcgaggacgccaacaaccgcgccaccaaguuccucgaguccaucaagggcaaguucaccucccccaaggaccccaagaagaaggacuccaucaucuccgucaacuccaucgacaucgaggucaccaaggagucccccaucaccuccaacuccaccaucaucaaccccaccaacgagaccgacgacaccgccggcaacaagcccaacuaccagcgcaagccccucgucuccuucaaggaggaccccacccccuccgacaaccccuucuccaagcucuacaaggagaccaucgagaccuucgacaacaacgaggaggaguccuccuacuccuacgaggagaucaacgaccagaccaacgacaacaucaccgcccgccucgaccgcaucgacgagaagcucuccgagauccucggcaugcuccacacccucgucgucgccuccgccggccccaccuccgcccgcgacggcauccgcgacgccaugaucggccuccgcgaggagaugaucgagaagauccgcaccgaggcccucaugaccaacgaccgccucgaggccauggcccgccuccgcaacgaggaguccgagaagauggccaaggacaccuccgacgaggucucccucaaccccaccuccgagaagcucaacaaccuccucgagggcaacgacuccgacaacgaccucucccucgaggacuucugaggacuagugaagggaacacccaaauuuaauucagccuuaagcacaauuaauuaagagugaaacguaauuguacaagcaguuggucacccaccauagggcaugaucaacaccgcaaccuuuccuuuuucccccagugauucugaaaaaccccucuucccuucagcuugcuuagauguuccaaauuuaguaagcuuaaggcggccuacagaagaaaaagaaaaaaaaggccacaaaaguucccucucacuuucaguaaauaaaauaaaagcagcaacagaaauaaagaaauaaaugaaauucaaaaugaaauaaauauuguguugugcagcauuaaaaaaucaauaaaaauuaaaaaugagcaagaucuaaaaaaaaaaaaaaaaaaaaaaaaaaaaaaaaaaaaaaaaaaaaaaaaaaaaaaaaaaaaaaaaugcaucccccccccccccccccccccccccccccccaaaggcucuuuucagagccaccagaauu

SEQ ID NO: 10945 - RNA, 1320 nt, Artificial Sequence
  mRNA product Design h-2 comprising derived and/or modified sequence from HRSV(A2)__P03421.1__P (opt3)
gggagacccgugacccggaaguuguacggcuacgcgacuuucccucccacaaacccucgcgcccuuccuuuccuacuugggcccggcagaaagcuuaccauggagaaguucgcccccgaauuucacggcgaggacgcuaacaauagagcaaccaaauuccuggaaagcaucaaggggaaauuuacauccccuaaggauccgaaaaagaaggacucuauuauaucagugaacaguaucgauauugaggucacuaaagaaagcccaaucacguccaauucuaccauuaucaaccccacaaaugagacugacgauaccgccggaaacaagccuaauuaccagaggaaaccacucguuucguucaaggaggaccccacaccuucagauaacccauuuagcaaacuuuauaaggaaaccauagagacuuucgacaauaacgaagaggagaguuccuacucuuaugaagagaucaaugaucaaacaaacgacaauauuaccgcgcggcuggaucgcaucgacgaaaaguugagcgagauuuuagguaugcugcauacgcuagugguagcuuccgccggccccacuucagcacgagaugggauccgugacgccaugauaggacucagagaagagaugauugagaaaaucaggaccgaagcucugaugacaaacgaccggcuugaggcaauggcccgccugagaaaugaagagagugaaaagauggcuaaagauacuagcgacgaggugucuuugaacccuaccuccgagaagcucaacaaucugcuggaaggcaacgauucagacaaugaucucagcuuagaggacuuuugaggacuagugaagggaacacccaaauuuaauucagccuuaagcacaauuaauuaagagugaaacguaauuguacaagcaguuggucacccaccauagggcaugaucaacaccgcaaccuuuccuuuuucccccagugauucugaaaaaccccucuucccuucagcuugcuuagauguuccaaauuuaguaagcuuaaggcggccuacagaagaaaaagaaaaaaaaggccacaaaaguucccucucacuuucaguaaauaaaauaaaagcagcaacagaaauaaagaaauaaaugaaauucaaaaugaaauaaauauuguguugugcagcauuaaaaaaucaauaaaaauuaaaaaugagcaagaucuaaaaaaaaaaaaaaaaaaaaaaaaaaaaaaaaaaaaaaaaaaaaaaaaaaaaaaaaaaaaaaaaugcaucccccccccccccccccccccccccccccccaaaggcucuuuucagagccaccagaauu

SEQ ID NO: 10946 - RNA, 1320 nt, Artificial Sequence
  mRNA product Design h-2 comprising derived and/or modified sequence from HRSV(A2)__P03421.1__P (opt4)
gggagacccgugacccggaaguuguacggcuacgcgacuuucccucccacaaacccucgcgcccuuccuuuccuacuugggcccggcagaaagcuuaccauggagaaguucgcccccgaguuccacggcgaggacgccaacaacagagccaccaaguuccuggagagcaucaagggcaaguucaccagccccaaggaccccaagaagaaggacagcaucaucagcgugaacagcaucgacaucgaggugaccaaggagagccccaucaccagcaacagcaccaucaucaaccccaccaacgagaccgacgacaccgccggcaacaagcccaacuaccagagaaagccccuggugagcuucaaggaggaccccacccccagcgacaaccccuucagcaagcuguacaaggagaccaucgagaccuucgacaacaacgaggaggagagcagcuacagcuacgaggagaucaacgaccagaccaacgacaacaucaccgccagacuggacagaaucgacgagaagcugagcgagauccugggcaugcugcacacccuggugguggccagcgccggccccaccagcgccagagacggcaucagagacgccaugaucggccugagagaggagaugaucgagaagaucagaaccgaggcccugaugaccaacgacagacuggaggccauggccagacugagaaacgaggagagcgagaagauggccaaggacaccagcgacgaggugagccugaaccccaccagcgagaagcugaacaaccugcuggagggcaacgacagcgacaacgaccugagccuggaggacuucugaggacuagugaagggaacacccaaauuuaauucagccuuaagcacaauuaauuaagagugaaacguaauuguacaagcaguuggucacccaccauagggcaugaucaacaccgcaaccuuuccuuuuucccccagugauucugaaaaaccccucuucccuucagcuugcuuagauguuccaaauuuaguaagcuuaaggcggccuacagaagaaaaagaaaaaaaaggccacaaaaguucccucucacuuucaguaaauaaaauaaaagcagcaacagaaauaaagaaauaaaugaaauucaaaaugaaauaaauauuguguugugcagcauuaaaaaaucaauaaaaauuaaaaaugagcaagaucuaaaaaaaaaaaaaaaaaaaaaaaaaaaaaaaaaaaaaaaaaaaaaaaaaaaaaaaaaaaaaaaaugcaucccccccccccccccccccccccccccccccaaaggcucuuuucagagccaccagaauu

SEQ ID NO: 10947 - RNA, 1320 nt, Artificial Sequence
  mRNA product Design h-2 comprising derived and/or modified sequence from HRSV(A2)__P03421.1__P (opt5)
gggagacccgugacccggaaguuguacggcuacgcgacuuucccucccacaaacccucgcgcccuuccuuuccuacuugggcccggcagaaagcuuaccauggagaaguucgcccccgaauuucacggcgaggacgcuaacaauagagccaccaaauuccuggaaagcaucaaggggaaauuuacauccccuaaggauccgaaaaagaaggacucuauuaucagcgugaacuccauugauaucgaggucacgaaagaaucucccauuaccagcaauuccacaaucaucaacccuaccaaugagacagacgauaccgcgggaaacaagcccaauuaccagcggaaaccucucguuucuuucaaggaggaccccacaccuagcgauaacccguuuuccaaacuguauaaggaaaccauugagacguucgacaauaacgaagaggagagcucuuacuccuaugaagagaucaaugaucaaaccaacgacaauauuacagcucgccuugauagaaucgacgaaaagcugagcgagauucucggcaugcugcauacccuugugguggccucugccgggcccacauccgcucgggauggaauccgcgacgccaugauuggccugagagaagagaugaucgagaaaauccggaccgaagcucucaugacgaacgaccgccuggaggccauggcgagacugcggaaugaagagagcgaaaagauggccaaagauacaucugacgaggucucccucaacccuaccagcgagaagcugaacaaucuucuggaagggaacgauuccgacaaugaucucucucuggaggacuuuugaggacuagugaagggaacacccaaauuuaauucagccuuaagcacaauuaauuaagagugaaacguaauuguacaagcaguuggucacccaccauagggcaugaucaacaccgcaaccuuuccuuuuucccccagugauucugaaaaaccccucuucccuucagcuugcuuagauguuccaaauuuaguaagcuuaaggcggccuacagaagaaaaagaaaaaaaaggccacaaaaguucccucucacuuucaguaaauaaaauaaaagcagcaacagaaauaaagaaauaaaugaaauucaaaaugaaauaaauauuguguugugcagcauuaaaaaaucaauaaaaauuaaaaaugagcaagaucuaaaaaaaaaaaaaaaaaaaaaaaaaaaaaaaaaaaaaaaaaaaaaaaaaaaaaaaaaaaaaaaaugcaucccccccccccccccccccccccccccccccaaaggcucuuuucagagccaccagaauu

SEQ ID NO: 10948 - RNA, 1320 nt, Artificial Sequence
  mRNA product Design h-2 comprising derived and/or modified sequence from HRSV(A2)__P03421.1__P (opt6)
gggagacccgugacccggaaguuguacggcuacgcgacuuucccucccacaaacccucgcgcccuuccuuuccuacuugggcccggcagaaagcuuaccauggaaaaauucgcaccagaauuucacggagaagacgcaaacaacagagcaacaaaauucuuagaaucaaucaaaggaaaauucacaagcccaaaagacccaaaaaaaaaagacucaauaauaagcguaaacucaauagacauagaaguaacaaaagaaagcccaauaacaagcaacagcacaauaauaaacccaacaaacgaaacagaugacacagcuggaaauaaaccaaacuaccaaagaaaaccccuagucagcuucaaagaagaccccacaccaucagacaacccauucagcaaacuauauaaagaaacaauagaaacauuugacaacaacgaagaagaaucaucauacucauacgaagaaauaaacgaccaaacaaacgacaacauaaccgcaagauuagacagaauagaugaaaaacuaucagaaauacuaggaaugcuacacacauuaguaguagcaagcgcaggaccaacaucagcaagagacggaauaagagacgcaaugauaggacucagagaagaaaugauagaaaaaauaagaacagaagcacuaaugacaaacgacagauuagaagcaauggcaagacuaagaaaugaagaaucggaaaaaauggcaaaagacacaucagacgaaguaagccuaaacccaacaucagaaaaauuaaauaaccuacuagaaggaaacgacagcgacaacgacuuaucacuagaagacuucuaaggacuagugaagggaacacccaaauuuaauucagccuuaagcacaauuaauuaagagugaaacguaauuguacaagcaguuggucacccaccauagggcaugaucaacaccgcaaccuuuccuuuuucccccagugauucugaaaaaccccucuucccuucagcuugcuuagauguuccaaauuuaguaagcuuaaggcggccuacagaagaaaaagaaaaaaaaggccacaaaaguucccucucacuuucaguaaauaaaauaaaagcagcaacagaaauaaagaaauaaaugaaauucaaaaugaaauaaauauuguguugugcagcauuaaaaaaucaauaaaaauuaaaaaugagcaagaucuaaaaaaaaaaaaaaaaaaaaaaaaaaaaaaaaaaaaaaaaaaaaaaaaaaaaaaaaaaaaaaaaugcaucccccccccccccccccccccccccccccccaaaggcucuuuucagagccaccagaauu

SEQ ID NO: 10949 - RNA, 1320 nt, Artificial Sequence
  mRNA product Design h-2 comprising derived and/or modified sequence from HRSV(A2)__P03421.1__P (opt11)
gggagacccgugacccggaaguuguacggcuacgcgacuuucccucccacaaacccucgcgcccuuccuuuccuacuugggcccggcagaaagcuuaccauggaaaaauucgcgcccgaguuccacggcgaggacgcgaacaaccgcgcgacaaaguuccuagaaucaaucaagggcaaauucacgagcccgaaagaccccaagaaaaaggacucaaucauaagcgugaacucgaucgacaucgaggucacgaaagagagcccgaucacaagcaacagcaccauaauaaacccgaccaacgaaacagacgacaccgcgggcaacaaaccgaacuaccaaagaaaaccgcucgugagcuucaaagaagacccgaccccaagcgacaacccguucucaaaacuauacaaggaaacgaucgagaccuucgacaacaacgaggaagagagcucguacucguacgaggaaauaaacgaccaaacaaacgacaacauaaccgcacgccuagacaggaucgacgaaaaacucucggaaauacucgggaugcuacacacgcucguggucgcgagcgcaggcccgaccucggccagggacggcaucagggacgcaaugauaggccugcgagaggaaaugaucgagaaaauacgcaccgaagcacucaugaccaacgacagacucgaagccauggccaggcucaggaacgaagaauccgaaaagauggcgaaagacaccucggacgaggucucgcucaaccccacgagcgagaaacugaacaaccuacuggaagggaacgacagcgacaacgaccuuucccucgaggacuucugaggacuagugaagggaacacccaaauuuaauucagccuuaagcacaauuaauuaagagugaaacguaauuguacaagcaguuggucacccaccauagggcaugaucaacaccgcaaccuuuccuuuuucccccagugauucugaaaaaccccucuucccuucagcuugcuuagauguuccaaauuuaguaagcuuaaggcggccuacagaagaaaaagaaaaaaaaggccacaaaaguucccucucacuuucaguaaauaaaauaaaagcagcaacagaaauaaagaaauaaaugaaauucaaaaugaaauaaauauuguguugugcagcauuaaaaaaucaauaaaaauuaaaaaugagcaagaucuaaaaaaaaaaaaaaaaaaaaaaaaaaaaaaaaaaaaaaaaaaaaaaaaaaaaaaaaaaaaaaaaugcaucccccccccccccccccccccccccccccccaaaggcucuuuucagagccaccagaauu

SEQ ID NO: 10950 - RNA, 1100 nt, Artificial Sequence
  mRNA product Design h-3 comprising derived and/or modified sequence from HRSV(A2)__P03421.1__P (wt)
gggagacccgugacccggaaguuguacggcuacgcgacuuucccucccacaaacccucgcgcccuuccuuuccuacuugggcccggcagaaagcuuaccauggaaaaguuugcuccugaauuccauggagaagaugcaaacaacagggcuacuaaauuccuagaaucaauaaagggcaaauucacaucacccaaagaucccaagaaaaaagauaguaucauaucugucaacucaauagauauagaaguaaccaaagaaagcccuauaacaucaaauucaacuauuaucaacccaacaaaugagacagaugauacugcagggaacaagcccaauuaucaaagaaaaccucuaguaaguuucaaagaagacccuacaccaagugauaaucccuuuucuaaacuauacaaagaaaccauagaaacauuugauaacaaugaagaagaauccagcuauucauacgaagaaauaaaugaucagacaaacgauaauauaacagcaagauuagauaggauugaugaaaaauuaagugaaauacuaggaaugcuucacacauuaguaguggcaagugcaggaccuacaucugcucgggaugguauaagagaugccaugauugguuuaagagaagaaaugauagaaaaaaucagaacugaagcauuaaugaccaaugacagauuagaagcuauggcaagacucaggaaugaggaaagugaaaagauggcaaaagacacaucagaugaagugucucucaauccaacaucagagaaauugaacaaccuauuggaagggaaugauagugacaaugaucuaucacuugaagauuucugaggacuaguggaagcauuuuccuggcugauuaaaagaaauuacucagcuauggucaucuguuccuguuagaaggcuaugcagcauauuauauacuaugcgcauguuaugaaaugcauaauaaaaaauuuuaaaaaaucuaaaagaucuaaaaaaaaaaaaaaaaaaaaaaaaaaaaaaaaaaaaaaaaaaaaaaaaaaaaaaaaaaaaaaaaugcaucccccccccccccccccccccccccccccccaaaggcucuuuucagagccaccagaauu

SEQ ID NO: 10951 - RNA, 1100 nt, Artificial Sequence
  mRNA product Design h-3 comprising derived and/or modified sequence from HRSV(A2)__P03421.1__P (opt1)
gggagacccgugacccggaaguuguacggcuacgcgacuuucccucccacaaacccucgcgcccuuccuuuccuacuugggcccggcagaaagcuuaccauggagaaguucgcccccgaguuccacggcgaggacgccaacaaccgcgcgaccaaguuccuggagagcaucaaggggaaguucaccuccccgaaggaccccaagaagaaggacagcaucaucuccgugaacagcaucgacaucgaggucacgaaggagucccccaucaccagcaacuccaccaucaucaaccccaccaacgagacggacgacaccgccggcaacaagccgaacuaccagcggaagccccucgugagcuucaaggaggaccccacccccuccgacaacccguucagcaagcuguacaaggagaccaucgagacguucgacaacaacgaggaggaguccagcuacuccuacgaggagaucaacgaccagaccaacgacaacaucaccgcccgccuggaccggaucgacgagaagcucagcgagauccuggggaugcugcacacccucguggucgccuccgccggccccacgagcgcgcgcgacgggauccgggacgccaugaucggccugcgcgaggagaugaucgagaagauccggaccgaggcccugaugaccaacgaccgccucgaggccauggcgcggcugcgcaacgaggaguccgagaagauggccaaggacaccagcgacgaggugucccugaaccccacgagcgagaagcucaacaaccugcuggagggcaacgacagcgacaacgaccucucccuggaggacuucugaggacuaguggaagcauuuuccuggcugauuaaaagaaauuacucagcuauggucaucuguuccuguuagaaggcuaugcagcauauuauauacuaugcgcauguuaugaaaugcauaauaaaaaauuuuaaaaaaucuaaaagaucuaaaaaaaaaaaaaaaaaaaaaaaaaaaaaaaaaaaaaaaaaaaaaaaaaaaaaaaaaaaaaaaaugcaucccccccccccccccccccccccccccccccaaaggcucuuuucagagccaccagaauu

SEQ ID NO: 10952 - RNA, 1100 nt, Artificial Sequence
  mRNA product Design h-3 comprising derived and/or modified sequence from HRSV(A2)__P03421.1__P (opt2)
gggagacccgugacccggaaguuguacggcuacgcgacuuucccucccacaaacccucgcgcccuuccuuuccuacuugggcccggcagaaagcuuaccauggagaaguucgcccccgaguuccacggcgaggacgccaacaaccgcgccaccaaguuccucgaguccaucaagggcaaguucaccucccccaaggaccccaagaagaaggacuccaucaucuccgucaacuccaucgacaucgaggucaccaaggagucccccaucaccuccaacuccaccaucaucaaccccaccaacgagaccgacgacaccgccggcaacaagcccaacuaccagcgcaagccccucgucuccuucaaggaggaccccacccccuccgacaaccccuucuccaagcucuacaaggagaccaucgagaccuucgacaacaacgaggaggaguccuccuacuccuacgaggagaucaacgaccagaccaacgacaacaucaccgcccgccucgaccgcaucgacgagaagcucuccgagauccucggcaugcuccacacccucgucgucgccuccgccggccccaccuccgcccgcgacggcauccgcgacgccaugaucggccuccgcgaggagaugaucgagaagauccgcaccgaggcccucaugaccaacgaccgccucgaggccauggcccgccuccgcaacgaggaguccgagaagauggccaaggacaccuccgacgaggucucccucaaccccaccuccgagaagcucaacaaccuccucgagggcaacgacuccgacaacgaccucucccucgaggacuucugaggacuaguggaagcauuuuccuggcugauuaaaagaaauuacucagcuauggucaucuguuccuguuagaaggcuaugcagcauauuauauacuaugcgcauguuaugaaaugcauaauaaaaaauuuuaaaaaaucuaaaagaucuaaaaaaaaaaaaaaaaaaaaaaaaaaaaaaaaaaaaaaaaaaaaaaaaaaaaaaaaaaaaaaaaugcaucccccccccccccccccccccccccccccccaaaggcucuuuucagagccaccagaauu

SEQ ID NO: 10953 - RNA, 1100 nt, Artificial Sequence
  mRNA product Design h-3 comprising derived and/or modified sequence from HRSV(A2)__P03421.1__P (opt3)
gggagacccgugacccggaaguuguacggcuacgcgacuuucccucccacaaacccucgcgcccuuccuuuccuacuugggcccggcagaaagcuuaccauggagaaguucgcccccgaauuucacggcgaggacgcuaacaauagagcaaccaaauuccuggaaagcaucaaggggaaauuuacauccccuaaggauccgaaaaagaaggacucuauuauaucagugaacaguaucgauauugaggucacuaaagaaagcccaaucacguccaauucuaccauuaucaaccccacaaaugagacugacgauaccgccggaaacaagccuaauuaccagaggaaaccacucguuucguucaaggaggaccccacaccuucagauaacccauuuagcaaacuuuauaaggaaaccauagagacuuucgacaauaacgaagaggagaguuccuacucuuaugaagagaucaaugaucaaacaaacgacaauauuaccgcgcggcuggaucgcaucgacgaaaaguugagcgagauuuuagguaugcugcauacgcuagugguagcuuccgccggccccacuucagcacgagaugggauccgugacgccaugauaggacucagagaagagaugauugagaaaaucaggaccgaagcucugaugacaaacgaccggcuugaggcaauggcccgccugagaaaugaagagagugaaaagauggcuaaagauacuagcgacgaggugucuuugaacccuaccuccgagaagcucaacaaucugcuggaaggcaacgauucagacaaugaucucagcuuagaggacuuuugaggacuaguggaagcauuuuccuggcugauuaaaagaaauuacucagcuauggucaucuguuccuguuagaaggcuaugcagcauauuauauacuaugcgcauguuaugaaaugcauaauaaaaaauuuuaaaaaaucuaaaagaucuaaaaaaaaaaaaaaaaaaaaaaaaaaaaaaaaaaaaaaaaaaaaaaaaaaaaaaaaaaaaaaaaugcaucccccccccccccccccccccccccccccccaaaggcucuuuucagagccaccagaauu

SEQ ID NO: 10954 - RNA, 1100 nt, Artificial Sequence
  mRNA product Design h-3 comprising derived and/or modified sequence from HRSV(A2)__P03421.1__P (opt4)
gggagacccgugacccggaaguuguacggcuacgcgacuuucccucccacaaacccucgcgcccuuccuuuccuacuugggcccggcagaaagcuuaccauggagaaguucgcccccgaguuccacggcgaggacgccaacaacagagccaccaaguuccuggagagcaucaagggcaaguucaccagccccaaggaccccaagaagaaggacagcaucaucagcgugaacagcaucgacaucgaggugaccaaggagagccccaucaccagcaacagcaccaucaucaaccccaccaacgagaccgacgacaccgccggcaacaagcccaacuaccagagaaagccccuggugagcuucaaggaggaccccacccccagcgacaaccccuucagcaagcuguacaaggagaccaucgagaccuucgacaacaacgaggaggagagcagcuacagcuacgaggagaucaacgaccagaccaacgacaacaucaccgccagacuggacagaaucgacgagaagcugagcgagauccugggcaugcugcacacccuggugguggccagcgccggccccaccagcgccagagacggcaucagagacgccaugaucggccugagagaggagaugaucgagaagaucagaaccgaggcccugaugaccaacgacagacuggaggccauggccagacugagaaacgaggagagcgagaagauggccaaggacaccagcgacgaggugagccugaaccccaccagcgagaagcugaacaaccugcuggagggcaacgacagcgacaacgaccugagccuggaggacuucugaggacuaguggaagcauuuuccuggcugauuaaaagaaauuacucagcuauggucaucuguuccuguuagaaggcuaugcagcauauuauauacuaugcgcauguuaugaaaugcauaauaaaaaauuuuaaaaaaucuaaaagaucuaaaaaaaaaaaaaaaaaaaaaaaaaaaaaaaaaaaaaaaaaaaaaaaaaaaaaaaaaaaaaaaaugcaucccccccccccccccccccccccccccccccaaaggcucuuuucagagccaccagaauu

SEQ ID NO: 10955 - RNA, 1100 nt, Artificial Sequence
  mRNA product Design h-3 comprising derived and/or modified sequence from HRSV(A2)__P03421.1__P (opt5)
gggagacccgugacccggaaguuguacggcuacgcgacuuucccucccacaaacccucgcgcccuuccuuuccuacuugggcccggcagaaagcuuaccauggagaaguucgcccccgaauuucacggcgaggacgcuaacaauagagccaccaaauuccuggaaagcaucaaggggaaauuuacauccccuaaggauccgaaaaagaaggacucuauuaucagcgugaacuccauugauaucgaggucacgaaagaaucucccauuaccagcaauuccacaaucaucaacccuaccaaugagacagacgauaccgcgggaaacaagcccaauuaccagcggaaaccucucguuucuuucaaggaggaccccacaccuagcgauaacccguuuuccaaacuguauaaggaaaccauugagacguucgacaauaacgaagaggagagcucuuacuccuaugaagagaucaaugaucaaaccaacgacaauauuacagcucgccuugauagaaucgacgaaaagcugagcgagauucucggcaugcugcauacccuugugguggccucugccgggcccacauccgcucgggauggaauccgcgacgccaugauuggccugagagaagagaugaucgagaaaauccggaccgaagcucucaugacgaacgaccgccuggaggccauggcgagacugcggaaugaagagagcgaaaagauggccaaagauacaucugacgaggucucccucaacccuaccagcgagaagcugaacaaucuucuggaagggaacgauuccgacaaugaucucucucuggaggacuuuugaggacuaguggaagcauuuuccuggcugauuaaaagaaauuacucagcuauggucaucuguuccuguuagaaggcuaugcagcauauuauauacuaugcgcauguuaugaaaugcauaauaaaaaauuuuaaaaaaucuaaaagaucuaaaaaaaaaaaaaaaaaaaaaaaaaaaaaaaaaaaaaaaaaaaaaaaaaaaaaaaaaaaaaaaaugcaucccccccccccccccccccccccccccccccaaaggcucuuuucagagccaccagaauu

SEQ ID NO: 10956 - RNA, 1100 nt, Artificial Sequence
  mRNA product Design h-3 comprising derived and/or modified sequence from HRSV(A2)__P03421.1__P (opt6)
gggagacccgugacccggaaguuguacggcuacgcgacuuucccucccacaaacccucgcgcccuuccuuuccuacuugggcccggcagaaagcuuaccauggaaaaauucgcaccagaauuucacggagaagacgcaaacaacagagcaacaaaauucuuagaaucaaucaaaggaaaauucacaagcccaaaagacccaaaaaaaaaagacucaauaauaagcguaaacucaauagacauagaaguaacaaaagaaagcccaauaacaagcaacagcacaauaauaaacccaacaaacgaaacagaugacacagcuggaaauaaaccaaacuaccaaagaaaaccccuagucagcuucaaagaagaccccacaccaucagacaacccauucagcaaacuauauaaagaaacaauagaaacauuugacaacaacgaagaagaaucaucauacucauacgaagaaauaaacgaccaaacaaacgacaacauaaccgcaagauuagacagaauagaugaaaaacuaucagaaauacuaggaaugcuacacacauuaguaguagcaagcgcaggaccaacaucagcaagagacggaauaagagacgcaaugauaggacucagagaagaaaugauagaaaaaauaagaacagaagcacuaaugacaaacgacagauuagaagcaauggcaagacuaagaaaugaagaaucggaaaaaauggcaaaagacacaucagacgaaguaagccuaaacccaacaucagaaaaauuaaauaaccuacuagaaggaaacgacagcgacaacgacuuaucacuagaagacuucuaaggacuaguggaagcauuuuccuggcugauuaaaagaaauuacucagcuauggucaucuguuccuguuagaaggcuaugcagcauauuauauacuaugcgcauguuaugaaaugcauaauaaaaaauuuuaaaaaaucuaaaagaucuaaaaaaaaaaaaaaaaaaaaaaaaaaaaaaaaaaaaaaaaaaaaaaaaaaaaaaaaaaaaaaaaugcaucccccccccccccccccccccccccccccccaaaggcucuuuucagagccaccagaauu

SEQ ID NO: 10957 - RNA, 1100 nt, Artificial Sequence
  mRNA product Design h-3 comprising derived and/or modified sequence from HRSV(A2)__P03421.1__P (opt11)
gggagacccgugacccggaaguuguacggcuacgcgacuuucccucccacaaacccucgcgcccuuccuuuccuacuugggcccggcagaaagcuuaccauggaaaaauucgcgcccgaguuccacggcgaggacgcgaacaaccgcgcgacaaaguuccuagaaucaaucaagggcaaauucacgagcccgaaagaccccaagaaaaaggacucaaucauaagcgugaacucgaucgacaucgaggucacgaaagagagcccgaucacaagcaacagcaccauaauaaacccgaccaacgaaacagacgacaccgcgggcaacaaaccgaacuaccaaagaaaaccgcucgugagcuucaaagaagacccgaccccaagcgacaacccguucucaaaacuauacaaggaaacgaucgagaccuucgacaacaacgaggaagagagcucguacucguacgaggaaauaaacgaccaaacaaacgacaacauaaccgcacgccuagacaggaucgacgaaaaacucucggaaauacucgggaugcuacacacgcucguggucgcgagcgcaggcccgaccucggccagggacggcaucagggacgcaaugauaggccugcgagaggaaaugaucgagaaaauacgcaccgaagcacucaugaccaacgacagacucgaagccauggccaggcucaggaacgaagaauccgaaaagauggcgaaagacaccucggacgaggucucgcucaaccccacgagcgagaaacugaacaaccuacuggaagggaacgacagcgacaacgaccuuucccucgaggacuucugaggacuaguggaagcauuuuccuggcugauuaaaagaaauuacucagcuauggucaucuguuccuguuagaaggcuaugcagcauauuauauacuaugcgcauguuaugaaaugcauaauaaaaaauuuuaaaaaaucuaaaagaucuaaaaaaaaaaaaaaaaaaaaaaaaaaaaaaaaaaaaaaaaaaaaaaaaaaaaaaaaaaaaaaaaugcaucccccccccccccccccccccccccccccccaaaggcucuuuucagagccaccagaauu

SEQ ID NO: 10958 - RNA, 1163 nt, Artificial Sequence
  mRNA product Design h-4 comprising derived and/or modified sequence from HRSV(A2)__P03421.1__P (wt)
gggagagggcgcuuggcuugcaaggacccugagcugcggcauugaagcacacccaacccaacucgacugaagucagccucacugaaccggaucugagaaucuucucucucugggcuugccagggcucuccgaaccuagcuagcauccucuucaauuccaacuagaaagcuuaccauggaaaaguuugcuccugaauuccauggagaagaugcaaacaacagggcuacuaaauuccuagaaucaauaaagggcaaauucacaucacccaaagaucccaagaaaaaagauaguaucauaucugucaacucaauagauauagaaguaaccaaagaaagcccuauaacaucaaauucaacuauuaucaacccaacaaaugagacagaugauacugcagggaacaagcccaauuaucaaagaaaaccucuaguaaguuucaaagaagacccuacaccaagugauaaucccuuuucuaaacuauacaaagaaaccauagaaacauuugauaacaaugaagaagaauccagcuauucauacgaagaaauaaaugaucagacaaacgauaauauaacagcaagauuagauaggauugaugaaaaauuaagugaaauacuaggaaugcuucacacauuaguaguggcaagugcaggaccuacaucugcucgggaugguauaagagaugccaugauugguuuaagagaagaaaugauagaaaaaaucagaacugaagcauuaaugaccaaugacagauuagaagcuauggcaagacucaggaaugaggaaagugaaaagauggcaaaagacacaucagaugaagugucucucaauccaacaucagagaaauugaacaaccuauuggaagggaaugauagugacaaugaucuaucacuugaagauuucugaggacuaguaauaaggaaacuguaugaaugucugugggcaggaagugaagagauccuucuguaaagguuuuuggaauuaugucugcugaauaauaaacuuuuuugaaauaauaaaucugguagaaaaaugagaucuaaaaaaaaaaaaaaaaaaaaaaaaaaaaaaaaaaaaaaaaaaaaaaaaaaaaaaaaaaaaaaaaugcaucccccccccccccccccccccccccccccccaaaggcucuuuucagagccaccagaauu

SEQ ID NO: 10959 - RNA, 1163 nt, Artificial Sequence
  mRNA product Design h-4 comprising derived and/or modified sequence from HRSV(A2)__P03421.1__P (opt1)
gggagagggcgcuuggcuugcaaggacccugagcugcggcauugaagcacacccaacccaacucgacugaagucagccucacugaaccggaucugagaaucuucucucucugggcuugccagggcucuccgaaccuagcuagcauccucuucaauuccaacuagaaagcuuaccauggagaaguucgcccccgaguuccacggcgaggacgccaacaaccgcgcgaccaaguuccuggagagcaucaaggggaaguucaccuccccgaaggaccccaagaagaaggacagcaucaucuccgugaacagcaucgacaucgaggucacgaaggagucccccaucaccagcaacuccaccaucaucaaccccaccaacgagacggacgacaccgccggcaacaagccgaacuaccagcggaagccccucgugagcuucaaggaggaccccacccccuccgacaacccguucagcaagcuguacaaggagaccaucgagacguucgacaacaacgaggaggaguccagcuacuccuacgaggagaucaacgaccagaccaacgacaacaucaccgcccgccuggaccggaucgacgagaagcucagcgagauccuggggaugcugcacacccucguggucgccuccgccggccccacgagcgcgcgcgacgggauccgggacgccaugaucggccugcgcgaggagaugaucgagaagauccggaccgaggcccugaugaccaacgaccgccucgaggccauggcgcggcugcgcaacgaggaguccgagaagauggccaaggacaccagcgacgaggugucccugaaccccacgagcgagaagcucaacaaccugcuggagggcaacgacagcgacaacgaccucucccuggaggacuucugaggacuaguaauaaggaaacuguaugaaugucugugggcaggaagugaagagauccuucuguaaagguuuuuggaauuaugucugcugaauaauaaacuuuuuugaaauaauaaaucugguagaaaaaugagaucuaaaaaaaaaaaaaaaaaaaaaaaaaaaaaaaaaaaaaaaaaaaaaaaaaaaaaaaaaaaaaaaaugcaucccccccccccccccccccccccccccccccaaaggcucuuuucagagccaccagaauu

SEQ ID NO: 10960 - RNA, 1163 nt, Artificial Sequence
  mRNA product Design h-4 comprising derived and/or modified sequence from HRSV(A2)__P03421.1__P (opt2)
gggagagggcgcuuggcuugcaaggacccugagcugcggcauugaagcacacccaacccaacucgacugaagucagccucacugaaccggaucugagaaucuucucucucugggcuugccagggcucuccgaaccuagcuagcauccucuucaauuccaacuagaaagcuuaccauggagaaguucgcccccgaguuccacggcgaggacgccaacaaccgcgccaccaaguuccucgaguccaucaagggcaaguucaccucccccaaggaccccaagaagaaggacuccaucaucuccgucaacuccaucgacaucgaggucaccaaggagucccccaucaccuccaacuccaccaucaucaaccccaccaacgagaccgacgacaccgccggcaacaagcccaacuaccagcgcaagccccucgucuccuucaaggaggaccccacccccuccgacaaccccuucuccaagcucuacaaggagaccaucgagaccuucgacaacaacgaggaggaguccuccuacuccuacgaggagaucaacgaccagaccaacgacaacaucaccgcccgccucgaccgcaucgacgagaagcucuccgagauccucggcaugcuccacacccucgucgucgccuccgccggccccaccuccgcccgcgacggcauccgcgacgccaugaucggccuccgcgaggagaugaucgagaagauccgcaccgaggcccucaugaccaacgaccgccucgaggccauggcccgccuccgcaacgaggaguccgagaagauggccaaggacaccuccgacgaggucucccucaaccccaccuccgagaagcucaacaaccuccucgagggcaacgacuccgacaacgaccucucccucgaggacuucugaggacuaguaauaaggaaacuguaugaaugucugugggcaggaagugaagagauccuucuguaaagguuuuuggaauuaugucugcugaauaauaaacuuuuuugaaauaauaaaucugguagaaaaaugagaucuaaaaaaaaaaaaaaaaaaaaaaaaaaaaaaaaaaaaaaaaaaaaaaaaaaaaaaaaaaaaaaaaugcaucccccccccccccccccccccccccccccccaaaggcucuuuucagagccaccagaauu

SEQ ID NO: 10961 - RNA, 1163 nt, Artificial Sequence
  mRNA product Design h-4 comprising derived and/or modified sequence from HRSV(A2)__P03421.1__P (opt3)
gggagagggcgcuuggcuugcaaggacccugagcugcggcauugaagcacacccaacccaacucgacugaagucagccucacugaaccggaucugagaaucuucucucucugggcuugccagggcucuccgaaccuagcuagcauccucuucaauuccaacuagaaagcuuaccauggagaaguucgcccccgaauuucacggcgaggacgcuaacaauagagcaaccaaauuccuggaaagcaucaaggggaaauuuacauccccuaaggauccgaaaaagaaggacucuauuauaucagugaacaguaucgauauugaggucacuaaagaaagcccaaucacguccaauucuaccauuaucaaccccacaaaugagacugacgauaccgccggaaacaagccuaauuaccagaggaaaccacucguuucguucaaggaggaccccacaccuucagauaacccauuuagcaaacuuuauaaggaaaccauagagacuuucgacaauaacgaagaggagaguuccuacucuuaugaagagaucaaugaucaaacaaacgacaauauuaccgcgcggcuggaucgcaucgacgaaaaguugagcgagauuuuagguaugcugcauacgcuagugguagcuuccgccggccccacuucagcacgagaugggauccgugacgccaugauaggacucagagaagagaugauugagaaaaucaggaccgaagcucugaugacaaacgaccggcuugaggcaauggcccgccugagaaaugaagagagugaaaagauggcuaaagauacuagcgacgaggugucuuugaacccuaccuccgagaagcucaacaaucugcuggaaggcaacgauucagacaaugaucucagcuuagaggacuuuugaggacuaguaauaaggaaacuguaugaaugucugugggcaggaagugaagagauccuucuguaaagguuuuuggaauuaugucugcugaauaauaaacuuuuuugaaauaauaaaucugguagaaaaaugagaucuaaaaaaaaaaaaaaaaaaaaaaaaaaaaaaaaaaaaaaaaaaaaaaaaaaaaaaaaaaaaaaaaugcaucccccccccccccccccccccccccccccccaaaggcucuuuucagagccaccagaauu

SEQ ID NO: 10962 - RNA, 1163 nt, Artificial Sequence
  mRNA product Design h-4 comprising derived and/or modified sequence from HRSV(A2)__P03421.1__P (opt4)
gggagagggcgcuuggcuugcaaggacccugagcugcggcauugaagcacacccaacccaacucgacugaagucagccucacugaaccggaucugagaaucuucucucucugggcuugccagggcucuccgaaccuagcuagcauccucuucaauuccaacuagaaagcuuaccauggagaaguucgcccccgaguuccacggcgaggacgccaacaacagagccaccaaguuccuggagagcaucaagggcaaguucaccagccccaaggaccccaagaagaaggacagcaucaucagcgugaacagcaucgacaucgaggugaccaaggagagccccaucaccagcaacagcaccaucaucaaccccaccaacgagaccgacgacaccgccggcaacaagcccaacuaccagagaaagccccuggugagcuucaaggaggaccccacccccagcgacaaccccuucagcaagcuguacaaggagaccaucgagaccuucgacaacaacgaggaggagagcagcuacagcuacgaggagaucaacgaccagaccaacgacaacaucaccgccagacuggacagaaucgacgagaagcugagcgagauccugggcaugcugcacacccuggugguggccagcgccggccccaccagcgccagagacggcaucagagacgccaugaucggccugagagaggagaugaucgagaagaucagaaccgaggcccugaugaccaacgacagacuggaggccauggccagacugagaaacgaggagagcgagaagauggccaaggacaccagcgacgaggugagccugaaccccaccagcgagaagcugaacaaccugcuggagggcaacgacagcgacaacgaccugagccuggaggacuucugaggacuaguaauaaggaaacuguaugaaugucugugggcaggaagugaagagauccuucuguaaagguuuuuggaauuaugucugcugaauaauaaacuuuuuugaaauaauaaaucugguagaaaaaugagaucuaaaaaaaaaaaaaaaaaaaaaaaaaaaaaaaaaaaaaaaaaaaaaaaaaaaaaaaaaaaaaaaaugcaucccccccccccccccccccccccccccccccaaaggcucuuuucagagccaccagaauu

SEQ ID NO: 10963 - RNA, 1163 nt, Artificial Sequence
  mRNA product Design h-4 comprising derived and/or modified sequence from HRSV(A2)__P03421.1__P (opt5)
gggagagggcgcuuggcuugcaaggacccugagcugcggcauugaagcacacccaacccaacucgacugaagucagccucacugaaccggaucugagaaucuucucucucugggcuugccagggcucuccgaaccuagcuagcauccucuucaauuccaacuagaaagcuuaccauggagaaguucgcccccgaauuucacggcgaggacgcuaacaauagagccaccaaauuccuggaaagcaucaaggggaaauuuacauccccuaaggauccgaaaaagaaggacucuauuaucagcgugaacuccauugauaucgaggucacgaaagaaucucccauuaccagcaauuccacaaucaucaacccuaccaaugagacagacgauaccgcgggaaacaagcccaauuaccagcggaaaccucucguuucuuucaaggaggaccccacaccuagcgauaacccguuuuccaaacuguauaaggaaaccauugagacguucgacaauaacgaagaggagagcucuuacuccuaugaagagaucaaugaucaaaccaacgacaauauuacagcucgccuugauagaaucgacgaaaagcugagcgagauucucggcaugcugcauacccuugugguggccucugccgggcccacauccgcucgggauggaauccgcgacgccaugauuggccugagagaagagaugaucgagaaaauccggaccgaagcucucaugacgaacgaccgccuggaggccauggcgagacugcggaaugaagagagcgaaaagauggccaaagauacaucugacgaggucucccucaacccuaccagcgagaagcugaacaaucuucuggaagggaacgauuccgacaaugaucucucucuggaggacuuuugaggacuaguaauaaggaaacuguaugaaugucugugggcaggaagugaagagauccuucuguaaagguuuuuggaauuaugucugcugaauaauaaacuuuuuugaaauaauaaaucugguagaaaaaugagaucuaaaaaaaaaaaaaaaaaaaaaaaaaaaaaaaaaaaaaaaaaaaaaaaaaaaaaaaaaaaaaaaaugcaucccccccccccccccccccccccccccccccaaaggcucuuuucagagccaccagaauu

SEQ ID NO: 10964 - RNA, 1163 nt, Artificial Sequence
  mRNA product Design h-4 comprising derived and/or modified sequence from HRSV(A2)__P03421.1__P (opt6)
gggagagggcgcuuggcuugcaaggacccugagcugcggcauugaagcacacccaacccaacucgacugaagucagccucacugaaccggaucugagaaucuucucucucugggcuugccagggcucuccgaaccuagcuagcauccucuucaauuccaacuagaaagcuuaccauggaaaaauucgcaccagaauuucacggagaagacgcaaacaacagagcaacaaaauucuuagaaucaaucaaaggaaaauucacaagcccaaaagacccaaaaaaaaaagacucaauaauaagcguaaacucaauagacauagaaguaacaaaagaaagcccaauaacaagcaacagcacaauaauaaacccaacaaacgaaacagaugacacagcuggaaauaaaccaaacuaccaaagaaaaccccuagucagcuucaaagaagaccccacaccaucagacaacccauucagcaaacuauauaaagaaacaauagaaacauuugacaacaacgaagaagaaucaucauacucauacgaagaaauaaacgaccaaacaaacgacaacauaaccgcaagauuagacagaauagaugaaaaacuaucagaaauacuaggaaugcuacacacauuaguaguagcaagcgcaggaccaacaucagcaagagacggaauaagagacgcaaugauaggacucagagaagaaaugauagaaaaaauaagaacagaagcacuaaugacaaacgacagauuagaagcaauggcaagacuaagaaaugaagaaucggaaaaaauggcaaaagacacaucagacgaaguaagccuaaacccaacaucagaaaaauuaaauaaccuacuagaaggaaacgacagcgacaacgacuuaucacuagaagacuucuaaggacuaguaauaaggaaacuguaugaaugucugugggcaggaagugaagagauccuucuguaaagguuuuuggaauuaugucugcugaauaauaaacuuuuuugaaauaauaaaucugguagaaaaaugagaucuaaaaaaaaaaaaaaaaaaaaaaaaaaaaaaaaaaaaaaaaaaaaaaaaaaaaaaaaaaaaaaaaugcaucccccccccccccccccccccccccccccccaaaggcucuuuucagagccaccagaauu

SEQ ID NO: 10965 - RNA, 1163 nt, Artificial Sequence
  mRNA product Design h-4 comprising derived and/or modified sequence from HRSV(A2)__P03421.1__P (opt11)
gggagagggcgcuuggcuugcaaggacccugagcugcggcauugaagcacacccaacccaacucgacugaagucagccucacugaaccggaucugagaaucuucucucucugggcuugccagggcucuccgaaccuagcuagcauccucuucaauuccaacuagaaagcuuaccauggaaaaauucgcgcccgaguuccacggcgaggacgcgaacaaccgcgcgacaaaguuccuagaaucaaucaagggcaaauucacgagcccgaaagaccccaagaaaaaggacucaaucauaagcgugaacucgaucgacaucgaggucacgaaagagagcccgaucacaagcaacagcaccauaauaaacccgaccaacgaaacagacgacaccgcgggcaacaaaccgaacuaccaaagaaaaccgcucgugagcuucaaagaagacccgaccccaagcgacaacccguucucaaaacuauacaaggaaacgaucgagaccuucgacaacaacgaggaagagagcucguacucguacgaggaaauaaacgaccaaacaaacgacaacauaaccgcacgccuagacaggaucgacgaaaaacucucggaaauacucgggaugcuacacacgcucguggucgcgagcgcaggcccgaccucggccagggacggcaucagggacgcaaugauaggccugcgagaggaaaugaucgagaaaauacgcaccgaagcacucaugaccaacgacagacucgaagccauggccaggcucaggaacgaagaauccgaaaagauggcgaaagacaccucggacgaggucucgcucaaccccacgagcgagaaacugaacaaccuacuggaagggaacgacagcgacaacgaccuuucccucgaggacuucugaggacuaguaauaaggaaacuguaugaaugucugugggcaggaagugaagagauccuucuguaaagguuuuuggaauuaugucugcugaauaauaaacuuuuuugaaauaauaaaucugguagaaaaaugagaucuaaaaaaaaaaaaaaaaaaaaaaaaaaaaaaaaaaaaaaaaaaaaaaaaaaaaaaaaaaaaaaaaugcaucccccccccccccccccccccccccccccccaaaggcucuuuucagagccaccagaauu

SEQ ID NO: 10966 - RNA, 1179 nt, Artificial Sequence
  mRNA product Design h-5 comprising derived and/or modified sequence from HRSV(A2)__P03421.1__P (wt)
gggagagggcgcuuggcuugcaaggacccugagcugcggcauugaagcacacccaacccaacucgacugaagucagccucacugaaccggaucugagaaucuucucucucugggcuugccagggcucuccgaaccuagcuagcauccucuucaauuccaacuagaaagcuuaccauggaaaaguuugcuccugaauuccauggagaagaugcaaacaacagggcuacuaaauuccuagaaucaauaaagggcaaauucacaucacccaaagaucccaagaaaaaagauaguaucauaucugucaacucaauagauauagaaguaaccaaagaaagcccuauaacaucaaauucaacuauuaucaacccaacaaaugagacagaugauacugcagggaacaagcccaauuaucaaagaaaaccucuaguaaguuucaaagaagacccuacaccaagugauaaucccuuuucuaaacuauacaaagaaaccauagaaacauuugauaacaaugaagaagaauccagcuauucauacgaagaaauaaaugaucagacaaacgauaauauaacagcaagauuagauaggauugaugaaaaauuaagugaaauacuaggaaugcuucacacauuaguaguggcaagugcaggaccuacaucugcucgggaugguauaagagaugccaugauugguuuaagagaagaaaugauagaaaaaaucagaacugaagcauuaaugaccaaugacagauuagaagcuauggcaagacucaggaaugaggaaagugaaaagauggcaaaagacacaucagaugaagugucucucaauccaacaucagagaaauugaacaaccuauuggaagggaaugauagugacaaugaucuaucacuugaagauuucugaggacuaguacuggcugcaucucccuuuccucuguccuccauccuucucccaggauggugaagggggaccugguacccagugauccccaccccaggauccuaaaucaugacuuaccugcuaauaaaaacucauuggaaaagugagaagaucuaaaaaaaaaaaaaaaaaaaaaaaaaaaaaaaaaaaaaaaaaaaaaaaaaaaaaaaaaaaaaaaaugcaucccccccccccccccccccccccccccccccaaaggcucuuuucagagccaccagaauu

SEQ ID NO: 10967 - RNA, 1179 nt, Artificial Sequence
  mRNA product Design h-5 comprising derived and/or modified sequence from HRSV(A2)__P03421.1__P (opt1)
gggagagggcgcuuggcuugcaaggacccugagcugcggcauugaagcacacccaacccaacucgacugaagucagccucacugaaccggaucugagaaucuucucucucugggcuugccagggcucuccgaaccuagcuagcauccucuucaauuccaacuagaaagcuuaccauggagaaguucgcccccgaguuccacggcgaggacgccaacaaccgcgcgaccaaguuccuggagagcaucaaggggaaguucaccuccccgaaggaccccaagaagaaggacagcaucaucuccgugaacagcaucgacaucgaggucacgaaggagucccccaucaccagcaacuccaccaucaucaaccccaccaacgagacggacgacaccgccggcaacaagccgaacuaccagcggaagccccucgugagcuucaaggaggaccccacccccuccgacaacccguucagcaagcuguacaaggagaccaucgagacguucgacaacaacgaggaggaguccagcuacuccuacgaggagaucaacgaccagaccaacgacaacaucaccgcccgccuggaccggaucgacgagaagcucagcgagauccuggggaugcugcacacccucguggucgccuccgccggccccacgagcgcgcgcgacgggauccgggacgccaugaucggccugcgcgaggagaugaucgagaagauccggaccgaggcccugaugaccaacgaccgccucgaggccauggcgcggcugcgcaacgaggaguccgagaagauggccaaggacaccagcgacgaggugucccugaaccccacgagcgagaagcucaacaaccugcuggagggcaacgacagcgacaacgaccucucccuggaggacuucugaggacuaguacuggcugcaucucccuuuccucuguccuccauccuucucccaggauggugaagggggaccugguacccagugauccccaccccaggauccuaaaucaugacuuaccugcuaauaaaaacucauuggaaaagugagaagaucuaaaaaaaaaaaaaaaaaaaaaaaaaaaaaaaaaaaaaaaaaaaaaaaaaaaaaaaaaaaaaaaaugcaucccccccccccccccccccccccccccccccaaaggcucuuuucagagccaccagaauu

SEQ ID NO: 10968 - RNA, 1179 nt, Artificial Sequence
  mRNA product Design h-5 comprising derived and/or modified sequence from HRSV(A2)__P03421.1__P (opt2)
gggagagggcgcuuggcuugcaaggacccugagcugcggcauugaagcacacccaacccaacucgacugaagucagccucacugaaccggaucugagaaucuucucucucugggcuugccagggcucuccgaaccuagcuagcauccucuucaauuccaacuagaaagcuuaccauggagaaguucgcccccgaguuccacggcgaggacgccaacaaccgcgccaccaaguuccucgaguccaucaagggcaaguucaccucccccaaggaccccaagaagaaggacuccaucaucuccgucaacuccaucgacaucgaggucaccaaggagucccccaucaccuccaacuccaccaucaucaaccccaccaacgagaccgacgacaccgccggcaacaagcccaacuaccagcgcaagccccucgucuccuucaaggaggaccccacccccuccgacaaccccuucuccaagcucuacaaggagaccaucgagaccuucgacaacaacgaggaggaguccuccuacuccuacgaggagaucaacgaccagaccaacgacaacaucaccgcccgccucgaccgcaucgacgagaagcucuccgagauccucggcaugcuccacacccucgucgucgccuccgccggccccaccuccgcccgcgacggcauccgcgacgccaugaucggccuccgcgaggagaugaucgagaagauccgcaccgaggcccucaugaccaacgaccgccucgaggccauggcccgccuccgcaacgaggaguccgagaagauggccaaggacaccuccgacgaggucucccucaaccccaccuccgagaagcucaacaaccuccucgagggcaacgacuccgacaacgaccucucccucgaggacuucugaggacuaguacuggcugcaucucccuuuccucuguccuccauccuucucccaggauggugaagggggaccugguacccagugauccccaccccaggauccuaaaucaugacuuaccugcuaauaaaaacucauuggaaaagugagaagaucuaaaaaaaaaaaaaaaaaaaaaaaaaaaaaaaaaaaaaaaaaaaaaaaaaaaaaaaaaaaaaaaaugcaucccccccccccccccccccccccccccccccaaaggcucuuuucagagccaccagaauu

SEQ ID NO: 10969 - RNA, 1179 nt, Artificial Sequence
  mRNA product Design h-5 comprising derived and/or modified sequence from HRSV(A2)__P03421.1__P (opt3)
gggagagggcgcuuggcuugcaaggacccugagcugcggcauugaagcacacccaacccaacucgacugaagucagccucacugaaccggaucugagaaucuucucucucugggcuugccagggcucuccgaaccuagcuagcauccucuucaauuccaacuagaaagcuuaccauggagaaguucgcccccgaauuucacggcgaggacgcuaacaauagagcaaccaaauuccuggaaagcaucaaggggaaauuuacauccccuaaggauccgaaaaagaaggacucuauuauaucagugaacaguaucgauauugaggucacuaaagaaagcccaaucacguccaauucuaccauuaucaaccccacaaaugagacugacgauaccgccggaaacaagccuaauuaccagaggaaaccacucguuucguucaaggaggaccccacaccuucagauaacccauuuagcaaacuuuauaaggaaaccauagagacuuucgacaauaacgaagaggagaguuccuacucuuaugaagagaucaaugaucaaacaaacgacaauauuaccgcgcggcuggaucgcaucgacgaaaaguugagcgagauuuuagguaugcugcauacgcuagugguagcuuccgccggccccacuucagcacgagaugggauccgugacgccaugauaggacucagagaagagaugauugagaaaaucaggaccgaagcucugaugacaaacgaccggcuugaggcaauggcccgccugagaaaugaagagagugaaaagauggcuaaagauacuagcgacgaggugucuuugaacccuaccuccgagaagcucaacaaucugcuggaaggcaacgauucagacaaugaucucagcuuagaggacuuuugaggacuaguacuggcugcaucucccuuuccucuguccuccauccuucucccaggauggugaagggggaccugguacccagugauccccaccccaggauccuaaaucaugacuuaccugcuaauaaaaacucauuggaaaagugagaagaucuaaaaaaaaaaaaaaaaaaaaaaaaaaaaaaaaaaaaaaaaaaaaaaaaaaaaaaaaaaaaaaaaugcaucccccccccccccccccccccccccccccccaaaggcucuuuucagagccaccagaauu

SEQ ID NO: 10970 - RNA, 1179 nt, Artificial Sequence
  mRNA product Design h-5 comprising derived and/or modified sequence from HRSV(A2)__P03421.1__P (opt4)
gggagagggcgcuuggcuugcaaggacccugagcugcggcauugaagcacacccaacccaacucgacugaagucagccucacugaaccggaucugagaaucuucucucucugggcuugccagggcucuccgaaccuagcuagcauccucuucaauuccaacuagaaagcuuaccauggagaaguucgcccccgaguuccacggcgaggacgccaacaacagagccaccaaguuccuggagagcaucaagggcaaguucaccagccccaaggaccccaagaagaaggacagcaucaucagcgugaacagcaucgacaucgaggugaccaaggagagccccaucaccagcaacagcaccaucaucaaccccaccaacgagaccgacgacaccgccggcaacaagcccaacuaccagagaaagccccuggugagcuucaaggaggaccccacccccagcgacaaccccuucagcaagcuguacaaggagaccaucgagaccuucgacaacaacgaggaggagagcagcuacagcuacgaggagaucaacgaccagaccaacgacaacaucaccgccagacuggacagaaucgacgagaagcugagcgagauccugggcaugcugcacacccuggugguggccagcgccggccccaccagcgccagagacggcaucagagacgccaugaucggccugagagaggagaugaucgagaagaucagaaccgaggcccugaugaccaacgacagacuggaggccauggccagacugagaaacgaggagagcgagaagauggccaaggacaccagcgacgaggugagccugaaccccaccagcgagaagcugaacaaccugcuggagggcaacgacagcgacaacgaccugagccuggaggacuucugaggacuaguacuggcugcaucucccuuuccucuguccuccauccuucucccaggauggugaagggggaccugguacccagugauccccaccccaggauccuaaaucaugacuuaccugcuaauaaaaacucauuggaaaagugagaagaucuaaaaaaaaaaaaaaaaaaaaaaaaaaaaaaaaaaaaaaaaaaaaaaaaaaaaaaaaaaaaaaaaugcaucccccccccccccccccccccccccccccccaaaggcucuuuucagagccaccagaauu

SEQ ID NO: 10971 - RNA, 1179 nt, Artificial Sequence
  mRNA product Design h-5 comprising derived and/or modified sequence from HRSV(A2)__P03421.1__P (opt5)
gggagagggcgcuuggcuugcaaggacccugagcugcggcauugaagcacacccaacccaacucgacugaagucagccucacugaaccggaucugagaaucuucucucucugggcuugccagggcucuccgaaccuagcuagcauccucuucaauuccaacuagaaagcuuaccauggagaaguucgcccccgaauuucacggcgaggacgcuaacaauagagccaccaaauuccuggaaagcaucaaggggaaauuuacauccccuaaggauccgaaaaagaaggacucuauuaucagcgugaacuccauugauaucgaggucacgaaagaaucucccauuaccagcaauuccacaaucaucaacccuaccaaugagacagacgauaccgcgggaaacaagcccaauuaccagcggaaaccucucguuucuuucaaggaggaccccacaccuagcgauaacccguuuuccaaacuguauaaggaaaccauugagacguucgacaauaacgaagaggagagcucuuacuccuaugaagagaucaaugaucaaaccaacgacaauauuacagcucgccuugauagaaucgacgaaaagcugagcgagauucucggcaugcugcauacccuugugguggccucugccgggcccacauccgcucgggauggaauccgcgacgccaugauuggccugagagaagagaugaucgagaaaauccggaccgaagcucucaugacgaacgaccgccuggaggccauggcgagacugcggaaugaagagagcgaaaagauggccaaagauacaucugacgaggucucccucaacccuaccagcgagaagcugaacaaucuucuggaagggaacgauuccgacaaugaucucucucuggaggacuuuugaggacuaguacuggcugcaucucccuuuccucuguccuccauccuucucccaggauggugaagggggaccugguacccagugauccccaccccaggauccuaaaucaugacuuaccugcuaauaaaaacucauuggaaaagugagaagaucuaaaaaaaaaaaaaaaaaaaaaaaaaaaaaaaaaaaaaaaaaaaaaaaaaaaaaaaaaaaaaaaaugcaucccccccccccccccccccccccccccccccaaaggcucuuuucagagccaccagaauu

SEQ ID NO: 10972 - RNA, 1179 nt, Artificial Sequence
  mRNA product Design h-5 comprising derived and/or modified sequence from HRSV(A2)__P03421.1__P (opt6)
gggagagggcgcuuggcuugcaaggacccugagcugcggcauugaagcacacccaacccaacucgacugaagucagccucacugaaccggaucugagaaucuucucucucugggcuugccagggcucuccgaaccuagcuagcauccucuucaauuccaacuagaaagcuuaccauggaaaaauucgcaccagaauuucacggagaagacgcaaacaacagagcaacaaaauucuuagaaucaaucaaaggaaaauucacaagcccaaaagacccaaaaaaaaaagacucaauaauaagcguaaacucaauagacauagaaguaacaaaagaaagcccaauaacaagcaacagcacaauaauaaacccaacaaacgaaacagaugacacagcuggaaauaaaccaaacuaccaaagaaaaccccuagucagcuucaaagaagaccccacaccaucagacaacccauucagcaaacuauauaaagaaacaauagaaacauuugacaacaacgaagaagaaucaucauacucauacgaagaaauaaacgaccaaacaaacgacaacauaaccgcaagauuagacagaauagaugaaaaacuaucagaaauacuaggaaugcuacacacauuaguaguagcaagcgcaggaccaacaucagcaagagacggaauaagagacgcaaugauaggacucagagaagaaaugauagaaaaaauaagaacagaagcacuaaugacaaacgacagauuagaagcaauggcaagacuaagaaaugaagaaucggaaaaaauggcaaaagacacaucagacgaaguaagccuaaacccaacaucagaaaaauuaaauaaccuacuagaaggaaacgacagcgacaacgacuuaucacuagaagacuucuaaggacuaguacuggcugcaucucccuuuccucuguccuccauccuucucccaggauggugaagggggaccugguacccagugauccccaccccaggauccuaaaucaugacuuaccugcuaauaaaaacucauuggaaaagugagaagaucuaaaaaaaaaaaaaaaaaaaaaaaaaaaaaaaaaaaaaaaaaaaaaaaaaaaaaaaaaaaaaaaaugcaucccccccccccccccccccccccccccccccaaaggcucuuuucagagccaccagaauu

SEQ ID NO: 10973 - RNA, 1179 nt, Artificial Sequence
  mRNA product Design h-5 comprising derived and/or modified sequence from HRSV(A2)__P03421.1__P (opt11)
gggagagggcgcuuggcuugcaaggacccugagcugcggcauugaagcacacccaacccaacucgacugaagucagccucacugaaccggaucugagaaucuucucucucugggcuugccagggcucuccgaaccuagcuagcauccucuucaauuccaacuagaaagcuuaccauggaaaaauucgcgcccgaguuccacggcgaggacgcgaacaaccgcgcgacaaaguuccuagaaucaaucaagggcaaauucacgagcccgaaagaccccaagaaaaaggacucaaucauaagcgugaacucgaucgacaucgaggucacgaaagagagcccgaucacaagcaacagcaccauaauaaacccgaccaacgaaacagacgacaccgcgggcaacaaaccgaacuaccaaagaaaaccgcucgugagcuucaaagaagacccgaccccaagcgacaacccguucucaaaacuauacaaggaaacgaucgagaccuucgacaacaacgaggaagagagcucguacucguacgaggaaauaaacgaccaaacaaacgacaacauaaccgcacgccuagacaggaucgacgaaaaacucucggaaauacucgggaugcuacacacgcucguggucgcgagcgcaggcccgaccucggccagggacggcaucagggacgcaaugauaggccugcgagaggaaaugaucgagaaaauacgcaccgaagcacucaugaccaacgacagacucgaagccauggccaggcucaggaacgaagaauccgaaaagauggcgaaagacaccucggacgaggucucgcucaaccccacgagcgagaaacugaacaaccuacuggaagggaacgacagcgacaacgaccuuucccucgaggacuucugaggacuaguacuggcugcaucucccuuuccucuguccuccauccuucucccaggauggugaagggggaccugguacccagugauccccaccccaggauccuaaaucaugacuuaccugcuaauaaaaacucauuggaaaagugagaagaucuaaaaaaaaaaaaaaaaaaaaaaaaaaaaaaaaaaaaaaaaaaaaaaaaaaaaaaaaaaaaaaaaugcaucccccccccccccccccccccccccccccccaaaggcucuuuucagagccaccagaauu

SEQ ID NO: 10974 - RNA, 1112 nt, Artificial Sequence
  mRNA product Design i-1 comprising derived and/or modified sequence from HRSV(A2)__P03421.1__P (wt)
gggagagggcgcuuggcuugcaaggacccugagcugcggcauugaagcacacccaacccaacucgacugaagucagccucacugaaccggaucugagaaucuucucucucugggcuugccagggcucuccgaaccuagcuagcauccucuucaauuccaacuagaaagcuuaccauggaaaaguuugcuccugaauuccauggagaagaugcaaacaacagggcuacuaaauuccuagaaucaauaaagggcaaauucacaucacccaaagaucccaagaaaaaagauaguaucauaucugucaacucaauagauauagaaguaaccaaagaaagcccuauaacaucaaauucaacuauuaucaacccaacaaaugagacagaugauacugcagggaacaagcccaauuaucaaagaaaaccucuaguaaguuucaaagaagacccuacaccaagugauaaucccuuuucuaaacuauacaaagaaaccauagaaacauuugauaacaaugaagaagaauccagcuauucauacgaagaaauaaaugaucagacaaacgauaauauaacagcaagauuagauaggauugaugaaaaauuaagugaaauacuaggaaugcuucacacauuaguaguggcaagugcaggaccuacaucugcucgggaugguauaagagaugccaugauugguuuaagagaagaaaugauagaaaaaaucagaacugaagcauuaaugaccaaugacagauuagaagcuauggcaagacucaggaaugaggaaagugaaaagauggcaaaagacacaucagaugaagugucucucaauccaacaucagagaaauugaacaaccuauuggaagggaaugauagugacaaugaucuaucacuugaagauuucugaggacuaguguccaccugucccuccugggcugcuggauugucucguuuuccugccaaauaaacaggaucagcgcuuuacagaucuaaaaaaaaaaaaaaaaaaaaaaaaaaaaaaaaaaaaaaaaaaaaaaaaaaaaaaaaaaaaaaaaugcaucccccccccccccccccccccccccccccccaaaggcucuuuucagagccaccagaauu

SEQ ID NO: 10975 - RNA, 1112 nt, Artificial Sequence
  mRNA product Design i-1 comprising derived and/or modified sequence from HRSV(A2)__P03421.1__P (opt1)
gggagagggcgcuuggcuugcaaggacccugagcugcggcauugaagcacacccaacccaacucgacugaagucagccucacugaaccggaucugagaaucuucucucucugggcuugccagggcucuccgaaccuagcuagcauccucuucaauuccaacuagaaagcuuaccauggagaaguucgcccccgaguuccacggcgaggacgccaacaaccgcgcgaccaaguuccuggagagcaucaaggggaaguucaccuccccgaaggaccccaagaagaaggacagcaucaucuccgugaacagcaucgacaucgaggucacgaaggagucccccaucaccagcaacuccaccaucaucaaccccaccaacgagacggacgacaccgccggcaacaagccgaacuaccagcggaagccccucgugagcuucaaggaggaccccacccccuccgacaacccguucagcaagcuguacaaggagaccaucgagacguucgacaacaacgaggaggaguccagcuacuccuacgaggagaucaacgaccagaccaacgacaacaucaccgcccgccuggaccggaucgacgagaagcucagcgagauccuggggaugcugcacacccucguggucgccuccgccggccccacgagcgcgcgcgacgggauccgggacgccaugaucggccugcgcgaggagaugaucgagaagauccggaccgaggcccugaugaccaacgaccgccucgaggccauggcgcggcugcgcaacgaggaguccgagaagauggccaaggacaccagcgacgaggugucccugaaccccacgagcgagaagcucaacaaccugcuggagggcaacgacagcgacaacgaccucucccuggaggacuucugaggacuaguguccaccugucccuccugggcugcuggauugucucguuuuccugccaaauaaacaggaucagcgcuuuacagaucuaaaaaaaaaaaaaaaaaaaaaaaaaaaaaaaaaaaaaaaaaaaaaaaaaaaaaaaaaaaaaaaaugcaucccccccccccccccccccccccccccccccaaaggcucuuuucagagccaccagaauu

SEQ ID NO: 10976 - RNA, 1112 nt, Artificial Sequence
  mRNA product Design i-1 comprising derived and/or modified sequence from HRSV(A2)__P03421.1__P (opt2)
gggagagggcgcuuggcuugcaaggacccugagcugcggcauugaagcacacccaacccaacucgacugaagucagccucacugaaccggaucugagaaucuucucucucugggcuugccagggcucuccgaaccuagcuagcauccucuucaauuccaacuagaaagcuuaccauggagaaguucgcccccgaguuccacggcgaggacgccaacaaccgcgccaccaaguuccucgaguccaucaagggcaaguucaccucccccaaggaccccaagaagaaggacuccaucaucuccgucaacuccaucgacaucgaggucaccaaggagucccccaucaccuccaacuccaccaucaucaaccccaccaacgagaccgacgacaccgccggcaacaagcccaacuaccagcgcaagccccucgucuccuucaaggaggaccccacccccuccgacaaccccuucuccaagcucuacaaggagaccaucgagaccuucgacaacaacgaggaggaguccuccuacuccuacgaggagaucaacgaccagaccaacgacaacaucaccgcccgccucgaccgcaucgacgagaagcucuccgagauccucggcaugcuccacacccucgucgucgccuccgccggccccaccuccgcccgcgacggcauccgcgacgccaugaucggccuccgcgaggagaugaucgagaagauccgcaccgaggcccucaugaccaacgaccgccucgaggccauggcccgccuccgcaacgaggaguccgagaagauggccaaggacaccuccgacgaggucucccucaaccccaccuccgagaagcucaacaaccuccucgagggcaacgacuccgacaacgaccucucccucgaggacuucugaggacuaguguccaccugucccuccugggcugcuggauugucucguuuuccugccaaauaaacaggaucagcgcuuuacagaucuaaaaaaaaaaaaaaaaaaaaaaaaaaaaaaaaaaaaaaaaaaaaaaaaaaaaaaaaaaaaaaaaugcaucccccccccccccccccccccccccccccccaaaggcucuuuucagagccaccagaauu

SEQ ID NO: 10977 - RNA, 1112 nt, Artificial Sequence
  mRNA product Design i-1 comprising derived and/or modified sequence from HRSV(A2)__P03421.1__P (opt3)
gggagagggcgcuuggcuugcaaggacccugagcugcggcauugaagcacacccaacccaacucgacugaagucagccucacugaaccggaucugagaaucuucucucucugggcuugccagggcucuccgaaccuagcuagcauccucuucaauuccaacuagaaagcuuaccauggagaaguucgcccccgaauuucacggcgaggacgcuaacaauagagcaaccaaauuccuggaaagcaucaaggggaaauuuacauccccuaaggauccgaaaaagaaggacucuauuauaucagugaacaguaucgauauugaggucacuaaagaaagcccaaucacguccaauucuaccauuaucaaccccacaaaugagacugacgauaccgccggaaacaagccuaauuaccagaggaaaccacucguuucguucaaggaggaccccacaccuucagauaacccauuuagcaaacuuuauaaggaaaccauagagacuuucgacaauaacgaagaggagaguuccuacucuuaugaagagaucaaugaucaaacaaacgacaauauuaccgcgcggcuggaucgcaucgacgaaaaguugagcgagauuuuagguaugcugcauacgcuagugguagcuuccgccggccccacuucagcacgagaugggauccgugacgccaugauaggacucagagaagagaugauugagaaaaucaggaccgaagcucugaugacaaacgaccggcuugaggcaauggcccgccugagaaaugaagagagugaaaagauggcuaaagauacuagcgacgaggugucuuugaacccuaccuccgagaagcucaacaaucugcuggaaggcaacgauucagacaaugaucucagcuuagaggacuuuugaggacuaguguccaccugucccuccugggcugcuggauugucucguuuuccugccaaauaaacaggaucagcgcuuuacagaucuaaaaaaaaaaaaaaaaaaaaaaaaaaaaaaaaaaaaaaaaaaaaaaaaaaaaaaaaaaaaaaaaugcaucccccccccccccccccccccccccccccccaaaggcucuuuucagagccaccagaauu

SEQ ID NO: 10978 - RNA, 1112 nt, Artificial Sequence
  mRNA product Design i-1 comprising derived and/or modified sequence from HRSV(A2)__P03421.1__P (opt4)
gggagagggcgcuuggcuugcaaggacccugagcugcggcauugaagcacacccaacccaacucgacugaagucagccucacugaaccggaucugagaaucuucucucucugggcuugccagggcucuccgaaccuagcuagcauccucuucaauuccaacuagaaagcuuaccauggagaaguucgcccccgaguuccacggcgaggacgccaacaacagagccaccaaguuccuggagagcaucaagggcaaguucaccagccccaaggaccccaagaagaaggacagcaucaucagcgugaacagcaucgacaucgaggugaccaaggagagccccaucaccagcaacagcaccaucaucaaccccaccaacgagaccgacgacaccgccggcaacaagcccaacuaccagagaaagccccuggugagcuucaaggaggaccccacccccagcgacaaccccuucagcaagcuguacaaggagaccaucgagaccuucgacaacaacgaggaggagagcagcuacagcuacgaggagaucaacgaccagaccaacgacaacaucaccgccagacuggacagaaucgacgagaagcugagcgagauccugggcaugcugcacacccuggugguggccagcgccggccccaccagcgccagagacggcaucagagacgccaugaucggccugagagaggagaugaucgagaagaucagaaccgaggcccugaugaccaacgacagacuggaggccauggccagacugagaaacgaggagagcgagaagauggccaaggacaccagcgacgaggugagccugaaccccaccagcgagaagcugaacaaccugcuggagggcaacgacagcgacaacgaccugagccuggaggacuucugaggacuaguguccaccugucccuccugggcugcuggauugucucguuuuccugccaaauaaacaggaucagcgcuuuacagaucuaaaaaaaaaaaaaaaaaaaaaaaaaaaaaaaaaaaaaaaaaaaaaaaaaaaaaaaaaaaaaaaaugcaucccccccccccccccccccccccccccccccaaaggcucuuuucagagccaccagaauu

SEQ ID NO: 10979 - RNA, 1112 nt, Artificial Sequence
  mRNA product Design i-1 comprising derived and/or modified sequence from HRSV(A2)__P03421.1__P (opt5)
gggagagggcgcuuggcuugcaaggacccugagcugcggcauugaagcacacccaacccaacucgacugaagucagccucacugaaccggaucugagaaucuucucucucugggcuugccagggcucuccgaaccuagcuagcauccucuucaauuccaacuagaaagcuuaccauggagaaguucgcccccgaauuucacggcgaggacgcuaacaauagagccaccaaauuccuggaaagcaucaaggggaaauuuacauccccuaaggauccgaaaaagaaggacucuauuaucagcgugaacuccauugauaucgaggucacgaaagaaucucccauuaccagcaauuccacaaucaucaacccuaccaaugagacagacgauaccgcgggaaacaagcccaauuaccagcggaaaccucucguuucuuucaaggaggaccccacaccuagcgauaacccguuuuccaaacuguauaaggaaaccauugagacguucgacaauaacgaagaggagagcucuuacuccuaugaagagaucaaugaucaaaccaacgacaauauuacagcucgccuugauagaaucgacgaaaagcugagcgagauucucggcaugcugcauacccuugugguggccucugccgggcccacauccgcucgggauggaauccgcgacgccaugauuggccugagagaagagaugaucgagaaaauccggaccgaagcucucaugacgaacgaccgccuggaggccauggcgagacugcggaaugaagagagcgaaaagauggccaaagauacaucugacgaggucucccucaacccuaccagcgagaagcugaacaaucuucuggaagggaacgauuccgacaaugaucucucucuggaggacuuuugaggacuaguguccaccugucccuccugggcugcuggauugucucguuuuccugccaaauaaacaggaucagcgcuuuacagaucuaaaaaaaaaaaaaaaaaaaaaaaaaaaaaaaaaaaaaaaaaaaaaaaaaaaaaaaaaaaaaaaaugcaucccccccccccccccccccccccccccccccaaaggcucuuuucagagccaccagaauu

SEQ ID NO: 10980 - RNA, 1112 nt, Artificial Sequence
  mRNA product Design i-1 comprising derived and/or modified sequence from HRSV(A2)__P03421.1__P (opt6)
gggagagggcgcuuggcuugcaaggacccugagcugcggcauugaagcacacccaacccaacucgacugaagucagccucacugaaccggaucugagaaucuucucucucugggcuugccagggcucuccgaaccuagcuagcauccucuucaauuccaacuagaaagcuuaccauggaaaaauucgcaccagaauuucacggagaagacgcaaacaacagagcaacaaaauucuuagaaucaaucaaaggaaaauucacaagcccaaaagacccaaaaaaaaaagacucaauaauaagcguaaacucaauagacauagaaguaacaaaagaaagcccaauaacaagcaacagcacaauaauaaacccaacaaacgaaacagaugacacagcuggaaauaaaccaaacuaccaaagaaaaccccuagucagcuucaaagaagaccccacaccaucagacaacccauucagcaaacuauauaaagaaacaauagaaacauuugacaacaacgaagaagaaucaucauacucauacgaagaaauaaacgaccaaacaaacgacaacauaaccgcaagauuagacagaauagaugaaaaacuaucagaaauacuaggaaugcuacacacauuaguaguagcaagcgcaggaccaacaucagcaagagacggaauaagagacgcaaugauaggacucagagaagaaaugauagaaaaaauaagaacagaagcacuaaugacaaacgacagauuagaagcaauggcaagacuaagaaaugaagaaucggaaaaaauggcaaaagacacaucagacgaaguaagccuaaacccaacaucagaaaaauuaaauaaccuacuagaaggaaacgacagcgacaacgacuuaucacuagaagacuucuaaggacuaguguccaccugucccuccugggcugcuggauugucucguuuuccugccaaauaaacaggaucagcgcuuuacagaucuaaaaaaaaaaaaaaaaaaaaaaaaaaaaaaaaaaaaaaaaaaaaaaaaaaaaaaaaaaaaaaaaugcaucccccccccccccccccccccccccccccccaaaggcucuuuucagagccaccagaauu

SEQ ID NO: 10981 - RNA, 1112 nt, Artificial Sequence
  mRNA product Design i-1 comprising derived and/or modified sequence from HRSV(A2)__P03421.1__P (opt11)
gggagagggcgcuuggcuugcaaggacccugagcugcggcauugaagcacacccaacccaacucgacugaagucagccucacugaaccggaucugagaaucuucucucucugggcuugccagggcucuccgaaccuagcuagcauccucuucaauuccaacuagaaagcuuaccauggaaaaauucgcgcccgaguuccacggcgaggacgcgaacaaccgcgcgacaaaguuccuagaaucaaucaagggcaaauucacgagcccgaaagaccccaagaaaaaggacucaaucauaagcgugaacucgaucgacaucgaggucacgaaagagagcccgaucacaagcaacagcaccauaauaaacccgaccaacgaaacagacgacaccgcgggcaacaaaccgaacuaccaaagaaaaccgcucgugagcuucaaagaagacccgaccccaagcgacaacccguucucaaaacuauacaaggaaacgaucgagaccuucgacaacaacgaggaagagagcucguacucguacgaggaaauaaacgaccaaacaaacgacaacauaaccgcacgccuagacaggaucgacgaaaaacucucggaaauacucgggaugcuacacacgcucguggucgcgagcgcaggcccgaccucggccagggacggcaucagggacgcaaugauaggccugcgagaggaaaugaucgagaaaauacgcaccgaagcacucaugaccaacgacagacucgaagccauggccaggcucaggaacgaagaauccgaaaagauggcgaaagacaccucggacgaggucucgcucaaccccacgagcgagaaacugaacaaccuacuggaagggaacgacagcgacaacgaccuuucccucgaggacuucugaggacuaguguccaccugucccuccugggcugcuggauugucucguuuuccugccaaauaaacaggaucagcgcuuuacagaucuaaaaaaaaaaaaaaaaaaaaaaaaaaaaaaaaaaaaaaaaaaaaaaaaaaaaaaaaaaaaaaaaugcaucccccccccccccccccccccccccccccccaaaggcucuuuucagagccaccagaauu

SEQ ID NO: 10982 - RNA, 1112 nt, Artificial Sequence
  mRNA product Design i-2 comprising derived and/or modified sequence from HRSV(A2)__P03421.1__P (wt)
gggagaggcgcugccuacggagguggcagccaucuccuucucggcaucaagcuuaccauggaaaaguuugcuccugaauuccauggagaagaugcaaacaacagggcuacuaaauuccuagaaucaauaaagggcaaauucacaucacccaaagaucccaagaaaaaagauaguaucauaucugucaacucaauagauauagaaguaaccaaagaaagcccuauaacaucaaauucaacuauuaucaacccaacaaaugagacagaugauacugcagggaacaagcccaauuaucaaagaaaaccucuaguaaguuucaaagaagacccuacaccaagugauaaucccuuuucuaaacuauacaaagaaaccauagaaacauuugauaacaaugaagaagaauccagcuauucauacgaagaaauaaaugaucagacaaacgauaauauaacagcaagauuagauaggauugaugaaaaauuaagugaaauacuaggaaugcuucacacauuaguaguggcaagugcaggaccuacaucugcucgggaugguauaagagaugccaugauugguuuaagagaagaaaugauagaaaaaaucagaacugaagcauuaaugaccaaugacagauuagaagcuauggcaagacucaggaaugaggaaagugaaaagauggcaaaagacacaucagaugaagugucucucaauccaacaucagagaaauugaacaaccuauuggaagggaaugauagugacaaugaucuaucacuugaagauuucugaggacuagugcaucacauuuaaaagcaucucagccuaccaugagaauaagagaaagaaaaugaagaucaauagcuuauucaucucuuuuucuuuuucguugguguaaagccaacacccugucuaaaaaacauaaauuucuuuaaucauuuugccucuuuucucugugcuucaauuaauaaaaaauggaaagaaccuagaucuaaaaaaaaaaaaaaaaaaaaaaaaaaaaaaaaaaaaaaaaaaaaaaaaaaaaaaaaaaaaaaaaugcaucccccccccccccccccccccccccccccccaaaggcucuuuucagagccaccagaauu

SEQ ID NO: 10983 - RNA, 1112 nt, Artificial Sequence
  mRNA product Design i-2 comprising derived and/or modified sequence from HRSV(A2)__P03421.1__P (opt1)
gggagaggcgcugccuacggagguggcagccaucuccuucucggcaucaagcuuaccauggagaaguucgcccccgaguuccacggcgaggacgccaacaaccgcgcgaccaaguuccuggagagcaucaaggggaaguucaccuccccgaaggaccccaagaagaaggacagcaucaucuccgugaacagcaucgacaucgaggucacgaaggagucccccaucaccagcaacuccaccaucaucaaccccaccaacgagacggacgacaccgccggcaacaagccgaacuaccagcggaagccccucgugagcuucaaggaggaccccacccccuccgacaacccguucagcaagcuguacaaggagaccaucgagacguucgacaacaacgaggaggaguccagcuacuccuacgaggagaucaacgaccagaccaacgacaacaucaccgcccgccuggaccggaucgacgagaagcucagcgagauccuggggaugcugcacacccucguggucgccuccgccggccccacgagcgcgcgcgacgggauccgggacgccaugaucggccugcgcgaggagaugaucgagaagauccggaccgaggcccugaugaccaacgaccgccucgaggccauggcgcggcugcgcaacgaggaguccgagaagauggccaaggacaccagcgacgaggugucccugaaccccacgagcgagaagcucaacaaccugcuggagggcaacgacagcgacaacgaccucucccuggaggacuucugaggacuagugcaucacauuuaaaagcaucucagccuaccaugagaauaagagaaagaaaaugaagaucaauagcuuauucaucucuuuuucuuuuucguugguguaaagccaacacccugucuaaaaaacauaaauuucuuuaaucauuuugccucuuuucucugugcuucaauuaauaaaaaauggaaagaaccuagaucuaaaaaaaaaaaaaaaaaaaaaaaaaaaaaaaaaaaaaaaaaaaaaaaaaaaaaaaaaaaaaaaaugcaucccccccccccccccccccccccccccccccaaaggcucuuuucagagccaccagaauu

SEQ ID NO: 10984 - RNA, 1112 nt, Artificial Sequence
  mRNA product Design i-2 comprising derived and/or modified sequence from HRSV(A2)__P03421.1__P (opt2)
gggagaggcgcugccuacggagguggcagccaucuccuucucggcaucaagcuuaccauggagaaguucgcccccgaguuccacggcgaggacgccaacaaccgcgccaccaaguuccucgaguccaucaagggcaaguucaccucccccaaggaccccaagaagaaggacuccaucaucuccgucaacuccaucgacaucgaggucaccaaggagucccccaucaccuccaacuccaccaucaucaaccccaccaacgagaccgacgacaccgccggcaacaagcccaacuaccagcgcaagccccucgucuccuucaaggaggaccccacccccuccgacaaccccuucuccaagcucuacaaggagaccaucgagaccuucgacaacaacgaggaggaguccuccuacuccuacgaggagaucaacgaccagaccaacgacaacaucaccgcccgccucgaccgcaucgacgagaagcucuccgagauccucggcaugcuccacacccucgucgucgccuccgccggccccaccuccgcccgcgacggcauccgcgacgccaugaucggccuccgcgaggagaugaucgagaagauccgcaccgaggcccucaugaccaacgaccgccucgaggccauggcccgccuccgcaacgaggaguccgagaagauggccaaggacaccuccgacgaggucucccucaaccccaccuccgagaagcucaacaaccuccucgagggcaacgacuccgacaacgaccucucccucgaggacuucugaggacuagugcaucacauuuaaaagcaucucagccuaccaugagaauaagagaaagaaaaugaagaucaauagcuuauucaucucuuuuucuuuuucguugguguaaagccaacacccugucuaaaaaacauaaauuucuuuaaucauuuugccucuuuucucugugcuucaauuaauaaaaaauggaaagaaccuagaucuaaaaaaaaaaaaaaaaaaaaaaaaaaaaaaaaaaaaaaaaaaaaaaaaaaaaaaaaaaaaaaaaugcaucccccccccccccccccccccccccccccccaaaggcucuuuucagagccaccagaauu

SEQ ID NO: 10985 - RNA, 1112 nt, Artificial Sequence
  mRNA product Design i-2 comprising derived and/or modified sequence from HRSV(A2)__P03421.1__P (opt3)
gggagaggcgcugccuacggagguggcagccaucuccuucucggcaucaagcuuaccauggagaaguucgcccccgaauuucacggcgaggacgcuaacaauagagcaaccaaauuccuggaaagcaucaaggggaaauuuacauccccuaaggauccgaaaaagaaggacucuauuauaucagugaacaguaucgauauugaggucacuaaagaaagcccaaucacguccaauucuaccauuaucaaccccacaaaugagacugacgauaccgccggaaacaagccuaauuaccagaggaaaccacucguuucguucaaggaggaccccacaccuucagauaacccauuuagcaaacuuuauaaggaaaccauagagacuuucgacaauaacgaagaggagaguuccuacucuuaugaagagaucaaugaucaaacaaacgacaauauuaccgcgcggcuggaucgcaucgacgaaaaguugagcgagauuuuagguaugcugcauacgcuagugguagcuuccgccggccccacuucagcacgagaugggauccgugacgccaugauaggacucagagaagagaugauugagaaaaucaggaccgaagcucugaugacaaacgaccggcuugaggcaauggcccgccugagaaaugaagagagugaaaagauggcuaaagauacuagcgacgaggugucuuugaacccuaccuccgagaagcucaacaaucugcuggaaggcaacgauucagacaaugaucucagcuuagaggacuuuugaggacuagugcaucacauuuaaaagcaucucagccuaccaugagaauaagagaaagaaaaugaagaucaauagcuuauucaucucuuuuucuuuuucguugguguaaagccaacacccugucuaaaaaacauaaauuucuuuaaucauuuugccucuuuucucugugcuucaauuaauaaaaaauggaaagaaccuagaucuaaaaaaaaaaaaaaaaaaaaaaaaaaaaaaaaaaaaaaaaaaaaaaaaaaaaaaaaaaaaaaaaugcaucccccccccccccccccccccccccccccccaaaggcucuuuucagagccaccagaauu

SEQ ID NO: 10986 - RNA, 1112 nt, Artificial Sequence
  mRNA product Design i-2 comprising derived and/or modified sequence from HRSV(A2)__P03421.1__P (opt4)
gggagaggcgcugccuacggagguggcagccaucuccuucucggcaucaagcuuaccauggagaaguucgcccccgaguuccacggcgaggacgccaacaacagagccaccaaguuccuggagagcaucaagggcaaguucaccagccccaaggaccccaagaagaaggacagcaucaucagcgugaacagcaucgacaucgaggugaccaaggagagccccaucaccagcaacagcaccaucaucaaccccaccaacgagaccgacgacaccgccggcaacaagcccaacuaccagagaaagccccuggugagcuucaaggaggaccccacccccagcgacaaccccuucagcaagcuguacaaggagaccaucgagaccuucgacaacaacgaggaggagagcagcuacagcuacgaggagaucaacgaccagaccaacgacaacaucaccgccagacuggacagaaucgacgagaagcugagcgagauccugggcaugcugcacacccuggugguggccagcgccggccccaccagcgccagagacggcaucagagacgccaugaucggccugagagaggagaugaucgagaagaucagaaccgaggcccugaugaccaacgacagacuggaggccauggccagacugagaaacgaggagagcgagaagauggccaaggacaccagcgacgaggugagccugaaccccaccagcgagaagcugaacaaccugcuggagggcaacgacagcgacaacgaccugagccuggaggacuucugaggacuagugcaucacauuuaaaagcaucucagccuaccaugagaauaagagaaagaaaaugaagaucaauagcuuauucaucucuuuuucuuuuucguugguguaaagccaacacccugucuaaaaaacauaaauuucuuuaaucauuuugccucuuuucucugugcuucaauuaauaaaaaauggaaagaaccuagaucuaaaaaaaaaaaaaaaaaaaaaaaaaaaaaaaaaaaaaaaaaaaaaaaaaaaaaaaaaaaaaaaaugcaucccccccccccccccccccccccccccccccaaaggcucuuuucagagccaccagaauu

SEQ ID NO: 10987 - RNA, 1112 nt, Artificial Sequence
  mRNA product Design i-2 comprising derived and/or modified sequence from HRSV(A2)__P03421.1__P (opt5)
gggagaggcgcugccuacggagguggcagccaucuccuucucggcaucaagcuuaccauggagaaguucgcccccgaauuucacggcgaggacgcuaacaauagagccaccaaauuccuggaaagcaucaaggggaaauuuacauccccuaaggauccgaaaaagaaggacucuauuaucagcgugaacuccauugauaucgaggucacgaaagaaucucccauuaccagcaauuccacaaucaucaacccuaccaaugagacagacgauaccgcgggaaacaagcccaauuaccagcggaaaccucucguuucuuucaaggaggaccccacaccuagcgauaacccguuuuccaaacuguauaaggaaaccauugagacguucgacaauaacgaagaggagagcucuuacuccuaugaagagaucaaugaucaaaccaacgacaauauuacagcucgccuugauagaaucgacgaaaagcugagcgagauucucggcaugcugcauacccuugugguggccucugccgggcccacauccgcucgggauggaauccgcgacgccaugauuggccugagagaagagaugaucgagaaaauccggaccgaagcucucaugacgaacgaccgccuggaggccauggcgagacugcggaaugaagagagcgaaaagauggccaaagauacaucugacgaggucucccucaacccuaccagcgagaagcugaacaaucuucuggaagggaacgauuccgacaaugaucucucucuggaggacuuuugaggacuagugcaucacauuuaaaagcaucucagccuaccaugagaauaagagaaagaaaaugaagaucaauagcuuauucaucucuuuuucuuuuucguugguguaaagccaacacccugucuaaaaaacauaaauuucuuuaaucauuuugccucuuuucucugugcuucaauuaauaaaaaauggaaagaaccuagaucuaaaaaaaaaaaaaaaaaaaaaaaaaaaaaaaaaaaaaaaaaaaaaaaaaaaaaaaaaaaaaaaaugcaucccccccccccccccccccccccccccccccaaaggcucuuuucagagccaccagaauu

SEQ ID NO: 10988 - RNA, 1112 nt, Artificial Sequence
  mRNA product Design i-2 comprising derived and/or modified sequence from HRSV(A2)__P03421.1__P (opt6)
gggagaggcgcugccuacggagguggcagccaucuccuucucggcaucaagcuuaccauggaaaaauucgcaccagaauuucacggagaagacgcaaacaacagagcaacaaaauucuuagaaucaaucaaaggaaaauucacaagcccaaaagacccaaaaaaaaaagacucaauaauaagcguaaacucaauagacauagaaguaacaaaagaaagcccaauaacaagcaacagcacaauaauaaacccaacaaacgaaacagaugacacagcuggaaauaaaccaaacuaccaaagaaaaccccuagucagcuucaaagaagaccccacaccaucagacaacccauucagcaaacuauauaaagaaacaauagaaacauuugacaacaacgaagaagaaucaucauacucauacgaagaaauaaacgaccaaacaaacgacaacauaaccgcaagauuagacagaauagaugaaaaacuaucagaaauacuaggaaugcuacacacauuaguaguagcaagcgcaggaccaacaucagcaagagacggaauaagagacgcaaugauaggacucagagaagaaaugauagaaaaaauaagaacagaagcacuaaugacaaacgacagauuagaagcaauggcaagacuaagaaaugaagaaucggaaaaaauggcaaaagacacaucagacgaaguaagccuaaacccaacaucagaaaaauuaaauaaccuacuagaaggaaacgacagcgacaacgacuuaucacuagaagacuucuaaggacuagugcaucacauuuaaaagcaucucagccuaccaugagaauaagagaaagaaaaugaagaucaauagcuuauucaucucuuuuucuuuuucguugguguaaagccaacacccugucuaaaaaacauaaauuucuuuaaucauuuugccucuuuucucugugcuucaauuaauaaaaaauggaaagaaccuagaucuaaaaaaaaaaaaaaaaaaaaaaaaaaaaaaaaaaaaaaaaaaaaaaaaaaaaaaaaaaaaaaaaugcaucccccccccccccccccccccccccccccccaaaggcucuuuucagagccaccagaauu

SEQ ID NO: 10989 - RNA, 1112 nt, Artificial Sequence
  mRNA product Design i-2 comprising derived and/or modified sequence from HRSV(A2)__P03421.1__P (opt11)
gggagaggcgcugccuacggagguggcagccaucuccuucucggcaucaagcuuaccauggaaaaauucgcgcccgaguuccacggcgaggacgcgaacaaccgcgcgacaaaguuccuagaaucaaucaagggcaaauucacgagcccgaaagaccccaagaaaaaggacucaaucauaagcgugaacucgaucgacaucgaggucacgaaagagagcccgaucacaagcaacagcaccauaauaaacccgaccaacgaaacagacgacaccgcgggcaacaaaccgaacuaccaaagaaaaccgcucgugagcuucaaagaagacccgaccccaagcgacaacccguucucaaaacuauacaaggaaacgaucgagaccuucgacaacaacgaggaagagagcucguacucguacgaggaaauaaacgaccaaacaaacgacaacauaaccgcacgccuagacaggaucgacgaaaaacucucggaaauacucgggaugcuacacacgcucguggucgcgagcgcaggcccgaccucggccagggacggcaucagggacgcaaugauaggccugcgagaggaaaugaucgagaaaauacgcaccgaagcacucaugaccaacgacagacucgaagccauggccaggcucaggaacgaagaauccgaaaagauggcgaaagacaccucggacgaggucucgcucaaccccacgagcgagaaacugaacaaccuacuggaagggaacgacagcgacaacgaccuuucccucgaggacuucugaggacuagugcaucacauuuaaaagcaucucagccuaccaugagaauaagagaaagaaaaugaagaucaauagcuuauucaucucuuuuucuuuuucguugguguaaagccaacacccugucuaaaaaacauaaauuucuuuaaucauuuugccucuuuucucugugcuucaauuaauaaaaaauggaaagaaccuagaucuaaaaaaaaaaaaaaaaaaaaaaaaaaaaaaaaaaaaaaaaaaaaaaaaaaaaaaaaaaaaaaaaugcaucccccccccccccccccccccccccccccccaaaggcucuuuucagagccaccagaauu

SEQ ID NO: 10990 - RNA, 1108 nt, Artificial Sequence
  mRNA product Design i-2 comprising derived and/or modified sequence from HRSV(A2)__P03421.1__P (wt)
ggggcgcugccuacggagguggcagccaucuccuucucggcaucaagcuuaccauggaaaaguuugcuccugaauuccauggagaagaugcaaacaacagggcuacuaaauuccuagaaucaauaaagggcaaauucacaucacccaaagaucccaagaaaaaagauaguaucauaucugucaacucaauagauauagaaguaaccaaagaaagcccuauaacaucaaauucaacuauuaucaacccaacaaaugagacagaugauacugcagggaacaagcccaauuaucaaagaaaaccucuaguaaguuucaaagaagacccuacaccaagugauaaucccuuuucuaaacuauacaaagaaaccauagaaacauuugauaacaaugaagaagaauccagcuauucauacgaagaaauaaaugaucagacaaacgauaauauaacagcaagauuagauaggauugaugaaaaauuaagugaaauacuaggaaugcuucacacauuaguaguggcaagugcaggaccuacaucugcucgggaugguauaagagaugccaugauugguuuaagagaagaaaugauagaaaaaaucagaacugaagcauuaaugaccaaugacagauuagaagcuauggcaagacucaggaaugaggaaagugaaaagauggcaaaagacacaucagaugaagugucucucaauccaacaucagagaaauugaacaaccuauuggaagggaaugauagugacaaugaucuaucacuugaagauuucugaggacuagugcaucacauuuaaaagcaucucagccuaccaugagaauaagagaaagaaaaugaagaucaauagcuuauucaucucuuuuucuuuuucguugguguaaagccaacacccugucuaaaaaacauaaauuucuuuaaucauuuugccucuuuucucugugcuucaauuaauaaaaaauggaaagaaccuagaucuaaaaaaaaaaaaaaaaaaaaaaaaaaaaaaaaaaaaaaaaaaaaaaaaaaaaaaaaaaaaaaaaugcaucccccccccccccccccccccccccccccccaaaggcucuuuucagagccaccagaauu

SEQ ID NO: 10991 - RNA, 1108 nt, Artificial Sequence
  mRNA product Design i-2 comprising derived and/or modified sequence from HRSV(A2)__P03421.1__P (opt1)
ggggcgcugccuacggagguggcagccaucuccuucucggcaucaagcuuaccauggagaaguucgcccccgaguuccacggcgaggacgccaacaaccgcgcgaccaaguuccuggagagcaucaaggggaaguucaccuccccgaaggaccccaagaagaaggacagcaucaucuccgugaacagcaucgacaucgaggucacgaaggagucccccaucaccagcaacuccaccaucaucaaccccaccaacgagacggacgacaccgccggcaacaagccgaacuaccagcggaagccccucgugagcuucaaggaggaccccacccccuccgacaacccguucagcaagcuguacaaggagaccaucgagacguucgacaacaacgaggaggaguccagcuacuccuacgaggagaucaacgaccagaccaacgacaacaucaccgcccgccuggaccggaucgacgagaagcucagcgagauccuggggaugcugcacacccucguggucgccuccgccggccccacgagcgcgcgcgacgggauccgggacgccaugaucggccugcgcgaggagaugaucgagaagauccggaccgaggcccugaugaccaacgaccgccucgaggccauggcgcggcugcgcaacgaggaguccgagaagauggccaaggacaccagcgacgaggugucccugaaccccacgagcgagaagcucaacaaccugcuggagggcaacgacagcgacaacgaccucucccuggaggacuucugaggacuagugcaucacauuuaaaagcaucucagccuaccaugagaauaagagaaagaaaaugaagaucaauagcuuauucaucucuuuuucuuuuucguugguguaaagccaacacccugucuaaaaaacauaaauuucuuuaaucauuuugccucuuuucucugugcuucaauuaauaaaaaauggaaagaaccuagaucuaaaaaaaaaaaaaaaaaaaaaaaaaaaaaaaaaaaaaaaaaaaaaaaaaaaaaaaaaaaaaaaaugcaucccccccccccccccccccccccccccccccaaaggcucuuuucagagccaccagaauu

SEQ ID NO: 10992 - RNA, 1108 nt, Artificial Sequence
  mRNA product Design i-2 comprising derived and/or modified sequence from HRSV(A2)__P03421.1__P (opt2)
ggggcgcugccuacggagguggcagccaucuccuucucggcaucaagcuuaccauggagaaguucgcccccgaguuccacggcgaggacgccaacaaccgcgccaccaaguuccucgaguccaucaagggcaaguucaccucccccaaggaccccaagaagaaggacuccaucaucuccgucaacuccaucgacaucgaggucaccaaggagucccccaucaccuccaacuccaccaucaucaaccccaccaacgagaccgacgacaccgccggcaacaagcccaacuaccagcgcaagccccucgucuccuucaaggaggaccccacccccuccgacaaccccuucuccaagcucuacaaggagaccaucgagaccuucgacaacaacgaggaggaguccuccuacuccuacgaggagaucaacgaccagaccaacgacaacaucaccgcccgccucgaccgcaucgacgagaagcucuccgagauccucggcaugcuccacacccucgucgucgccuccgccggccccaccuccgcccgcgacggcauccgcgacgccaugaucggccuccgcgaggagaugaucgagaagauccgcaccgaggcccucaugaccaacgaccgccucgaggccauggcccgccuccgcaacgaggaguccgagaagauggccaaggacaccuccgacgaggucucccucaaccccaccuccgagaagcucaacaaccuccucgagggcaacgacuccgacaacgaccucucccucgaggacuucugaggacuagugcaucacauuuaaaagcaucucagccuaccaugagaauaagagaaagaaaaugaagaucaauagcuuauucaucucuuuuucuuuuucguugguguaaagccaacacccugucuaaaaaacauaaauuucuuuaaucauuuugccucuuuucucugugcuucaauuaauaaaaaauggaaagaaccuagaucuaaaaaaaaaaaaaaaaaaaaaaaaaaaaaaaaaaaaaaaaaaaaaaaaaaaaaaaaaaaaaaaaugcaucccccccccccccccccccccccccccccccaaaggcucuuuucagagccaccagaauu

SEQ ID NO: 10993 - RNA, 1108 nt, Artificial Sequence
  mRNA product Design i-2 comprising derived and/or modified sequence from HRSV(A2)__P03421.1__P (opt3)
ggggcgcugccuacggagguggcagccaucuccuucucggcaucaagcuuaccauggagaaguucgcccccgaauuucacggcgaggacgcuaacaauagagcaaccaaauuccuggaaagcaucaaggggaaauuuacauccccuaaggauccgaaaaagaaggacucuauuauaucagugaacaguaucgauauugaggucacuaaagaaagcccaaucacguccaauucuaccauuaucaaccccacaaaugagacugacgauaccgccggaaacaagccuaauuaccagaggaaaccacucguuucguucaaggaggaccccacaccuucagauaacccauuuagcaaacuuuauaaggaaaccauagagacuuucgacaauaacgaagaggagaguuccuacucuuaugaagagaucaaugaucaaacaaacgacaauauuaccgcgcggcuggaucgcaucgacgaaaaguugagcgagauuuuagguaugcugcauacgcuagugguagcuuccgccggccccacuucagcacgagaugggauccgugacgccaugauaggacucagagaagagaugauugagaaaaucaggaccgaagcucugaugacaaacgaccggcuugaggcaauggcccgccugagaaaugaagagagugaaaagauggcuaaagauacuagcgacgaggugucuuugaacccuaccuccgagaagcucaacaaucugcuggaaggcaacgauucagacaaugaucucagcuuagaggacuuuugaggacuagugcaucacauuuaaaagcaucucagccuaccaugagaauaagagaaagaaaaugaagaucaauagcuuauucaucucuuuuucuuuuucguugguguaaagccaacacccugucuaaaaaacauaaauuucuuuaaucauuuugccucuuuucucugugcuucaauuaauaaaaaauggaaagaaccuagaucuaaaaaaaaaaaaaaaaaaaaaaaaaaaaaaaaaaaaaaaaaaaaaaaaaaaaaaaaaaaaaaaaugcaucccccccccccccccccccccccccccccccaaaggcucuuuucagagccaccagaauu

SEQ ID NO: 10994 - RNA, 1108 nt, Artificial Sequence
  mRNA product Design i-2 comprising derived and/or modified sequence from HRSV(A2)__P03421.1__P (opt4)
ggggcgcugccuacggagguggcagccaucuccuucucggcaucaagcuuaccauggagaaguucgcccccgaguuccacggcgaggacgccaacaacagagccaccaaguuccuggagagcaucaagggcaaguucaccagccccaaggaccccaagaagaaggacagcaucaucagcgugaacagcaucgacaucgaggugaccaaggagagccccaucaccagcaacagcaccaucaucaaccccaccaacgagaccgacgacaccgccggcaacaagcccaacuaccagagaaagccccuggugagcuucaaggaggaccccacccccagcgacaaccccuucagcaagcuguacaaggagaccaucgagaccuucgacaacaacgaggaggagagcagcuacagcuacgaggagaucaacgaccagaccaacgacaacaucaccgccagacuggacagaaucgacgagaagcugagcgagauccugggcaugcugcacacccuggugguggccagcgccggccccaccagcgccagagacggcaucagagacgccaugaucggccugagagaggagaugaucgagaagaucagaaccgaggcccugaugaccaacgacagacuggaggccauggccagacugagaaacgaggagagcgagaagauggccaaggacaccagcgacgaggugagccugaaccccaccagcgagaagcugaacaaccugcuggagggcaacgacagcgacaacgaccugagccuggaggacuucugaggacuagugcaucacauuuaaaagcaucucagccuaccaugagaauaagagaaagaaaaugaagaucaauagcuuauucaucucuuuuucuuuuucguugguguaaagccaacacccugucuaaaaaacauaaauuucuuuaaucauuuugccucuuuucucugugcuucaauuaauaaaaaauggaaagaaccuagaucuaaaaaaaaaaaaaaaaaaaaaaaaaaaaaaaaaaaaaaaaaaaaaaaaaaaaaaaaaaaaaaaaugcaucccccccccccccccccccccccccccccccaaaggcucuuuucagagccaccagaauu

SEQ ID NO: 10995 - RNA, 1108 nt, Artificial Sequence
  mRNA product Design i-2 comprising derived and/or modified sequence from HRSV(A2)__P03421.1__P (opt5)
ggggcgcugccuacggagguggcagccaucuccuucucggcaucaagcuuaccauggagaaguucgcccccgaauuucacggcgaggacgcuaacaauagagccaccaaauuccuggaaagcaucaaggggaaauuuacauccccuaaggauccgaaaaagaaggacucuauuaucagcgugaacuccauugauaucgaggucacgaaagaaucucccauuaccagcaauuccacaaucaucaacccuaccaaugagacagacgauaccgcgggaaacaagcccaauuaccagcggaaaccucucguuucuuucaaggaggaccccacaccuagcgauaacccguuuuccaaacuguauaaggaaaccauugagacguucgacaauaacgaagaggagagcucuuacuccuaugaagagaucaaugaucaaaccaacgacaauauuacagcucgccuugauagaaucgacgaaaagcugagcgagauucucggcaugcugcauacccuugugguggccucugccgggcccacauccgcucgggauggaauccgcgacgccaugauuggccugagagaagagaugaucgagaaaauccggaccgaagcucucaugacgaacgaccgccuggaggccauggcgagacugcggaaugaagagagcgaaaagauggccaaagauacaucugacgaggucucccucaacccuaccagcgagaagcugaacaaucuucuggaagggaacgauuccgacaaugaucucucucuggaggacuuuugaggacuagugcaucacauuuaaaagcaucucagccuaccaugagaauaagagaaagaaaaugaagaucaauagcuuauucaucucuuuuucuuuuucguugguguaaagccaacacccugucuaaaaaacauaaauuucuuuaaucauuuugccucuuuucucugugcuucaauuaauaaaaaauggaaagaaccuagaucuaaaaaaaaaaaaaaaaaaaaaaaaaaaaaaaaaaaaaaaaaaaaaaaaaaaaaaaaaaaaaaaaugcaucccccccccccccccccccccccccccccccaaaggcucuuuucagagccaccagaauu

SEQ ID NO: 10996 - RNA, 1108 nt, Artificial Sequence
  mRNA product Design i-2 comprising derived and/or modified sequence from HRSV(A2)__P03421.1__P (opt6)
ggggcgcugccuacggagguggcagccaucuccuucucggcaucaagcuuaccauggaaaaauucgcaccagaauuucacggagaagacgcaaacaacagagcaacaaaauucuuagaaucaaucaaaggaaaauucacaagcccaaaagacccaaaaaaaaaagacucaauaauaagcguaaacucaauagacauagaaguaacaaaagaaagcccaauaacaagcaacagcacaauaauaaacccaacaaacgaaacagaugacacagcuggaaauaaaccaaacuaccaaagaaaaccccuagucagcuucaaagaagaccccacaccaucagacaacccauucagcaaacuauauaaagaaacaauagaaacauuugacaacaacgaagaagaaucaucauacucauacgaagaaauaaacgaccaaacaaacgacaacauaaccgcaagauuagacagaauagaugaaaaacuaucagaaauacuaggaaugcuacacacauuaguaguagcaagcgcaggaccaacaucagcaagagacggaauaagagacgcaaugauaggacucagagaagaaaugauagaaaaaauaagaacagaagcacuaaugacaaacgacagauuagaagcaauggcaagacuaagaaaugaagaaucggaaaaaauggcaaaagacacaucagacgaaguaagccuaaacccaacaucagaaaaauuaaauaaccuacuagaaggaaacgacagcgacaacgacuuaucacuagaagacuucuaaggacuagugcaucacauuuaaaagcaucucagccuaccaugagaauaagagaaagaaaaugaagaucaauagcuuauucaucucuuuuucuuuuucguugguguaaagccaacacccugucuaaaaaacauaaauuucuuuaaucauuuugccucuuuucucugugcuucaauuaauaaaaaauggaaagaaccuagaucuaaaaaaaaaaaaaaaaaaaaaaaaaaaaaaaaaaaaaaaaaaaaaaaaaaaaaaaaaaaaaaaaugcaucccccccccccccccccccccccccccccccaaaggcucuuuucagagccaccagaauu

SEQ ID NO: 10997 - RNA, 1108 nt, Artificial Sequence
  mRNA product Design i-2 comprising derived and/or modified sequence from HRSV(A2)__P03421.1__P (opt11)
ggggcgcugccuacggagguggcagccaucuccuucucggcaucaagcuuaccauggaaaaauucgcgcccgaguuccacggcgaggacgcgaacaaccgcgcgacaaaguuccuagaaucaaucaagggcaaauucacgagcccgaaagaccccaagaaaaaggacucaaucauaagcgugaacucgaucgacaucgaggucacgaaagagagcccgaucacaagcaacagcaccauaauaaacccgaccaacgaaacagacgacaccgcgggcaacaaaccgaacuaccaaagaaaaccgcucgugagcuucaaagaagacccgaccccaagcgacaacccguucucaaaacuauacaaggaaacgaucgagaccuucgacaacaacgaggaagagagcucguacucguacgaggaaauaaacgaccaaacaaacgacaacauaaccgcacgccuagacaggaucgacgaaaaacucucggaaauacucgggaugcuacacacgcucguggucgcgagcgcaggcccgaccucggccagggacggcaucagggacgcaaugauaggccugcgagaggaaaugaucgagaaaauacgcaccgaagcacucaugaccaacgacagacucgaagccauggccaggcucaggaacgaagaauccgaaaagauggcgaaagacaccucggacgaggucucgcucaaccccacgagcgagaaacugaacaaccuacuggaagggaacgacagcgacaacgaccuuucccucgaggacuucugaggacuagugcaucacauuuaaaagcaucucagccuaccaugagaauaagagaaagaaaaugaagaucaauagcuuauucaucucuuuuucuuuuucguugguguaaagccaacacccugucuaaaaaacauaaauuucuuuaaucauuuugccucuuuucucugugcuucaauuaauaaaaaauggaaagaaccuagaucuaaaaaaaaaaaaaaaaaaaaaaaaaaaaaaaaaaaaaaaaaaaaaaaaaaaaaaaaaaaaaaaaugcaucccccccccccccccccccccccccccccccaaaggcucuuuucagagccaccagaauu

SEQ ID NO: 10998 - RNA, 943 nt, Artificial Sequence
  mRNA product Design i-3 comprising derived and/or modified sequence from HRSV(A2)__P03421.1__P (wt)
gggagaaagcuuaccauggaaaaguuugcuccugaauuccauggagaagaugcaaacaacagggcuacuaaauuccuagaaucaauaaagggcaaauucacaucacccaaagaucccaagaaaaaagauaguaucauaucugucaacucaauagauauagaaguaaccaaagaaagcccuauaacaucaaauucaacuauuaucaacccaacaaaugagacagaugauacugcagggaacaagcccaauuaucaaagaaaaccucuaguaaguuucaaagaagacccuacaccaagugauaaucccuuuucuaaacuauacaaagaaaccauagaaacauuugauaacaaugaagaagaauccagcuauucauacgaagaaauaaaugaucagacaaacgauaauauaacagcaagauuagauaggauugaugaaaaauuaagugaaauacuaggaaugcuucacacauuaguaguggcaagugcaggaccuacaucugcucgggaugguauaagagaugccaugauugguuuaagagaagaaaugauagaaaaaaucagaacugaagcauuaaugaccaaugacagauuagaagcuauggcaagacucaggaaugaggaaagugaaaagauggcaaaagacacaucagaugaagugucucucaauccaacaucagagaaauugaacaaccuauuggaagggaaugauagugacaaugaucuaucacuugaagauuucugaggacuaguuauaagacugacuagcccgaugggccucccaacgggcccuccuccccuccuugcaccgagauuaauaaaaaaaaaaaaaaaaaaaaaaaaaaaaaaaaaaaaaaaaaaaaaaaaaaaaaaaaaaaaaaaaugcaucccccccccccccccccccccccccccccccaaaggcucuuuucagagccaccagaauu

SEQ ID NO: 10999 - RNA, 943 nt, Artificial Sequence
  mRNA product Design i-3 comprising derived and/or modified sequence from HRSV(A2)__P03421.1__P (opt1) R7596
gggagaaagcuuaccauggagaaguucgcccccgaguuccacggcgaggacgccaacaaccgcgcgaccaaguuccuggagagcaucaaggggaaguucaccuccccgaaggaccccaagaagaaggacagcaucaucuccgugaacagcaucgacaucgaggucacgaaggagucccccaucaccagcaacuccaccaucaucaaccccaccaacgagacggacgacaccgccggcaacaagccgaacuaccagcggaagccccucgugagcuucaaggaggaccccacccccuccgacaacccguucagcaagcuguacaaggagaccaucgagacguucgacaacaacgaggaggaguccagcuacuccuacgaggagaucaacgaccagaccaacgacaacaucaccgcccgccuggaccggaucgacgagaagcucagcgagauccuggggaugcugcacacccucguggucgccuccgccggccccacgagcgcgcgcgacgggauccgggacgccaugaucggccugcgcgaggagaugaucgagaagauccggaccgaggcccugaugaccaacgaccgccucgaggccauggcgcggcugcgcaacgaggaguccgagaagauggccaaggacaccagcgacgaggugucccugaaccccacgagcgagaagcucaacaaccugcuggagggcaacgacagcgacaacgaccucucccuggaggacuucugaggacuaguuauaagacugacuagcccgaugggccucccaacgggcccuccuccccuccuugcaccgagauuaauaaaaaaaaaaaaaaaaaaaaaaaaaaaaaaaaaaaaaaaaaaaaaaaaaaaaaaaaaaaaaaaaugcaucccccccccccccccccccccccccccccccaaaggcucuuuucagagccaccagaauu

SEQ ID NO: 11000 - RNA, 943 nt, Artificial Sequence
  mRNA product Design i-3 comprising derived and/or modified sequence from HRSV(A2)__P03421.1__P (opt2)
gggagaaagcuuaccauggagaaguucgcccccgaguuccacggcgaggacgccaacaaccgcgccaccaaguuccucgaguccaucaagggcaaguucaccucccccaaggaccccaagaagaaggacuccaucaucuccgucaacuccaucgacaucgaggucaccaaggagucccccaucaccuccaacuccaccaucaucaaccccaccaacgagaccgacgacaccgccggcaacaagcccaacuaccagcgcaagccccucgucuccuucaaggaggaccccacccccuccgacaaccccuucuccaagcucuacaaggagaccaucgagaccuucgacaacaacgaggaggaguccuccuacuccuacgaggagaucaacgaccagaccaacgacaacaucaccgcccgccucgaccgcaucgacgagaagcucuccgagauccucggcaugcuccacacccucgucgucgccuccgccggccccaccuccgcccgcgacggcauccgcgacgccaugaucggccuccgcgaggagaugaucgagaagauccgcaccgaggcccucaugaccaacgaccgccucgaggccauggcccgccuccgcaacgaggaguccgagaagauggccaaggacaccuccgacgaggucucccucaaccccaccuccgagaagcucaacaaccuccucgagggcaacgacuccgacaacgaccucucccucgaggacuucugaggacuaguuauaagacugacuagcccgaugggccucccaacgggcccuccuccccuccuugcaccgagauuaauaaaaaaaaaaaaaaaaaaaaaaaaaaaaaaaaaaaaaaaaaaaaaaaaaaaaaaaaaaaaaaaaugcaucccccccccccccccccccccccccccccccaaaggcucuuuucagagccaccagaauu

SEQ ID NO: 11001 - RNA, 943 nt, Artificial Sequence
  mRNA product Design i-3 comprising derived and/or modified sequence from HRSV(A2)__P03421.1__P (opt3)
gggagaaagcuuaccauggagaaguucgcccccgaauuucacggcgaggacgcuaacaauagagcaaccaaauuccuggaaagcaucaaggggaaauuuacauccccuaaggauccgaaaaagaaggacucuauuauaucagugaacaguaucgauauugaggucacuaaagaaagcccaaucacguccaauucuaccauuaucaaccccacaaaugagacugacgauaccgccggaaacaagccuaauuaccagaggaaaccacucguuucguucaaggaggaccccacaccuucagauaacccauuuagcaaacuuuauaaggaaaccauagagacuuucgacaauaacgaagaggagaguuccuacucuuaugaagagaucaaugaucaaacaaacgacaauauuaccgcgcggcuggaucgcaucgacgaaaaguugagcgagauuuuagguaugcugcauacgcuagugguagcuuccgccggccccacuucagcacgagaugggauccgugacgccaugauaggacucagagaagagaugauugagaaaaucaggaccgaagcucugaugacaaacgaccggcuugaggcaauggcccgccugagaaaugaagagagugaaaagauggcuaaagauacuagcgacgaggugucuuugaacccuaccuccgagaagcucaacaaucugcuggaaggcaacgauucagacaaugaucucagcuuagaggacuuuugaggacuaguuauaagacugacuagcccgaugggccucccaacgggcccuccuccccuccuugcaccgagauuaauaaaaaaaaaaaaaaaaaaaaaaaaaaaaaaaaaaaaaaaaaaaaaaaaaaaaaaaaaaaaaaaaugcaucccccccccccccccccccccccccccccccaaaggcucuuuucagagccaccagaauu

SEQ ID NO: 11002 - RNA, 943 nt, Artificial Sequence
  mRNA product Design i-3 comprising derived and/or modified sequence from HRSV(A2)__P03421.1__P (opt4)
gggagaaagcuuaccauggagaaguucgcccccgaguuccacggcgaggacgccaacaacagagccaccaaguuccuggagagcaucaagggcaaguucaccagccccaaggaccccaagaagaaggacagcaucaucagcgugaacagcaucgacaucgaggugaccaaggagagccccaucaccagcaacagcaccaucaucaaccccaccaacgagaccgacgacaccgccggcaacaagcccaacuaccagagaaagccccuggugagcuucaaggaggaccccacccccagcgacaaccccuucagcaagcuguacaaggagaccaucgagaccuucgacaacaacgaggaggagagcagcuacagcuacgaggagaucaacgaccagaccaacgacaacaucaccgccagacuggacagaaucgacgagaagcugagcgagauccugggcaugcugcacacccuggugguggccagcgccggccccaccagcgccagagacggcaucagagacgccaugaucggccugagagaggagaugaucgagaagaucagaaccgaggcccugaugaccaacgacagacuggaggccauggccagacugagaaacgaggagagcgagaagauggccaaggacaccagcgacgaggugagccugaaccccaccagcgagaagcugaacaaccugcuggagggcaacgacagcgacaacgaccugagccuggaggacuucugaggacuaguuauaagacugacuagcccgaugggccucccaacgggcccuccuccccuccuugcaccgagauuaauaaaaaaaaaaaaaaaaaaaaaaaaaaaaaaaaaaaaaaaaaaaaaaaaaaaaaaaaaaaaaaaaugcaucccccccccccccccccccccccccccccccaaaggcucuuuucagagccaccagaauu

SEQ ID NO: 11003 - RNA, 943 nt, Artificial Sequence
  mRNA product Design i-3 comprising derived and/or modified sequence from HRSV(A2)__P03421.1__P (opt5)
gggagaaagcuuaccauggagaaguucgcccccgaauuucacggcgaggacgcuaacaauagagccaccaaauuccuggaaagcaucaaggggaaauuuacauccccuaaggauccgaaaaagaaggacucuauuaucagcgugaacuccauugauaucgaggucacgaaagaaucucccauuaccagcaauuccacaaucaucaacccuaccaaugagacagacgauaccgcgggaaacaagcccaauuaccagcggaaaccucucguuucuuucaaggaggaccccacaccuagcgauaacccguuuuccaaacuguauaaggaaaccauugagacguucgacaauaacgaagaggagagcucuuacuccuaugaagagaucaaugaucaaaccaacgacaauauuacagcucgccuugauagaaucgacgaaaagcugagcgagauucucggcaugcugcauacccuugugguggccucugccgggcccacauccgcucgggauggaauccgcgacgccaugauuggccugagagaagagaugaucgagaaaauccggaccgaagcucucaugacgaacgaccgccuggaggccauggcgagacugcggaaugaagagagcgaaaagauggccaaagauacaucugacgaggucucccucaacccuaccagcgagaagcugaacaaucuucuggaagggaacgauuccgacaaugaucucucucuggaggacuuuugaggacuaguuauaagacugacuagcccgaugggccucccaacgggcccuccuccccuccuugcaccgagauuaauaaaaaaaaaaaaaaaaaaaaaaaaaaaaaaaaaaaaaaaaaaaaaaaaaaaaaaaaaaaaaaaaugcaucccccccccccccccccccccccccccccccaaaggcucuuuucagagccaccagaauu

SEQ ID NO: 11004 - RNA, 943 nt, Artificial Sequence
  mRNA product Design i-3 comprising derived and/or modified sequence from HRSV(A2)__P03421.1__P (opt6)
gggagaaagcuuaccauggaaaaauucgcaccagaauuucacggagaagacgcaaacaacagagcaacaaaauucuuagaaucaaucaaaggaaaauucacaagcccaaaagacccaaaaaaaaaagacucaauaauaagcguaaacucaauagacauagaaguaacaaaagaaagcccaauaacaagcaacagcacaauaauaaacccaacaaacgaaacagaugacacagcuggaaauaaaccaaacuaccaaagaaaaccccuagucagcuucaaagaagaccccacaccaucagacaacccauucagcaaacuauauaaagaaacaauagaaacauuugacaacaacgaagaagaaucaucauacucauacgaagaaauaaacgaccaaacaaacgacaacauaaccgcaagauuagacagaauagaugaaaaacuaucagaaauacuaggaaugcuacacacauuaguaguagcaagcgcaggaccaacaucagcaagagacggaauaagagacgcaaugauaggacucagagaagaaaugauagaaaaaauaagaacagaagcacuaaugacaaacgacagauuagaagcaauggcaagacuaagaaaugaagaaucggaaaaaauggcaaaagacacaucagacgaaguaagccuaaacccaacaucagaaaaauuaaauaaccuacuagaaggaaacgacagcgacaacgacuuaucacuagaagacuucuaaggacuaguuauaagacugacuagcccgaugggccucccaacgggcccuccuccccuccuugcaccgagauuaauaaaaaaaaaaaaaaaaaaaaaaaaaaaaaaaaaaaaaaaaaaaaaaaaaaaaaaaaaaaaaaaaugcaucccccccccccccccccccccccccccccccaaaggcucuuuucagagccaccagaauu

SEQ ID NO: 11005 - RNA, 943 nt, Artificial Sequence
  mRNA product Design i-3 comprising derived and/or modified sequence from HRSV(A2)__P03421.1__P (opt11)
gggagaaagcuuaccauggaaaaauucgcgcccgaguuccacggcgaggacgcgaacaaccgcgcgacaaaguuccuagaaucaaucaagggcaaauucacgagcccgaaagaccccaagaaaaaggacucaaucauaagcgugaacucgaucgacaucgaggucacgaaagagagcccgaucacaagcaacagcaccauaauaaacccgaccaacgaaacagacgacaccgcgggcaacaaaccgaacuaccaaagaaaaccgcucgugagcuucaaagaagacccgaccccaagcgacaacccguucucaaaacuauacaaggaaacgaucgagaccuucgacaacaacgaggaagagagcucguacucguacgaggaaauaaacgaccaaacaaacgacaacauaaccgcacgccuagacaggaucgacgaaaaacucucggaaauacucgggaugcuacacacgcucguggucgcgagcgcaggcccgaccucggccagggacggcaucagggacgcaaugauaggccugcgagaggaaaugaucgagaaaauacgcaccgaagcacucaugaccaacgacagacucgaagccauggccaggcucaggaacgaagaauccgaaaagauggcgaaagacaccucggacgaggucucgcucaaccccacgagcgagaaacugaacaaccuacuggaagggaacgacagcgacaacgaccuuucccucgaggacuucugaggacuaguuauaagacugacuagcccgaugggccucccaacgggcccuccuccccuccuugcaccgagauuaauaaaaaaaaaaaaaaaaaaaaaaaaaaaaaaaaaaaaaaaaaaaaaaaaaaaaaaaaaaaaaaaaugcaucccccccccccccccccccccccccccccccaaaggcucuuuucagagccaccagaauu

SEQ ID NO: 11006 - protein, 241 aa, Artificial Sequence
  derived and/or modified protein sequence (wt) from HRSV(Memphis-37)__AIY60637.1__P
MEKFAPEFHGEDANNRATKFLESIKGKFTSPKDPKKKDSIISVNSIDIEVTKESPITSNSTIINPTNETDDTAGNKPNYQRKPLVSFKEDPTPSDNPFSKLYKETIETFDNNEEESSYSYEEINDQTNDNITARLDRIDEKLSEILGMLHTLVVASAGPTSARDGIRDAMVGLREEMIEKIRTEALMTNDRLEAMARLRNEESEKMAKDTSDEVSLNPTSEKLNNLLEGNDSDNDLSLEDF

SEQ ID NO: 11007 - protein, 241 aa, Artificial Sequence
  derived and/or modified protein sequence (wt) from HRSV__O42062.1__P
MEKFAPEFHGEDANNKATKFLESIKGKFASSKDPKKKDSIISVNSIDIEVTKESPITSGTNIINPTSEADSTPETKANYPRKPLVSFKEDLTPSDNPFSKLYKETIETFDNNEEESSYSYEEINDQTNDNITARLDRIDEKLSEILGMLHTLVVASAGPTSARDGIRDAMVGLREEMIEKIRAEALMTNDRLEAMARLRNEESEKMAKDTSDEVPLNPTSKKLSDLLEDNDSDNDLSLDDF

SEQ ID NO: 11008 - protein, 241 aa, Artificial Sequence
  derived and/or modified protein sequence (wt) from HRSV__AAA47419.1__P
MEKFAPEFHGEEANNKATKFLESIKGKFASSKDPKKKDSIISVNSIDIEVTKESPITSGTNIINPISEADSTPEAKANYPRKPLVSFKEDLTPSDNPFSKLYKETIETFDNNEEESSYSYEEINDQTNDNITARLDRIDEKLSEILGMLHTLVVASAGPTSARDGIRDAMVGLREEMIEKIRAEALMTNDRLEAMARLRNEESEKMAKDTSDEVSLNPTSKKLSDLLEDNDSDNDLSLDDF

SEQ ID NO: 11009 - protein, 241 aa, Artificial Sequence
  derived and/or modified protein sequence (wt) from HRSV__AAC57023.1__P
MEKFAPEFHGEDANNRATKFLESIKGKFTSPKDPKKKDSIISVNSIDIEVTKESPITSNSTIINPTNETDDTVGNKPNYQRKPLVSFKEDPTPSDNPFSKLYKETIETFDNNEEESSYSYEEINDQTNDNITARLDRIDEKLSEILGMLHTLVVASAGPTSARDGIRDAMVGLREEMIEKIRTEALMTNDRLEAMARLRNEESEKMAKDTSDEVSLNPTSEKLNNLLEGNDSDNDLSLDDF

SEQ ID NO: 11010 - protein, 241 aa, Artificial Sequence
  derived and/or modified protein sequence (wt) from HRSV__AAL50987.1__P
MEKFAPEFHGEDANNRATKFLESIKGKFTSPKDPKKKDSIISVNSIDIEVTKESPITSNSTIINPINETDDTVENKPNYQRKPLVSFKEDPTPSDNPFSKLYKETIETFDNNEEESSYSYEEINDQTNDNITARLDRIDEKLSEILGMLHTLVVASAGPTSARDGIRDAMVGLREEMIEKIRTEALMTNDRLEAMARLRNEESEKMAKDTSDEVSLNPTSEKLNNLLEGNDSDNDLSLEDF

SEQ ID NO: 11011 - protein, 241 aa, Artificial Sequence
  derived and/or modified protein sequence (wt) from HRSV__AAL50988.1__P
MEKFAPEFHGEDANNRATKFLESVKGKFTSPKDPKKKDSIISVNSIDIEVTKESPITSNSTIINPTNETDDTVGNKPNYQRKPLVSFKEDPMPSDNPFSKLYKETIETFDNNEEESSYSYEEINDQTNDNITARLDRIDEKLSEILGMLHTLVVASAGPTSARDGIRDAMVGLREEMIEKIRTEALMTNDRLEAMARLRNEESEKMAKDTSDEVSLNPTSEKLNNLLEGDDSDNDLSLEDF

SEQ ID NO: 11012 - protein, 241 aa, Artificial Sequence
  derived and/or modified protein sequence (wt) from HRSV__AAL50989.1__P
MEKFAPEFHGEDANNRATKFLESIKGKFTSPKDPKKKDSIISVNSIDIEVTKESPITSNSTIMNPTNETDDTVGNKPNYQRKPLVSFKEDPMLSDNPFSKLYKETIETFDNNEEESSYSYEEINDQTNDNITARLDRIDEKLSEILGMLHTLVVASAGPTSARDGIRDAMVGLREEMIEKIRTEALMTNNRLEAMARLRNEESEKMAKDTSDEVSLNPTSEKLNNLLEGNDSDDDLSLEDF

SEQ ID NO: 11013 - protein, 241 aa, Artificial Sequence
  derived and/or modified protein sequence (wt) from HRSV__AAL57832.1__P
MEKFAPEFHGEDANNKATKFLESIKGKFASSKDPKKKDSIISVNSIDIEVTKESPITSGTNIINPTSEADSTPETKANYPRKPLDSFKEDLTPSDNPFSKLYKETIETFDNNEEESSYSYEEINDQTNDNITARLDRIDEKLSEILGMLHTLVVASAGPTSARDGIRDAMVGLREEMIEKIRAEALMTNDRLEAMARLRNEESEKMAKDTSDEVSLNPTSKKLSDLLEDNDSDNDLSLDDF

SEQ ID NO: 11014 - protein, 241 aa, Artificial Sequence
  derived and/or modified protein sequence (wt) from HRSV__AAL57833.1__P
MEKFAPEFHGEDANNKATKFLESIKGKFASSKDPKKKDSIISVNSIDIEVTKESPITSGTNIINPTSEADSTPETKANYPRKPLVSFKEDLTPSDNPFSKLYKETIETFDNNEEESSYSYEEINDQTNDNITARLDRIDEKLSEILGMLHTLVVASAGPTSARDGIRDAMVGLREEMIEKIRAEALMTNDRLEAMARLRNEESEKMAKDTSDEVSLNPTSKKLSDLLEDNDSDNDLSLDDF

SEQ ID NO: 11015 - protein, 241 aa, Artificial Sequence
  derived and/or modified protein sequence (wt) from HRSV__AAR14262.1__P
MEKFAPEFHGEDANNKATKFLESIKGKFASSKDPKKKDSIISVNSIDIEVTKESPITSGTNINNPTSEADSTPEAKTNYPRKPLVSFKEDLTPSDNPFSKLYKETIETFDNNEEESSYSYEEINDQTNDNITARLDRIDEKLSEILGMLHTLVVASAGPTSARDGIRDAMVGLREEMIEKIRAEALMTNDRLEAMARLRNEESEKMAKDTSDEVSLNPTSKKLSDLLEDNDSDNDLSLDDF

SEQ ID NO: 11016 - protein, 241 aa, Artificial Sequence
  derived and/or modified protein sequence (wt) from HRSV__AAX23990.1__P
MEKFAPEFHGEDANNRATKFLESIKGKFTSPKDPKKKDSIISVNSIDIEVTKESPITSNSTIINPTNETDDNAGNKPNYQRKPLVSFKEDPIPSDNPFSKLYKETIETFDNNEEESSYSYEEINDQTNDNITARLDRIDEKLSEILGMLHTLVVASAGPTSARDGIRDAMVGLREEMIEKIRTEALMTNDRLEAMARLRNEESEKMAKDTSDEVSLNPTSEKLNNLLEGNDSDNDLSLEDF

SEQ ID NO: 11017 - protein, 241 aa, Artificial Sequence
  derived and/or modified protein sequence (wt) from HRSV__ACY68431.1__P
MEKFAPEFHGEDANNRATKFLESIKGKFTSPKDPKKKDSIISVNSIDIEVTKESPITSNSTIINPINETDDTVGNKPNYQRKPLVSFKEDPTPSDNPFSKLYKETIETFDNNEEESSYSYEEINDQTNDNITARLDRIDEKLSEILGMLHTLVVASAGPTSARDGIRDAMVGLREEMIEKIRTEALMTNDRLEAMARLRNEESEKMAKDTSDEVSLNPTSEKLNNLLEGNDSDNDLSLEDF

SEQ ID NO: 11018 - protein, 241 aa, Artificial Sequence
  derived and/or modified protein sequence (wt) from HRSV__AEO45855.1__P
MEKFAPEFHGEDANNRATKFLESIKGKFTSPKDPKKKDSIISVNSIDIEVTKESPITSNSTIINPTNETDDTTGNKPNYQRKPLVSFKEDPTPSDNPFSKLYKETIETFDNNEEESSYSYEEINDQTNDNITARLDRIDEKLSEILGMLHTLVVASAGPTSARDGIRDAMVGLREEMIEKIRTEALMTNDRLEAMARLRNEESEKMAKDTSDEVSLNPTSEKLNNLLEGNDSDNDLSLEDF

SEQ ID NO: 11019 - protein, 241 aa, Artificial Sequence
  derived and/or modified protein sequence (wt) from HRSV__AEQ63330.1__P
MEKFAPEFHGEDANNRATKFLESIKGKFTSPKDPKKKDSIISVNSIDIEVTKESPITSNSTIINPINETDDTVGSKPNYQRKPLVSFKEDPTPSDNPFSKLYKETIETFDNNEEESSYSYEEINDQTNDNITARLDRIDEKLSEILGMLHTLVVASAGPTSARDGIRDAMVGLREEMIEKIRTEALMTNDRLEAMARLRNEESEKMAKDTSDEVSLNPTSEKLNNLLEGNDSDNDLSLEDF

SEQ ID NO: 11020 - protein, 241 aa, Artificial Sequence
  derived and/or modified protein sequence (wt) from HRSV__AEQ63396.1__P
MEKFAPEFHGEDANNRATKFLESIKGKFTSPKDPKKKDSIISVNSIDIEVTKESPITSNSTIINPINETDDNVGNKPNYQRKPLVSFKEDPTPSDNPFSKLYKETIETFDNNEEESSYSYEEINDQTNDNITARLDRIDEKLSEILGMLHTLVVASAGPTSARDGIRDAMVGLREEMIEKIRTEALMTNDRLEAMARLRNEESEKMAKDTSDEVSLNPTSEKLNNLLEGNDSDNDLSLEDF

SEQ ID NO: 11021 - protein, 241 aa, Artificial Sequence
  derived and/or modified protein sequence (wt) from HRSV__AEQ63429.1__P
MEKFAPEFHGEDANNKATKFLESIKGKFTSPKDPKKKDSIISVNSIDIEVTKESPITSNSTIINPINETDDTVGNKPNYQRKPLVSFKEDPTPSDNPFSKLYKETIETFDNNEEESSYSYEEINDQTNDNITARLDRIDEKLSEILGMLHTLVVASAGPTSARDGIRDAMVGLREEMIEKIRTEALMTNDRLEAMARLRNEESEKMAKDTSDEVSLNPTSEKLNNLLEGNDSDNDLSLEDF

SEQ ID NO: 11022 - protein, 241 aa, Artificial Sequence
  derived and/or modified protein sequence (wt) from HRSV__AEQ63483.1__P
MEKFAPEFHGEDANNRATKFLESIKGKFTSPKDPKKKDSIISVNSIDIEVTKESPITSNSTIINPTNETDDTVVNKPNYQRKPLVSFKEDPTPSDNPFSKLYKETIETFDNNEEESSYSYEEINDQTNDNITARLDRIDEKLSEILGMLHTLVVASAGPTSARDGIRDAMVGLREEMIEKIRTEALMTNDRLEAMARLRNEESEKMAKDTSDEVSLNPTSEKLNNLLEGNDSDNDLSLEDF

SEQ ID NO: 11023 - protein, 241 aa, Artificial Sequence
  derived and/or modified protein sequence (wt) from HRSV__AEQ63604.1__P
MEKFAPEFHGEDANNKATKFLESIKGKFASSKDPKKKDSIISVNSIDIEVTKESPITSGTNIINPTSEADSTPETKANYPRKPLVSFKEDLTPSDNPFSKLYKETIETFDNNEEESSYSYEEINDQTSDNITARLDRIDEKLSEILGMLHTLVVASAGPTSARDGIRDAMVGLREEMIEKIRAEALMTNDRLEAMARLRNEESEKMAKDTSDEVSLNPTSKKLSDLLEDNDSDNDLSLDDF

SEQ ID NO: 11024 - protein, 241 aa, Artificial Sequence
  derived and/or modified protein sequence (wt) from HRSV__AEQ63648.1__P
MEKFAPEFHGEDANNKATKFLESIKGKFASSKDPKKKDSIISVNSIDIEVTKESPITSGTNIINPTSEADSTPETKANYPRKPLVSFKEDLTPSDNPFSKLYKETIETFDNHEEESSYSYEEINDQTNDNITARLDRIDEKLSEILGMLHTLVVASAGPTSARDGIRDAMVGLREEMIEKIRAEALMTNDRLEAMARLRNEESEKMAKDTSDEVSLNPTSKKLSDLLEDNDSDNDLSLDDF

SEQ ID NO: 11025 - protein, 241 aa, Artificial Sequence
  derived and/or modified protein sequence (wt) from HRSV__AEQ63670.1__P
MEKFAPEFHGEDANNKATKFLESIKGKFASSKDPKKKDSIISVNSIDIEVTKESPITSGTNIINLTSEANSTPETKANYPRKPLVSFKEDLAPSDNPFSKLYKETIETFDNNEEESSYSYEEINDQTNDNITARLDRIDEKLSEILGMLHTLVVASAGPTSARDGIRDAMVGLREEMIEKIRAEALMTNDRLEAMARLRNEESEKMAKDTSDEVSLNPTSKKLSDLLEDNDSDNDLSLDDF

SEQ ID NO: 11026 - protein, 241 aa, Artificial Sequence
  derived and/or modified protein sequence (wt) from HRSV__AFI25247.1__P
MEKFAPEFHGEDANNKATKFLESIKGKFASSKDPKKKDSIISVNSIDIEVTKESPITSGTNIINPASEADSTPETKANYPRKPLVSFKEDLTPSDNPFSKLYKETIETFDNNEEESSYSYEEINDQTNDNITARLDRIDEKLSEILGMLHTLVVASAGPTSARDGIRDAMVGLREEMIEKIRAEALMTNDRLEAMARLRNEESEKMAKDTSDEVSLNPTSKKLSDLLEDNDSDNDLSLDDF

SEQ ID NO: 11027 - protein, 241 aa, Artificial Sequence
  derived and/or modified protein sequence (wt) from HRSV__AFM55328.1__P
MEKFAPEFHGEDANNRATKFLESIKGKFTSPKDPKKKDSIISVNSIDIEVTKESPITSNSTIINPINETDDTIGNKPNYQRKPLVSFKEDPTPSDNPFSKLYKETIETFDNNEEESSYSYEEINDQTNDNITARLDRIDEKLSEILGMLHTLVVASAGPTSARDGIRDAMVGLREEMIEKIRTEALMTNDRLEAMARLRNEESEKMAKDTSDEVSLNPTSEKLNNLLEGNDSDNDLSLEDF

SEQ ID NO: 11028 - protein, 241 aa, Artificial Sequence
  derived and/or modified protein sequence (wt) from HRSV__AFM55449.1__P
MEKFAPEFHGEDANNRATKFLESIKGKFTSPKDPKKKDSIISVNSIDIEVTKESPITSNSTIINPINETDDTVGNKPNYQRKPLVSFKEDPTPSDNPFSKLYKETIETFDNNEEESSYSYEEINDQTTDNITARLDRIDEKLSEILGMLHTLVVASAGPTSARDGIRDAMVGLREEMIEKIRTEALMTNDRLEAMARLRNEESEKMAKDTSDEVSLNPTSEKLNNLLEGNDSDNDLSLEDF

SEQ ID NO: 11029 - protein, 241 aa, Artificial Sequence
  derived and/or modified protein sequence (wt) from HRSV__AFM55493.1__P
MEKFAPEFHGEDANNRATKFLESIKGKFTSPKDPKKKDSIISVNSIDIDVTKESPITSNSTIINPINETDDIVGNKPNYQRKPLVSFKEDPTPSDNPFSKLYKETIETFDNNEEESSYSYEEINDQTNDNITARLDRIDEKLSEILGMLHTLVVASAGPTSARDGIRDAMVGLREEMIEKIRTEALMTNDRLEAMARLRNEESEKMAKDTSDEVSLNPTSEKLNNLLEGNDSDNDLSLEDF

SEQ ID NO: 11030 - protein, 241 aa, Artificial Sequence
  derived and/or modified protein sequence (wt) from HRSV__AFM95398.1__P
MEKFAPEFHGEDANNRATKFLESIKGKFTSPKDPKKKDSIISVNSIDIEVTKESPITSNSNIINPTNETDDTAGNKPNYQRKPLVSFKEDPTPSDNPFSKLYKETIETFDNNEEESSYSYEEINDQTNDNITARLDRIDEKLSEILGMLHTLVVASAGPTSARDGIRDAMVGLREEMIEKIRTEALMTNDRLEAMARLRNEESEKMAKDTSDEVSLNPTSEKLNNLLEGNDSDNDLSLEDF

SEQ ID NO: 11031 - protein, 241 aa, Artificial Sequence
  derived and/or modified protein sequence (wt) from HRSV__AGN28535.1__P
MEKFAPEFHGEDANNKATKFLESIKGKFASSKDPKKKDSIISVNSIDIEVTKESPITSGSNIINPTSEADSTPETKANYPRKPLVSFKEDLTPSDNPFSKLYKETIETFDNNEEESSYSYEEINDQTNDNITARLDRIDEKLSEILGMLHTLVVASAGPTSARDGIRDAMVGLREEMIEKIRAEALMTNDRLEAMARLRNEESEKMAKDTSDEVSLNPTSKKLSDLLEDNDSDNDLSLDDF

SEQ ID NO: 11032 - protein, 241 aa, Artificial Sequence
  derived and/or modified protein sequence (wt) from HRSV__AGN28579.1__P
MEKFAPEFHGEDANNKATKFLESIKGKFASSKDPKKKDSIISVNSIDIEVTKESPITSGTNIINPTSEVDSTPETKANYPRKPLVSFKEDLTPSDNPFSKLYKETIETFDNNEEESSYSYEEINDQTNDNITARLDRIDEKLSEILGMLHTLVVASAGPTSARDGIRDAMVGLREEMIEKIRAEALMTNDRLEAMARLRNEESEKMAKDTSDEVSLNPTSKKLSDLLEDNDSDNDLSLDDF

SEQ ID NO: 11033 - protein, 241 aa, Artificial Sequence
  derived and/or modified protein sequence (wt) from HRSV__AGN28634.1__P
MEKFAPEFHGEDANNKATKFLESIKGKFASSKDPKKKDSIISVNSIDIEVTKESPITSGTNIINPTSEADSTPETKANYPRKPLVSFKEDLTPSDNPFSKLYKETIETFDNNEEESSYSYEEINDQTNDNITARLDRIDEKLSEILGMLHTLVVASAGPTSARDGIRDAMVGLREEMIEKIRAEALMTNDRLEAMARLRNEESEKMTKDTSDEVSLNPTSKKLSDLLEDNDSDNDLSLDDF

SEQ ID NO: 11034 - protein, 241 aa, Artificial Sequence
  derived and/or modified protein sequence (wt) from HRSV__AGN28645.1__P
MEKFAPEFHGEDANNKATKFLESIKGKFASSKDPKKKDSIISVNSIDIEVTKESPITSGTNIINPTNEADSTPETKANYPRKPLVSFKEDLTPSDNPFSKLYKETIETFDNNEEESSYSYEEINDQTNDNITARLDRIDEKLSEILGMLHTLVVASAGPTSARDGIRDAMVGLREEMIEKIRAEALMTNDRLEAMARLRNEESEKMAKDTSDEVSLNPTSKKLSDLLEDNDSDNDLSLDDF

SEQ ID NO: 11035 - protein, 241 aa, Artificial Sequence
  derived and/or modified protein sequence (wt) from HRSV__AGN28722.1__P
MEKFAPEFHGEEANNKATKFLESIKGKFASSKDPKKKDSIISVNSIDIEVTKESPITSGTNIINPTSEADSTPETKANYPRKPLVSFKEDLTPSDNPFSKLYKETIETFDNNEEESSYSYEEINDQTNDNITARLDRIDEKLSEILGMLHTLVVASAGPTSARDGIRDAMVGLREEMIEKIRAEALMTNDRLEAMARLRNEESEKMAKDTSDEVSLNPTSKKLSDLLEDNDSDNDLSLDDF

SEQ ID NO: 11036 - protein, 241 aa, Artificial Sequence
  derived and/or modified protein sequence (wt) from HRSV__AGN28777.1__P
MEKFAPEFHGEDANNKATKFLESIKGKFSSSKDPKKKDSIISVNSIDIEVTKESPITSGTNIINPTSEADSTPETKVNYPRKPLVSFKEDLTPSDNPFSKLYKETIETFDNNEEESSYSYEEINDQTNDNITARLDRIDEKLSEILGMLHTLVVASAGPTSARDGIRDAMVGLREEMIEKIRAEALMTNDRLEAMARLRNEESEKMAKDTSDEVSLNPTSKKLSDLLEDNDSDNDLSLDDF

SEQ ID NO: 11037 - protein, 241 aa, Artificial Sequence
  derived and/or modified protein sequence (wt) from HRSV__AGN28788.1__P
MEKFAPEFHGEDANNKATKFLESIKGKFASSKDPKKKDSIISVNSIDIEVTKESPITSGTNIINPTSEADSTPETKANYQRKPLVSFKEDLTPSDNPFSKLYKETIETFDNNEEESSYSYEEINDQTNDNITARLDRIDEKLSEILGMLHTLVVASAGPTSARDGIRDAMVGLREEMIEKIRAEALMTNDRLEAMARLRNEESEKMAKDTSDEVSLNPTSKKLSDLLEDNDSDNDLSLDDF

SEQ ID NO: 11038 - protein, 241 aa, Artificial Sequence
  derived and/or modified protein sequence (wt) from HRSV__AHA83617.1__P
MEKFAPEFHGEDANNRATKFLESIKGKFTSPKDPKKKDSIISVNSIDIEATKESPITSNSTIINPTNETDDTAGNKPNYQRKPLVSFKEDPTPSDNPFSKLYKETIETFDNNEEESSYSYEEINDQTNDNITARLDRIDEKLSEILGMLHTLVVASAGPTSARDGIRDAMVGLREEMIEKIRTEALMTNDRLEAMARLRNEESEKMAKDTSDEVSLNPTSEKLNNLLEGNDSDNDLSLEDF

SEQ ID NO: 11039 - protein, 241 aa, Artificial Sequence
  derived and/or modified protein sequence (wt) from HRSV__AHA83701.1__P
MEKFAPEFHGEDANNKATKFLESIKGKFASSKDPKKKDSIISVNSIDIEVTKESPITSGTNIINPTSEADSTPESKANYPRKPLVSFKEDLTPSDNPFSKLYKETIETFDNNEEESSYSYEEINDQTNDNITARLDRIDEKLSEILGMLHTLVVASAGPTSARDGIRDAMVGLREEMIEKIRAEALMTNDRLEAMARLRNEESEKMAKDTSDEVSLNPTSKKLSDLLEDNDSDNDLSLDDF

SEQ ID NO: 11040 - protein, 241 aa, Artificial Sequence
  derived and/or modified protein sequence (wt) from HRSV__AHA83734.1__P
MEKFAPEFHGEDANNRATKFLESIKGKFTSPKDPKKKDSIISVNSIDIEVTKESPITSNSTIINPTNETDDTAGNKPNYQRKPLVSFKEDPTPSDNPFSKLYKETIETFDNNEEESSYSYEEINDQTNDNITARLDRIDEKLSEILGMLHTLVVASAGPTSARDGIRDAMVGLREEMIEKIRTEALMTNDRLEAMARLRNEESEKMAKDTSDEVSLNPTSEKLNNLLDGNDSDNDLSLEDF

SEQ ID NO: 11041 - protein, 241 aa, Artificial Sequence
  derived and/or modified protein sequence (wt) from HRSV__AHA83800.1__P
MEKFAPEFHGEDANNKATKFLESIKGKFASSKDSKKKDSIISVNSIDIEVTKESPITSGTNIINPTSEADSTPETKANYPRKPLVSFKEDLTPSDNPFSKLYKETIETFDNNEEESSYSYEEINDQTNDNITARLDRIDEKLSEILGMLHTLVVASAGPTSARDGIRDAMVGLREEMIEKIRAEALMTNDRLEAMARLRNEESEKMAKDTSDEVSLNPTSKKLSDLLEDNDSDNDLSLDDF

SEQ ID NO: 11042 - protein, 241 aa, Artificial Sequence
  derived and/or modified protein sequence (wt) from HRSV__AHA83887.1__P
MEKFAPEFHGEDANNKATKFLESIKGKFASSKDPKKKDSIISVNSIDIEVTKESPITSGTNIINPTSEADSTPETKANYPRKPLVSFKEDLAPSDNPFSKLYKETIETFDNNEEESSYSYEEINDQTNDNITARLDRIDEKLSEILGMLHTLVVASAGPTSARDGIRDAMVGLREEMIEKIRAEALMTNDRLEAMARLRNEESEKMAKDTSDEVSLNPTSKKLSDLLEDNDSDNDLSLDDF

SEQ ID NO: 11043 - protein, 241 aa, Artificial Sequence
  derived and/or modified protein sequence (wt) from HRSV__AHA84008.1__P
MEKFAPEFHGEDANNKATKFLESIKGKFASSKDPKKKDSIISVNSIDIEVTKESPITSGTTVINPTSEADSTPETKTNYPRKPLVSFKEDLTPSDNPFSKLYKETIETFDNNEEESSYSYEEINDQTNDNITARLDRIDEKLSEILGMLHTLVVASAGPTSARDGIRDAMVGLREEMIEKIRAEALMTNDRLEAMARLRNEESEKMAKDTSDEVSLNPTSKKLSDLLEDNDSDNDLSLDDF

SEQ ID NO: 11044 - protein, 241 aa, Artificial Sequence
  derived and/or modified protein sequence (wt) from HRSV__AHE57680.1__P
MEKFAPEFHGEDANNRATKFLESIKGKFTSPKDPKKKDSIISVNSIDIEVTKESPITSNSTIINPTNETDDTSGNKPNYQRKPLVSFKEDPTPSDNPFSKLYKETIETFDNNEEESSYSYEEINDQTNDNITARLDRIDEKLSEILGMLHTLVVASAGPTSARDGIRDAMVGLREEMIEKIRTEALMTNDRLEAMARLRNEESEKMAKDTSDEVSLNPTSEKLNNLLEGNDSDNDLSLEDF

SEQ ID NO: 11045 - protein, 241 aa, Artificial Sequence
  derived and/or modified protein sequence (wt) from HRSV__AHE57890.1__P
MEKFAPEFHGEDANNRATKFLESIKGKFTSPKDPKKKDSIISVNSIDIEVTKESPITSNSTIINPTNETDDTSGNKPNYQRKPLVSFKEDPTPSDNPFSKLYKETIETFDNNEEESSYSYEEINDQTNDNITARLDRIDEKLSEILGMLHTLVVASAGPTSARDGIRDAMVGLREEMIEKIRTEALMTNDRLEAMARLRNEESEKMVKDTSDEVSLNPTSEKLNNLLEGNDSDNDLSLEDF

SEQ ID NO: 11046 - protein, 241 aa, Artificial Sequence
  derived and/or modified protein sequence (wt) from HRSV__AHV80765.1__P
MEKFAPEFHGEDANNRATKFLESIKGKFTSPKDPKKKDSIISVNSIDIEVTKESPITSNSTIINPINETDDTAGNKPNYQRKPLVSFKEDPTPSDNPFSKLYKETIETFDNNEEESSYSYEEINDQTNDNITARLDRIDEKLSEILGMLHTLVVASAGPTSARDGIRDAMVGLREEMIEKIRTEALMTNDRLEAMARLRNEESEKMAKDTSDEVSLNPTSEKLNNLLEGNDSDNDLSLEDF

SEQ ID NO: 11047 - protein, 241 aa, Artificial Sequence
  derived and/or modified protein sequence (wt) from HRSV__AHV80799.1__P
MEKFAPEFHGEDANNKATKFLESIKGKFASSKDPKKKDSIISVNSIDIEVNKESPITSGTNIINPTSEADSTPETKANYPRKPLVSFKEDLTPSDNPFSKLYKETIETFDNNEEESSYSYEEINDQTNDNITARLDRIDEKLSEILGMLHTLVVASAGPTSARDGIRDAMVGLREEMIEKIRAEALMTNDRLEAMARLRNEESEKMAKDTSDEVSLNPTSKKLSDLLEDNDSDNDLSLDDF

SEQ ID NO: 11048 - protein, 241 aa, Artificial Sequence
  derived and/or modified protein sequence (wt) from HRSV__AHV81041.1__P
MEKFAPEFHGEDANNRATKFLESIKGKFTSPKDPKKKDSIISVNSIDIEVTKESPITSNSTIINPINEIDDTVGNKPNYQRKPLVSFKEDPTPSDNPFSKLYKETIETFDNNEEESSYSYEEINDQTNDNITARLDRIDEKLSEILGMLHTLVVASAGPTSARDGIRDAMVGLREEMIEKIRTEALMTNDRLEAMARLRNEESEKMAKDTSDEVSLNPTSEKLNNLLEGNDSDNDLSLEDF

SEQ ID NO: 11049 - protein, 241 aa, Artificial Sequence
  derived and/or modified protein sequence (wt) from HRSV__AHV81085.1__P
MEKFAPEFHGEDANNKATKFLESIKGKFASSKDPKKKDSIISVNSIDIEVTKESPITSGTNIINPTSEADSTPDTKANYPRKPLVSFKEDLTPSDNPFSKLYKETIETFDNNEEESSYSYEEINDQTNDNITARLDRIDEKLSEILGMLHTLVVASAGPTSARDGIRDAMVGLREEMIEKIRAEALMTNDRLEAMARLRNEESEKMAKDTSDEVSLNPTSKKLSDLLEDNDSDNDLSLDDF

SEQ ID NO: 11050 - protein, 241 aa, Artificial Sequence
  derived and/or modified protein sequence (wt) from HRSV__AHV81129.1__P
MEKFAPEFHGEDANNRATKFLESIKGKFTSPKDPKKKDSIISVNSIDIEVTKESPITSNSTIINPINETDDTVGNKPNYQRKPLVSFKEDPTPSDNPFSKLYKETIETFDNNEEESSYSYEEINDQTNDNITVRLDRIDEKLSEILGMLHTLVVASAGPTSARDGIRDAMVGLREEMIEKIRTEALMTNDRLEAMARLRNEESEKMVKDTSDEVSLNPTSEKLNNLLEGNDSDNDLSLEDF

SEQ ID NO: 11051 - protein, 241 aa, Artificial Sequence
  derived and/or modified protein sequence (wt) from HRSV__AHV81161.1__P
MEKFAPEFHGEDANNKATKFLESIKGKFASSKDPKKKDSIISVNSIDIEVTKESPITSGTNIINPTSEADSTPETKANYPRKPLVSFKEDLTPSDNPFSKLYKETIETFDNNEEESSYSYEEINDQTNDNITARLDRIDEKLSEILGMLHTLVVASAGPTSARDGIRDAMVGLREEMIEKIRAEALMTNDRLEAMARLRNEESKKMAKDTSDEVSLNPTSKKLSDLLEDNDSDNDLSLDDF

SEQ ID NO: 11052 - protein, 241 aa, Artificial Sequence
  derived and/or modified protein sequence (wt) from HRSV__AHV81172.1__P
MEKFAPEFHGEDANNRATKFLESIKGKFTSPKDPKKKDSIISVNSIDIEVTKESPITSNSTIINPINETDDTVGNKPNYQRKPLVSFKEDSTPSDNPFSKLYKETIETFDNNEEESSYSYEEINDQTNDNITARLDRIDEKLSEILGMLHTLVVASAGPTSARDGIRDAMVGLREEMIEKIRTEALMTNDRLEAMARLRNEESEKMAKDTSDEVSLNPTSEKLNNLLEGNDSDNDLSLEDF

SEQ ID NO: 11053 - protein, 241 aa, Artificial Sequence
  derived and/or modified protein sequence (wt) from HRSV__AHV81194.1__P
MEKFAPEFHGEDANNRATKFLESIKGKFTSPKDPKKKDSIISVNSIDIEVTKESPITSNSTIINPINETDDTVGNKLNYQRKPLVSFKEDPTPSDNPFSKLYKETIETFDNNEEESSYSYEEINDQTNDNITARLDRIDEKLSEILGMLHTLVVASAGPTSARDGIRDAMVGLREEMIEKIRTEALMTNDRLEAMARLRNEESEKMAKDTSDEVSLNPTSEKLNNLLEGNDSDNDLSLEDF

SEQ ID NO: 11054 - protein, 241 aa, Artificial Sequence
  derived and/or modified protein sequence (wt) from HRSV__AHV81216.1__P
MEKFAPEFHGEDANNRATKFLESIKGKFTSPKDPKKKESIISVNSIDIEVTKESPITSNSTIINPINETDDTVGNKPNYQRKPLVSFKEDPTPSDNPFSKLYKETIETFDNNEEESSYSYEEINDQTNDNITARLDRIDEKLSEILGMLHTLVVASAGPTSARDGIRDAMVGLREEMIEKIRTEALMTNDRLEAMARLRNEESEKMAKDTSDEVSLNPTSEKLNNLLEGNDSDNDLSLEDF

SEQ ID NO: 11055 - protein, 241 aa, Artificial Sequence
  derived and/or modified protein sequence (wt) from HRSV__AHV81381.1__P
MEKFAPEFHGEDANNRATKFLESIKGKFTSPKDPKKKDSIISVNSIDIEVTKESPITSNSTIITPINETDDTVGNKPNYQRKPLVSFKEDPTPSDNPFSKLYKETIETFDNNEEESSYSYEEINDQTNDNITARLDRIDEKLSEILGMLHTLVVASAGPTSARDGIRDAMVGLREEMIEKIRTEALMTNDRLEAMARLRNEESEKMAKDTSDEVTLNPTSEKLNNLLEGNDSDNDLSLEDF

SEQ ID NO: 11056 - protein, 241 aa, Artificial Sequence
  derived and/or modified protein sequence (wt) from HRSV__AHV81832.1__P
MEKFAPEFHGEDANNKATKFLESIKGKFASSKDPKKKDSIISVNSIDIEVTKESPITSGTNIINPTSEADSTPETKTNYPRKPLVSFKEDLTPSDNPFSKLYKETIETFDNNEEESSYSYEEINDQTNDNITARLDRIDEKLSEILGMLHTLVVASAGPTSARDGIRDAMVGLREEMIEKIRAEALMTNDRLEAMARLRNEESEKMAKDTSDEVSLNPTSKKLSDLLEDNDSDNDLSLDDF

SEQ ID NO: 11057 - protein, 241 aa, Artificial Sequence
  derived and/or modified protein sequence (wt) from HRSV__AHV81876.1__P
MEKFAPEFHGEDANNRATKFLESIKGKFTSPKDPKKKDSIISVNSIDIEVTKESPITSNSTIITPINETDDTVGNKPNHQRKPLVSFKEDPTPSDNPFSKLYKETIETFDNNEEESSYSYEEINDQTNDNITARLDRIDEKLSEILGMLHTLVVASAGPTSARDGIRDAMVGLREEMIEKIRTEALMTNDRLEAMARLRNEESEKMAKDTSDEVTLNPTSEKLNNLLEGNDSDNDLSLEDF

SEQ ID NO: 11058 - protein, 241 aa, Artificial Sequence
  derived and/or modified protein sequence (wt) from HRSV__AHV81931.1__P
MEKFAPEFHGEDANNRATKFLESIKGKFTSPKDPKKKDSIISVNSIDIEVTKESPITSNSTIINPTNETDDTVGNKPNYQRKPLVSFKEDPTPSDNPFSKLYKETIETFDNNEEESSYSYEEINDQTNDNITSRLDRIDEKLSEILGMLHTLVVASAGPTSARDGIRDAMVGLREEMIEKIRTEALMTNDRLEAMARLRNEESEKMAKDTSDEVSLNPTSEKLNNLLEGNDSDNDLSLEDF

SEQ ID NO: 11059 - protein, 241 aa, Artificial Sequence
  derived and/or modified protein sequence (wt) from HRSV__AHV81964.1__P
MEKFAPEFHGEDANNRATKFLESIKGKFTSPKDPKKKDSIISVNSIDIEVTKESPITSNSTIINPINETDDTVGNKPNYQRKPLVSFKEDPTPSDNPFSKLYKETIETFDNNEEESSYSYEEINDQTNDNITARLDRIDEKLSEILGMLHTLVVASAGPTSARDGIRDAMVGLREEMIEKIRTEALMTNDRLEAMARLRNEESEKMAKDTSDEVSLNPTSEKLNNLLKGNDSDNDLSLEDF

SEQ ID NO: 11060 - protein, 241 aa, Artificial Sequence
  derived and/or modified protein sequence (wt) from HRSV__AHV82096.1__P
MEKFAPEFHGEDANNRATKFLESIKGKFTSPKDPKKKDSIISVNSIDIEVTKESPITSNSTIIKPINETDDTVGNKPNYQRKPLVSFKEDPTPSDNPFSKLYKETIETFDNNEEESSYSYEEINDQTNDNITARLDRIDEKLSEILGMLHTLVVASAGPTSARDGIRDAMVGLREEMIEKIRTEALMTNDRLEAMARLRNEESEKMAKDTSDEVSLNPTSEKLNNLLEGNDSDNDLSLEDF

SEQ ID NO: 11061 - protein, 241 aa, Artificial Sequence
  derived and/or modified protein sequence (wt) from HRSV__AHW80547.1__P
MEKFAPEFHGEDANNRATKFLESIKGKFTSPKDPKKKDSIISVNSIDIEVTKESPITSNSTIINPTNETDDTAGNKPNYQRKPLVSFKEDPTPSDNPFSKLYKETIETFDNNEEESSYSYEEINDQTNDNITVRLDRIDEKLSEILGMLHTLVVASAGPTSARDGIRDAMVGLREEMIEKIRTEALMTNDRLEAMARLRNEESEKMAKDTSDEVSLNPTSEKLNNLLEGNDSDNDLSLEDF

SEQ ID NO: 11062 - protein, 241 aa, Artificial Sequence
  derived and/or modified protein sequence (wt) from HRSV__AHW80586.1__P
MEKFAPEFHGEDANNRATKFLESIKGKFTSPKDPKKKDSIISVNSIDIEVTKESPITSNSTIINPTNETDDTSGNKPNYQRKPLVSFKEDPTPSDNPFSKLYKETIETFDNNEEESSYSYEEINDQTNDNITARLDRIDEKLSEILGMLHTLVVASAGPTSARDGIRDAMVGLREEMIEKIRTEALMTNDKLEAMARLRNEESEKMAKDTSDEVSLNPTSEKLNNLLEGNDSDNDLSLEDF

SEQ ID NO: 11063 - protein, 241 aa, Artificial Sequence
  derived and/or modified protein sequence (wt) from HRSV__AHW80656.1__P
MEKFAPEFHGEDANNRATKFLESIKGKFTSPKDPKKKDSIISVNSIDIEVTKESPITSNSTIINPTNETDDTAGNKPNYQRKPLVSFKDDPTPSDNPFSKLYKETIETFDNNEEESSYSYEEINDQTNDNITARLDRIDEKLSEILGMLHTLVVASAGPTSARDGIRDAMVGLREEMIEKIRTEALMTNDRLEAMARLRNEESEKMAKDTSDEVSLNPTSEKLNNLLEGNDSDNDLSLEDF

SEQ ID NO: 11064 - protein, 241 aa, Artificial Sequence
  derived and/or modified protein sequence (wt) from HRSV__AHW80886.1__P
MEKFAPEFHGEDANNRATKFLESIKGKFTSPKDPKKKDSIISVNSIDIEVTKESPITSNSTIINPTNETDDTAGNKPNYQRKPLVSFKEDPTPSDNPFSKLYKETIETFDNNEEESSYSYEEINDQTNDNITARLDRIDVELSEILGMLHTLVVASAGPTSARDGIRDAMVGLREEMIEKIRTEALMTNDRLEAMARLRNEESEKMAKDTSDEVSLNPTSEKLNNLLEGNDSDNDLSLEDF

SEQ ID NO: 11065 - protein, 241 aa, Artificial Sequence
  derived and/or modified protein sequence (wt) from HRSV__AHW80966.1__P
MEKFAPEFHGEDANNRATKFLESIKGKFTSPKVPKKKDSIISVNSIDIEVTKESPITSNSTIINPTNETDDTAGNKPNYQRKPLVSFKEDPTPSDNPFSKLYKETIETFDNNEEESSYSYEEINDQTNDNITARLDRIDEKLSEILGMLHTLVVASAGPTSARDGIRDAMVGLREEMIEKIRTEALMTNDRLEAMARLRNEESEKMAKDTSDEVSLNPTSEKLNNLLEGNDSDNDLSLEDF

SEQ ID NO: 11066 - protein, 241 aa, Artificial Sequence
  derived and/or modified protein sequence (wt) from HRSV__AHW80986.1__P
MEKFAPEFHGEDANNRATKFLESIKGKFTSPKDPKKKDSIISVNSIDIEVTKESPITSNSTIINPTNETDDTVGNKPNYQRKPLVSFKEDSTPSDNPFSKLYKETIETFDNNEEESSYSYEEINDQTNDNITARLDRIDEKLSEILGMLHTLVVASAGPTSARDGIRDAMVGLREEMIEKIRTEALMTNDRLEAMARLRNEESEKMAKDTSDEVSLNPTSEKLNNLLEGNDSDNDLSLEDF

SEQ ID NO: 11067 - protein, 241 aa, Artificial Sequence
  derived and/or modified protein sequence (wt) from HRSV__AHW81036.1__P
MEKFAPEFHGEDANNRATKFLESIKGKFTSPKDPKKKDSIISVNSIDIEVTKESPITSNSTIINPTNETDDTAGNKLNYQRKPLVSFKEDPTPSDNPFSKLYKETIETFDNNEEESSYSYEEINDQTNDNITARLDRIDEKLSEILGMLHTLVVASAGPTSARDGIRDAMVGLREEMIEKIRTEALMTNDRLEAMARLRNEESEKMAKDTSDEVSLNPTSEKLNNLLEGNDSDNDLSLEDF

SEQ ID NO: 11068 - protein, 241 aa, Artificial Sequence
  derived and/or modified protein sequence (wt) from HRSV__AHW81056.1__P
MEKFAPEFHGEDANNRATKFLESIKGKFTSPKDPKKKDSIISVNSIDIEVTKESPITSNSTIINPTNETDDTAENKPNYQRKPLVSFKEDPTPSDNPFSKLYKETIETFDNNEEESSYSYEEINDQTNDNITARLDRIDEKLSEILGMLHTLVVASAGPTSARDGIRDAMVGLREEMIEKIRTEALMTNDRLEAMARLRNEESEKMAKDTSDEVSLNPTSEKLNNLLEGNDSDNDLSLEDF

SEQ ID NO: 11069 - protein, 241 aa, Artificial Sequence
  derived and/or modified protein sequence (wt) from HRSV__AHW81176.1__P
MEKFAPEFHGEDANNRATKFLESIKGKFTSPKDPKKKDSIISVNSIDIEVTKESPITSNSTIINPTNETDDTAGNKPNYQRKPLVSFKDDPTPSDNPFSKLYKETIETFDNNEEESSYSYEEINDQTNDNITARLDRIDEKLSEILGMLHTLVVASAGPTSARDGIRDAMVGLREEMIEKIRTEALMTNDRLEAMARLRNEESEKMAKDTSDEVSLNPTSEKLNSLLEGNDSDNDLSLEDF

SEQ ID NO: 11070 - protein, 241 aa, Artificial Sequence
  derived and/or modified protein sequence (wt) from HRSV__AHW81306.1__P
MEKFAPEFHGEDANNRATKFLESIKGKFTSPKDPKKKDSIISVNSIDIEVTKESPITSNSTIINSTNETDDTAGNKPNYQRKPLVSFKEDPTPSDNPFSKLYKETIETFDNNEEESSYSYEEINDQTNDNITARLDRIDEKLSEILGMLHTLVVASAGPTSARDGIRDAMVGLREEMIEKIRTEALMTNDRLEAMARLRNEESEKMAKDTSDEVSLNPTSEKLNNLLEGNDSDNDLSLEDF

SEQ ID NO: 11071 - protein, 241 aa, Artificial Sequence
  derived and/or modified protein sequence (wt) from HRSV__AHW81436.1__P
MEKFAPEFHGEDANNRATKFLESIKGKFTSPKDPKKKDSIISVNSIDIEVTKESPITSNSTIINQINETDDTVGNKPNYQRKPLVSFKEDPTPSDNPFSKLYKETIETFDNNEEESSYSYEEINDQTNDNITARLDRIDEKLSEILGMLHTLVVASAGPTSARDGIRDAMVGLREEMIEKIRTEALMTNDRLEAMARLRNEESEKMAKDTSDEVSLNPTSEKLNNLLEGNDSDNDLSLEDF

SEQ ID NO: 11072 - protein, 241 aa, Artificial Sequence
  derived and/or modified protein sequence (wt) from HRSV__AHX56983.1__P
MEKFAPEFHGEDANNKATKFLESIKGKFASSKDPKKKDSIISVNSIDIEVTKESPITSGTNIVNPTSEADSTPETKANYPRKPLVSFKEDLTPSDNPFSKLYKETIETFDNNEEESSYSYEEINDQTNDNITVRLDRIDEKLSEILGMLHTLVVASAGPTSARDGIRDAMVGLREEMIEKIRAEALMTNDRLEAMARLRNEESEKMAKDTSDEVSLNPTSKKLSDLLEDNDSDNDLSLDDF

SEQ ID NO: 11073 - protein, 241 aa, Artificial Sequence
  derived and/or modified protein sequence (wt) from HRSV__AHX57027.1__P
MEKFAPEFHGEDANNRATKFLESIKGKFTSPKDPKKKDSIISVNSIDIEVTKESPITSSSTIINPINETDDTVGNKPNYQRKPLVSFKEDPTPSDNPFSKLYKETIETFDNNEEESSYSYEEINDQTNDNITARLDRIDEKLSEILGMLHTLVVASAGPTSARDGIRDAMVGLREEMIEKIRTEALMTNDRLEAMARLRNEESEKMAKDTSDEVSLNPTSEKLNNLLEGNDSDNDLSLEDF

SEQ ID NO: 11074 - protein, 241 aa, Artificial Sequence
  derived and/or modified protein sequence (wt) from HRSV__AHX57137.1__P
MEKFAPEFHGEDANNRATKFLESIKGKFTSPKDPKKKDSIISVNSIDIEVTKESPITSNSTIINPINETDDTVGNKPNYQRKPLVSFKEDPMPSDNPFSKLYKETIETFDNNEEESSYSYEEINDQTNDNITARLDRIDEKLSEILGMLHTLVVASAGPTSARDGIRDAMVGLREEMIEKIRTEALMTNDRLEAMARLRNEESEKMAKDTSDEVSLNPTSEKLNNLLEGNDSDNDLSLEDF

SEQ ID NO: 11075 - protein, 241 aa, Artificial Sequence
  derived and/or modified protein sequence (wt) from HRSV__AHX57500.1__P
MEKFAPEFHGEDANNRATKFLESIKGKFTSPKDPKKKDSIISVNSIDIEVTKESPITSNSTIINPTNETDDTVGNKPNYQRKPLVSFKEDLTPSDNPFSKLYKETIETFDNNEEESSYSYEEINDQTNDNITARLDRIDEKLSEILGMLHTLVVASAGPTSARDGIRDAMVGLREEMIEKIRTEALMTNDRLEAMARLRNEESEKMAKDTSDEVSLNPTSEKLNNLLEGNDSDNDLSLEDF

SEQ ID NO: 11076 - protein, 241 aa, Artificial Sequence
  derived and/or modified protein sequence (wt) from HRSV__AHX57511.1__P
MEKFAPEFHGEDANNKATKFLESIKGKFASSKDPKKKDSIISVNSIDIEVTKESPITSGTNIVNPTSEADSTPETKTNYPRKPLVSFKEDLTPSDNPFSKLYKETIETFDNNEEESSYSYEEINDQTNDNITVRLDRIDEKLSEILGMLHTLVVASAGPTSARDGIRDAMVGLREEMIEKIRAEALMTNDRLEAMARLRNEESEKMAKDTSDEVSLNPTSKKLSDLLEDNDSDNDLSLDDF

SEQ ID NO: 11077 - protein, 241 aa, Artificial Sequence
  derived and/or modified protein sequence (wt) from HRSV__AHY21172.1__P
MEKFAPEFHGEDANNRATKFLESIKGKFTSPKDPKKKDSIISVNSIDIEVTKESPITSNSTIINPTNETDDIVGNKPNYQRKPLVSFKEDPTPSDNPFSKLYKETIETFDNNEEESSYSYEEINDQTNDNITARLDRIDEKLSEILGMLHTLVVASAGPTSARDGIRDAMVGLREEMIEKIRTEALMTNDRLEAMARLRNEESEKMAKDTSDEVSLNPTSEKLNNLLEGNDSDNDLSLEDF

SEQ ID NO: 11078 - protein, 241 aa, Artificial Sequence
  derived and/or modified protein sequence (wt) from HRSV__AHY21217.1__P
MEKFAPEFHGEDANNRATKFLESIKGKFTSPKDPKKKDSIISVNSIDIEVTKESPITSNSTIINPTNETDDTVGNKPNYQRKPLVSFKEDPTPSDNPFSKLYKETIETFDNNEEESSYSYEEINDQTNDNITARLDRIDEKLSEILGMLHTLVVASAGPTSARDGIRDAMVGLREEMIEKIRTEALMTNDRLEAMARLRNEESEKMAKDTSDEVSLNPTSKKLNNLLEGNDSDNDLSLEDF

SEQ ID NO: 11079 - protein, 241 aa, Artificial Sequence
  derived and/or modified protein sequence (wt) from HRSV__AHY21228.1__P
MEKFAPEFHGEDANNKATKFLESIKGKFASSKDPKKKDSIISVNSIDIEVTKESPITSGTNIINSTSEADSTPETKANYPRKPLVSFKEDLTPSDNPFSKLYKETIETFDNNEEESSYSYEEINDQTNDNITARLDRIDEKLSEILGMLHTLVVASAGPTSARDGIRDAMVGLREEMIEKIRAEALMTNDRLEAMARLRNEESEKMAKDTSDEVSLNPTSKKLSDLLEDNDSDNDLSLDDF

SEQ ID NO: 11080 - protein, 241 aa, Artificial Sequence
  derived and/or modified protein sequence (wt) from HRSV__AHY21261.1__P
MEKFAPEFHGEDANNRATKFLESIKGKFTSPKDPKKKDSIISVNSIDIEVTKESPITSNSTIINPTDETDDTVGNKPNYQRKPLVSFKEDPTPSDNPFSKLYKETIETFDNNEEESSYSYEEINDQTNDNITARLDRIDEKLSEILGMLHTLVVASAGPTSARDGIRDAMVGLREEMIEKIRTEALMTNDRLEAMARLRNEESEKMAKDTSDEVSLNPTSEKLNNLLEGNDSDNDLSLEDF

SEQ ID NO: 11081 - protein, 241 aa, Artificial Sequence
  derived and/or modified protein sequence (wt) from HRSV__AHY21327.1__P
MEKFAPEFHGEDANNKATKFLESIKGKFASSKDPKKKDSIISVNSIDIEVTKESPITSGTNIINPISEADSTPEAKANYPRKPLVSFKEDLTPSDNPFSKLYKETIETFDNNEEESSYSYEEINDQTNDNITARLDRIDEKLSEILGMLHTLVVASAGPTSARDGIRDAMVGLREEMIEKIRAEALMTNDRLEAMARLRNEESEKMAKDTSDEVSLNPTSKKLSDLLEDNDSDNDLSLDDF

SEQ ID NO: 11082 - protein, 241 aa, Artificial Sequence
  derived and/or modified protein sequence (wt) from HRSV__AHY21371.1__P
MEKFAPEFHGEDANNRATKFLESIKGKFTSPKDPKKKDSIISVNSIDIEVTKESPITSNSTIINPTNETDDTVGNKPNYQRKPLVSFKEDPTPSDNPFSKLYKDTIETFDNNEEESSYSYEEINDQTNDNITARLDRIDEKLSEILGMLHTLVVASAGPTSARDGIRDAMVGLREEMIEKIRTEALMTNDRLEAMARLRNEESEKMAKDTSDEVSLNPTSEKLNNLLEGNDSDNDLSLEDF

SEQ ID NO: 11083 - protein, 241 aa, Artificial Sequence
  derived and/or modified protein sequence (wt) from HRSV__AHY21382.1__P
MEKFAPEFHGEDANNKATKFLESIKGKFASSKDPKKKDSIISVNSIDIEVTKESPITSGTNTINPTSEADSTPETKANYPRKPLVSFKEDLTPSDNPFSKLYKETIETFDNNEEESSYSYEEINDQTNDNITARLDRIDEKLSEILGMLHTLVVASAGPTSARDGIRDAMVGLREEMIEKIRAEALMTNDRLEAMARLRNEESEKMAKDTSDEVSLNPTSKKLSDLLEDNDSDNDLSLDDF

SEQ ID NO: 11084 - protein, 241 aa, Artificial Sequence
  derived and/or modified protein sequence (wt) from HRSV__AHY21393.1__P
MEKFAPEFHGEDANNKATKFLESIKGKFASSKDPKKKDSIISVNSIDIEVTKESPITSGTNIINPINEADNTPEAKANYPRKPLVSFKEDLTPSDNPFSKLYKETIETFDNNEEESSYSYEEINDQTNDNITARLDRIDEKLSEILGMLHTLVVASAGPTSARDGIRDAMVGLREEMIEKIRAEALMTNDRLEAMARLRNEESEKMAKDTSDEVSLNPTSKKLSDLLEDNDSDNDLSLDDF

SEQ ID NO: 11085 - protein, 241 aa, Artificial Sequence
  derived and/or modified protein sequence (wt) from HRSV__AHY21426.1__P
MEKFAPEFHGEDANNRATKFLESIKGKFTSPKDPKKKDSIISVNSIDIEVTKESPITSNSTIINPTNETDDTAGNKHNYQRKPLVSFKEDPTPSDNPFSKLYKETIETFDNNEEESSYSYEEINDQTNDNITARLDRIDEKLSEILGMLHTLVVASAGPTSARDGIRDAMVGLREEMIEKIRTEALMTNDRLEAMARLRNEESEKMAKDTSDEVSLNPTSEKLNNLLEGNDSDNDLSLEDF

SEQ ID NO: 11086 - protein, 241 aa, Artificial Sequence
  derived and/or modified protein sequence (wt) from HRSV__AHY21448.1__P
MEKFAPEFHGEDANNRATKFLESIKGKFTSPKDPKKKDSIISVNSIDIEVSKESPITSNSTIINPTNETDDTAGNKPNYQRKPLVSFKEDPTPSDNPFSKLYKETIETFDNNEEESSYSYEEINDQTNDNITARLDRIDEKLSEILGMLHTLVVASAGPTSARDGIRDAMVGLREEMIEKIRTEALMTNDRLEAMARLRNEESEKMAKDTSDEVSLNPTSEKLNNLLEGNDSDNDLSLEDF

SEQ ID NO: 11087 - protein, 241 aa, Artificial Sequence
  derived and/or modified protein sequence (wt) from HRSV__AHY21459.1__P
MEKFAPEFHGEDANNRATKFLESIKGKFTSPKDPKKKDSIISVNSIDIEVTKESPITSNSTIINPTNETDDTVGSKPNYQRKPLVSFKEDPTPSDNPFSKLYKETIETFDNNEEESSYSYEEINDQTNDNITARLDRIDEKLSEILGMLHTLVVASAGPTSARDGIRDAMVGLREEMIEKIRTEALMTNDRLEAMARLRNEESEKMAKDTSDEVSLNPTSEKLNNLLEGNDSDNDLSLEDF

SEQ ID NO: 11088 - protein, 241 aa, Artificial Sequence
  derived and/or modified protein sequence (wt) from HRSV__AIA62970.1__P
MEKFAPEFHGEDANNRATKFLESIKGKFTSPKDPKKKDSIISVNSTDIEVTKESPITSNSTIINPTNETDDTAGNKPNYQRKPLVSFKEDPTPSDNPFSKLYKETIETFDNNEEESSYSYEEINDQTNDNITARLDRIDEKLSEILGMLHTLVVASAGPTSARDGIRDAMVGLREEMIEKIRTEALMTNDRLEAMARLRNEESEKMAKDTSDEVSLNPTSEKLNNLLEGNDSDNDLSLEDF

SEQ ID NO: 11089 - protein, 241 aa, Artificial Sequence
  derived and/or modified protein sequence (wt) from HRSV__AIA63540.1__P
MEKFAPEFHGEDANNRATKFLESIKGKFTSPKDPKKKDSIISVNSIDIEVTKESPITSNSTIINPTNETDDTAGNKPNYQRKPLVSFKEDPTPSDNPFSKLYKETIETFDNNEEESSYSYEEINDQTNDNITARLDRIDEKLSEILGMLHTLVVASAGPTSARDGIRDAMVGLRVEMIEKIRTEALMTNDRLEAMARLRNEESEKMAKDTSDEVSLNPTSEKLNNLLEGNDSDNDLSLEDF

SEQ ID NO: 11090 - protein, 241 aa, Artificial Sequence
  derived and/or modified protein sequence (wt) from HRSV__AIZ95669.1__P
MEKFAPEFHGEDANNKATKFLESIKGKFASSKDPKKKDSIISVNSIDIEVTKESPITSGTNIINPTSEADSTSETKANYPRKPLVSFKEDLTPSDNPFSKLYKETIETFDNNEEESSYSYEEINDQINDNITARLDRIDEKLSEILGMLHTLVVASAGPTSARDGIRDAMVGLREEMIEKIRAEALMTNDRLEAMARLRNEESEKMAKDTSDEVSLNPTSKKLSDLLEDNDSDNDLSLDDF

SEQ ID NO: 11091 - protein, 241 aa, Artificial Sequence
  derived and/or modified protein sequence (wt) from HRSV__AIZ95933.1__P
MEKFAPEFHGEDANNRATKFLESIKGKFTSPKDPKKKDSIISVNSIDIEVTKESPITSNSTIINPTNETDDTVENKPNYQRKPLVSFKEDPTPSDNPFSKLYKETIETFDNNEEESSYSYEEINDQTNDNITARLDRIDEKLSEILGMLHTLVVASAGPTSARDGIRDAMVGLREEMIEKIRTEALMTNDRLEAMARLRNEESEKMAKDTSDEVSLNPTSEKLNNLLEGNDSDNDLSLEDF

SEQ ID NO: 11092 - protein, 241 aa, Artificial Sequence
  derived and/or modified protein sequence (wt) from HRSV__AJF44572.1__P
MEKFAPEFHGEDANNRATKFLESIKGKFTSPKDPKKKDSIISVNSIDIEVTKESPITSNSTIINPINETDDTLGNKPNYQRKPLVSFKEDPTPSDNPFSKLYKETIETFDNNEEESSYSYEEINDQTNDNITARLDRIDEKLSEILGMLHTLVVASAGPTSARDGIRDAMVGLREEMIEKIRTEALMTNDRLEAMARLRNEESEKMAKDTSDEVSLNPTSEKLNNLLEGNDSDNDLSLEDF

SEQ ID NO: 11093 - protein, 241 aa, Artificial Sequence
  derived and/or modified protein sequence (wt) from HRSV__AJF44634.1__P
MEKFAPEFHGEDANNKATKFLESIKGKFASTKDPKKKDSIISVNSIDIEVTKESPITSNSTIINPTNETDDTAGNKPNYQRKPLVSFKEDPTPSDNPFSKLYKETIETFDNNEEESSYSYEEINDQTNDNITARLDRIDEKLSEILGMLHTLVVASAGPTSARDGIRDDMVGLREEMIEKIRTEALMTNDRLEAMARLRNEESEKMAKDTSDEVSLNPTSEKLNNLLEGNDSDNDLSLEDF

SEQ ID NO: 11094 - protein, 241 aa, Artificial Sequence
  derived and/or modified protein sequence (wt) from HRSV__AJF44639.1__P
MEKFAPEFHGEDANNKATKFLESIKGKFASSKDPKKKDSIISVNSIDIEVTKESPITSGTNIINPTSEADSTPETKANYPRKPLVSFKEDLTPSDNPFSKLYKETIETFDNNEEESSYSYEEINDQTNDNITARLDRIDEKLSEVLGMLHTLVVASAGPTSARDGIRDAMVGLREEMIEKIRAEALMTNDRLEAMARLRNEESEKMAKDTSDEVSLNPTSKKLSDLLEDNDSDNDLSLDDF

SEQ ID NO: 11095 - protein, 241 aa, Artificial Sequence
  derived and/or modified protein sequence (wt) from HRSV__AJF44657.1__P
MEKFAPEFHGEDANNKATKFLESIKGKFASSKDPKKKDSIISVNSIDIEITKESPITSGTNIINPTSEADSTPETKANYPRKPLVSFKEDLTPSDNPFSKLYKETIETFDNNEEESSYSYEEINDQTNDNITARLDRIDEKLSEILGMLHTLVVASAGPTSARDGIRDAMVGLREEMIEKIRAEALMTNDRLEAMARLRNEESEKMAKDTSDEVSLNPTSKKLSDLLEDNDSDNDLSLDDF

SEQ ID NO: 11096 - protein, 241 aa, Artificial Sequence
  derived and/or modified protein sequence (wt) from HRSV__AJF44672.1__P
MEKFAPEFHGEDANNRATKFLESIKGKFTSPKDPKKKDSIISVNSIDIEVTKESPITSNSTIISPINETDDTVGNKPNYQRKPLVSFKEDPTPSDNPFSKLYKETIETFDNNEEESSYSYEEINDQTNDNITARLDRIDEKLSEILGMLHTLVVASAGPTSARDGIRDAMVGLREEMIEKIRTEALMTNDRLEAMARLRNEESEKMAKDTSDEVSLNPTSEKLNNLLEGNDSDNDLSLEDF

SEQ ID NO: 11097 - protein, 241 aa, Artificial Sequence
  derived and/or modified protein sequence (wt) from HRSV__AJF44699.1__P
MEKFAPEFHGEDANNKATKFLESIKGKFASSKDPKKKDSIISVNSIDIEVTKESPITSGTNIINPTSEADSAPETKANYPRKPLVSFKEDLTPSDNPFSKLYKETIETFDNNEEESSYSYEEINDQTNDNITARLDRIDEKLSEILGMLHTLVVASAGPTSARDGIRDAMVGLREEMIEKIRAEALMTNDRLEAMARLRNEESEKMAKDTSDEVSLNPTSKKLSDLLEDNDSDNDLSLDDF

SEQ ID NO: 11098 - protein, 241 aa, Artificial Sequence
  derived and/or modified protein sequence (wt) from HRSV__AJF44818.1__P
MEKFAPEFHGEDANNKATKFLESIKGKFASSKDPKKKDSIISVNSIDIEVTKESPITSGTNIINPTSEADSTPETKANYPRKPLVSFKEDLTPSDNPFSKLYKETIETFDNNEEESSYSYEEINDQTNDNITARLDRIDEKLSEILGMLHTLVVASAGPTSARDGIRDAMVGLREEMIEKIRAEALMTNDRLEAMARLRNEESEKMAKDTSDEVSLNPTSKKLSNLLEDNDSDNDLSLDDF

SEQ ID NO: 11099 - protein, 241 aa, Artificial Sequence
  derived and/or modified protein sequence (wt) from HRSV__AJF44832.1__P
MEKFAPEFHGEDANNKATKFLESIKGKFTSTKDPKKKDSIISVNSIDIEVTKESPITSNSTIINPTNETDDTAGNKPNYQRKPLVNFKEDPTPSDNPFSKLYKETIETFDNNEEESSYSYEEINDQTNDNITARLDRIDEKLSEILGMLHTLVVASAGPTSARDGIRDAMVGLREEMIEKIRTEALMTNDRLEAMARLRNEESEKMAKDTSDEVSLNPTSEKLNNLLEGNDSDNDLSLEDF

SEQ ID NO: 11100 - protein, 241 aa, Artificial Sequence
  derived and/or modified protein sequence (wt) from HRSV__AJZ69733.1__P
MEKFAPEFHGEDANNKATKFLESIKGKFASSKDPKKKDSIISVNSIDIEVTKESPITSGTNIINPTSEADSTPETKANYPRKPLVSFKEDLTPSDNPFSKLYKETIETFDNNEEESSYSYEEINDQTNDNITARLDRIDEKLSEILGMLHTLVVASAGPTSARDGIRDAMVGLREEMIEKIRAEALMTNDRLEAMARLRNEESEKMVKDTSDEVSLNPTSKKLSDLLEDNDSDNDLSLDDF

SEQ ID NO: 11101 - protein, 241 aa, Artificial Sequence
  derived and/or modified protein sequence (wt) from HRSV__AJZ69931.1__P
MEKFAPEFHGEDANNRATKFLESIKGKFTSPKDPKKKDSIISVNSIDIEVTKESPIISNSTIINPINETDDTVGNKPNYQRKPLVSFKEDPTPSDNPFSKLYKETIETFDNNEEESSYSYEEINDQTNDNITARLDRIDEKLSEILGMLHTLVVASAGPTSARDGIRDAMVGLREEMIEKIRTEALMTNDRLEAMARLRNEESEKMAKDTSDEVSLNPTSEKLNNLLEGNDSDNDLSLEDF

SEQ ID NO: 11102 - protein, 241 aa, Artificial Sequence
  derived and/or modified protein sequence (wt) from HRSV__AJZ70107.1__P
MEKFAPEFHGEDANNRATKFLESIKGKFTSPKDPKKKDSIISVNSIDIEVTKESPITSNSTIINPINETDDTVGNKPNYQRKPLVSFKEDPTPSDNPFSKLYKETIETFDNNEEESSYSYEEINDQTNDNITARLDRIDEKLSEILGMLHTLVVASAGPTSARDGIRDAMVGLREEMIEKIRTEALMTNDKLEAMARLRNEESEKMAKDTSDEVSLNPTSEKLNNLLEGNDSDNDLSLEDF

SEQ ID NO: 11103 - protein, 241 aa, Artificial Sequence
  derived and/or modified protein sequence (wt) from HRSV__AKS26283.1__P
MEKFAPEFHGEDANNRATKFLESIKGKFTSPKDPKKKDSIISVNSIDIEVTKESPITSNSTIINPINETDDTVGNKPNYQRKPLVSFKEDPTPSDNPFSKLYKETIETFDNNEEESSYSYEEINDQTNDNITARLDRIDEKLSEILGMLHTLVVASAGPTSARDGIRDAMVGLREEMIEKIRTEALMTNDRLEAMARLGNEESEKMAKDTSDEVSLNPTSEKLNNLLEGNDSDNDLSLEDF

SEQ ID NO: 11104 - protein, 241 aa, Artificial Sequence
  derived and/or modified protein sequence (wt) from HRSV__AMA66345.1__P
MEKFAPEFHGEDANNRATKFLESIKGKFTSPKDPKKKDSIISVNSVDIEVTKESPITSNSTIINPINETDDTVGNKPNYQRKPLVSFKEDPTPSDNPFSKLYKETIETFDNNEEESSYSYEEINDQTNDNITARLDRIDEKLSEILGMLHTLVVASAGPTSARDGIRDAMVGLREEMIEKIRTEALMTNDRLEAMARLRNEESEKMAKDTSDEVSLNPTSEKLNNLLEGNDSDNDLSLEDF

SEQ ID NO: 11105 - protein, 241 aa, Artificial Sequence
  derived and/or modified protein sequence (wt) from HRSV__AMA66411.1__P
MEKFAPEFHGEDANNKATKFLESIKGKFASSKDPKKKDSIISVNSIDIEVTKESPITSGTNIINPISEADSTPEAKANYSRKPLVSFKEDLTPSDNPFSKLYKETIETFDNNEEESSYSYEEINDQTNDNITARLDRIDEKLSEILGMLHTLVVASAGPTSARDGIRDAMVGLREEMIEKIRAEALMTNDRLEAMARLRNEESEKMAKDTSDEVSLNPTSKKLSDLLEDNDSDNDLSLDDF

SEQ ID NO: 11106 - protein, 241 aa, Artificial Sequence
  derived and/or modified protein sequence (wt) from HRSV__AMA66466.1__P
MEKFAPEFHGEDANNKATKFLESIKGKFASSKDPKKKDSIISVNSIDIEVTKESPITSGTNIINPTSEADSIPETKANYPRKPLVSFKEDLTPSDNPFSKLYKETIETFDNNEEESSYSYEEINDQTNDNITARLDRIDEKLSEILGMLHTLVVASAGPTSARDGIRDAMVGLREEMIEKIRAEALMTNDRLEAMARLRNEESEKMAKDTSDEVPLNPTSKKLSDLLEDNDSDNDLSLDDF

SEQ ID NO: 11107 - protein, 241 aa, Artificial Sequence
  derived and/or modified protein sequence (wt) from HRSV__AMA66477.1__P
MEKFAPEFHGEDANNRATKFLESIKGKFTSPKDPKKKDSIISVNSIDIEVTKESPITSNSTIINPTNETDDTAGNKSNYQRKPLVSFKEDPTPSDNPFSKLYKETIETFDNNEEESSYSYEEINDQTNDNITARLDRIDEKLSEILGMLHTLVVASAGPTSARDGIRDAMVGLREEMIEKIRTEALMTNDRLEAMARLRNEESEKMAKDTSDEVSLNPTSEKLNNLLEGNDSDNDLSLEDF

SEQ ID NO: 11108 - protein, 241 aa, Artificial Sequence
  derived and/or modified protein sequence (wt) from HRSV__AMA66565.1__P
MEKFAPEFHGEDANNKATKFLESIKGKFASSKDPKKKDSIISVNSIDIEVTKESPITSGTNIINPTSEADSTTETKANYPRKPLVSFKEDLTPSDNPFSKLYKETIETFDNNEEESSYSYEEINDQTNDNITARLDRIDEKLSEILGMLHTLVVASAGPTSARDGIRDAMVGLREEMIEKIRAEALMTNDRLEAMARLRNEESEKMAKDTSDEVSLNPTSKKLSDLLEDNDSDNDLSLDDF

SEQ ID NO: 11109 - protein, 241 aa, Artificial Sequence
  derived and/or modified protein sequence (wt) from HRSV__AMA66576.1__P
MEKFAPEFHGEDANNRATKFLESIKGKFASPKDPKKKDSIISVNSIDIEVTKESPITSNSTIINPTNETDDTAGNKPNYQRKPLVSFKEDPTPSDNPFSKLYKETIETFDNNEEESSYSYEEINDQTNDNITARLDRIDEKLSEILGMLHTLVVASAGPTSARDGIRDAMVGLREEMIEKIRTEALMTNDRLEAMARLRNEESEKMAKDTSDEVSLNPTSEKLNNLLEGNDSDNDLSLEDF

SEQ ID NO: 11110 - protein, 241 aa, Artificial Sequence
  derived and/or modified protein sequence (wt) from HRSV__AMA66609.1__P
MEKFAPEFHGEDANNKATKFLESIKGKFASSKDPKKKDSIISVNSIDIEVTKESPITSGTNIINPISEADNTPEAKANYPRKPLVSFKEDLTPSDNPFSKLYKETIETFDNNEEESSYSYEEINDQTNDNITARLDRIDEKLSEILGMLHTLVVASAGPTSARDGIRDAMVGLREEMIEKIRAEALMTNDRLEAMARLRNEESEKMAKDTSDEVSLNPTSKKLSDLLEDNDSDNDLSLDDF

SEQ ID NO: 11111 - protein, 241 aa, Artificial Sequence
  derived and/or modified protein sequence (wt) from HRSV__AMA66983.1__P
MEKFAPEFHGEDANNRATKFLESIKGKFTSPKDPKKKDSIISVNSIDIEVTKESPITSNSTIINPANETDDTVGNKPNYQRKPLVSFKEDPTPSDNPFSKLYKETIETFDNNEEESSYSYEEINDQTNDNITARLDRIDEKLSEILGMLHTLVVASAGPTSARDGIRDAMVGLREEMIEKIRTEALMTNDRLEAMARLRNEESEKMAKDTSDEVSLNPTSEKLNNLLEGNDSDNDLSLEDF

SEQ ID NO: 11112 - protein, 241 aa, Artificial Sequence
  derived and/or modified protein sequence (wt) from HRSV__AMA66994.1__P
MEKFAPEFHGEDANNRATKFLESIKGKFTSPKDPKKKDSIISVNSIDIEVTKESPITSNSTTINPTNETDDTVGNKPNYQRKPLVSFKEDPTPSDNPFSKLYKETIETFDNNEEESSYSYEEINDQTNDNITARLDRIDEKLSEILGMLHTLVVASAGPTSARDGIRDAMVGLREEMIEKIRTEALMTNDRLEAMARLRNEESEKMAKDTSDEVSLNPTSEKLNNLLEGNDSDNDLSLEDF

SEQ ID NO: 11113 - protein, 241 aa, Artificial Sequence
  derived and/or modified protein sequence (wt) from HRSV__AMA67104.1__P
MEKFAPEFHGEDANNRATKFLESIKGKFTSPKDPKKKDSIISVNSIDIEVTKESPITSNSTIINPTNETDDTAGNKPNYQRKPLVSFKEDPTPSDNPFSKLYKETIETFDNNEEESSYSYEEINDQTNDNITTRLDRIDEKLSEILGMLHTLVVASAGPTSARDGIRDAMVGLREEMIEKIRTEALMTNDRLEAMARLRNEESEKMAKDTSDEVSLNPTSEKLNNLLEGNDSDNDLSLEDF

SEQ ID NO: 11114 - protein, 241 aa, Artificial Sequence
  derived and/or modified protein sequence (wt) from HRSV__AMA67236.1__P
MEKFAPEFHGEDANNKATKFLESIKGKFASSKDPKKKDSIISVNSIDIEVTKESPITSGTNIINPTSEADSTPETRANYPRKPLVSFKEDLTPSDNPFSKLYKETIETFDNNEEESSYSYEEINDQTNDNITARLDRIDEKLSEILGMLHTLVVASAGPTSARDGIRDAMVGLREEMIEKIRAEALMTNDRLEAMARLRNEESEKMAKDTSDEVSLNPTSKKLSDLLEDNDSDNDLSLDDF

SEQ ID NO: 11115 - protein, 241 aa, Artificial Sequence
  derived and/or modified protein sequence (wt) from HRSV__AMA67258.1__P
MEKFAPEFHGEDANNRATKFLESIKGKFTSPKDPKKKDSIISVNSIDIEVSKESPITSNSTIINPTNETDDTARNKPNYQRKPLVSFKEDPTPSDNPFSKLYKETIETFDNNEEESSYSYEEINDQTNDNITARLDRIDEKLSEILGMLHTLVVASAGPTSARDGIRDAMVGLREEMIEKIRTEALMTNDRLEAMARLRNEESEKMAKDTSDEVSLNPTSEKLNNLLEGNDSDNDLSLEDF

SEQ ID NO: 11116 - protein, 241 aa, Artificial Sequence
  derived and/or modified protein sequence (wt) from HRSV__AMA67280.1__P
MEKFAPEFHGEDANNRATKFLESIKGKFTSPKDPKKKDSIISVNSIDIEVTKESPITSNSTIINPTNETDDTAGNKPNYQRKPLISFKEDPTPSDNPFSKLYKETIETFDNNEEESSYSYEEINDQTNDNITARLDRIDEKLSEILGMLHTLVVASAGPTSARDGIRDAMVGLREEMIEKIRTEALMTNDRLEAMARLRNEESEKMAKDTSDEVSLNPTSEKLNNLLEGNDSDNDLSLEDF

SEQ ID NO: 11117 - protein, 241 aa, Artificial Sequence
  derived and/or modified protein sequence (wt) from HRSV__AMA67313.1__P
MEKFAPEFHGEDANNKATKFLESIKGKFASSKDPKKKDSIISVNSIDIEVTKESPITSGTNIINPTSEADSTPETKANYSRKPLVSFKEDLTPSDNPFSKLYKETIETFDNNEEESSYSYEEINDQTNDNITARLDRIDEKLSEILGMLHTLVVASAGPTSARDGIRDAMVGLREEMIEKIRAEALMTNDRLEAMARLRNEESEKMAKDTSDEVSLNPTSKKLSDLLEDNDSDNDLSLDDF

SEQ ID NO: 11118 - protein, 241 aa, Artificial Sequence
  derived and/or modified protein sequence (wt) from HRSV__AMN91249.1__P
MEKFAPEFHGEDANNRATKFLESIKGKFTSPKDPKKKDSIISVNSIDIEVTKESPITSNSTIINPINETDDTVGNKPNYQRKPLVSFKEDPTPSDNPFSKLYKETIETFDNNEEESSYSYEEINDQTNDNITARLDRIDEKLSEILGMLHTLVVASAGPTSARDGIRDAMVGLREEMIEKIRTEALMTNDRLEAMARLRNEESEKMAKDTSDEVSLNPTSEKLNNLLEGIDSDNDLSLEDF

SEQ ID NO: 11119 - protein, 241 aa, Artificial Sequence
  derived and/or modified protein sequence (wt) from HRSV__AMN91381.1__P
MEKFAPEFHGEDANNKATKFLESIKGKFASSKDPKKKDSIISVNSIDIEVTKESPITSGTNIVNPTSEADSTPETKANYPRKPLVSFKEDLTPSDNPFSKLYKETIETFDNNEEESSYSYEEINDQTNDNITARLDRIDEKLSEILGMLHTLVVASAGPTSARDGIRDAMVGLREEMIEKIRAEALMTNDRLEAMARLRNEESEKMAKDTSDEVSLNPTSKKLSDLLEDNDSDNDLSLDDF

SEQ ID NO: 11120 - protein, 241 aa, Artificial Sequence
  derived and/or modified protein sequence (wt) from HRSV__AMN91403.1__P
MEKFAPEFHGEDANNKATKFLESIKGKFASSKDPKKKDSIISVNSIDIEVTKESPITSGTNTINPTSEADSTPETKANYPRKPLVSFKEDLTPSDNPFSKLYKETIETFDNNEEESSYSYDEINDQTNDNITARLDRIDEKLSEILGMLHTLVVASAGPTSARDGIRDAMVGLREEMIEKIRAEALMTNDRLEAMARLRNEESEKMAKDTSDEVSLNPTSKKLSDLLEDNDSDNDLSLDDF

SEQ ID NO: 11121 - protein, 241 aa, Artificial Sequence
  derived and/or modified protein sequence (wt) from HRSV__AMT77596.1__P
MEKFAPEFYGEDANNRATKFLESIKGKFTSPKDPKKKDSIISVNSIDIEVTKESPITSNSTIINPTNETDDTTGNKPNYQRKPLVSFKEDPTPSDNPFSKLYKETIETFDNNEEESSYSYEEINDQTNDNITARLDRIDEKLSEILGMLHTLVVASAGPTSARDGIRDAMVGLREEMIEKIRTEALMTNDRLEAMARLRNEESEKMAKDTSDEVSLNPTSEKLNNLLEGNDSDNDLSLEDF

SEQ ID NO: 11122 - protein, 241 aa, Artificial Sequence
  derived and/or modified protein sequence (wt) from HRSV__AMT77805.1__P
MEKFAPEFHGEDANNRATKFLESIKGKFTSPKDLKKKDSIISVNSIDIEVTKESPITSNSTIINPINETDDTVGNKPNYQRKPLVSFKEDPTPSDNPFSKLYKETIETFDNNEEESSYSYEEINDQTNDNITARLDRIDEKLSEILGMLHTLVVASAGPTSARDGIRDAMVGLREEMIEKIRTEALMTNDRLEAMARLRNEESEKMAKDTSDEVSLNPTSEKLNNLLEGNDSDNDLSLEDF

SEQ ID NO: 11123 - protein, 241 aa, Artificial Sequence
  derived and/or modified protein sequence (wt) from HRSV__AMT77838.1__P
MEKFAPEFHGEDANNRATKFLESIKGKFTSPRDPKKKDSIISVNSIDIEVTKESPITSNSTIINPINETDDTVGNKPNYQRKPLVSFKEDPTPSDNPFSKLYKETIETFDNNEEESSYSYEEINDQTNDNITARLDRIDEKLSEILGMLHTLVVASAGPTSARDGIRDAMVGLREEMIEKIRTEALMTNDRLEAMARLRNEESEKMAKDTSDEVSLNPTSEKLNNLLEGNDSDNDLSLEDF

SEQ ID NO: 11124 - protein, 241 aa, Artificial Sequence
  derived and/or modified protein sequence (wt) from HRSV__AMT78080.1__P
MEKFAPEFHGEDASNRATKFLESIKGKFTSPKDPKKKDSIISVNSIDIEVTKESPITSNSTIINPINETDDTVGNKPNYQRKPLVSFKEDPTPSDNPFSKLYKETIETFDNNEEESSYSYEEINDQTNDNITARLDRIDEKLSEILGMLHTLVVASAGPTSARDGIRDAMVGLREEMIEKIRTEALMTNDRLEAMARLRNEESEKMAKDTSDEVSLNPTSEKLNNLLEGNDSDNDLSLEDF

SEQ ID NO: 11125 - protein, 241 aa, Artificial Sequence
  derived and/or modified protein sequence (wt) from HRSV__AMT78190.1__P
MEKFAPEFHGEDANNKATKFLESIKGKFASSKDPKKKDSIISVNSIDIEVTKESPITSGTNTINPTSEADSTPETKANYPRKPLVSFKEDLTPSDNPFSKLYKETIETFDNNEEESSYSYEEINDQTNDNITARLDRIDEKLSEILGMLHTLVVASAGPTSARDGIRDAMVGLREEMIEKIRAEALMTNDRLEAMARLRNEESEKMAKDTSDEVSLNPASKKLSDLLEDNDSDNDLSLDDF

SEQ ID NO: 11126 - protein, 241 aa, Artificial Sequence
  derived and/or modified protein sequence (wt) from HRSV__AMT78289.1__P
MEKFAPEFHGEDANNKATKFLESIKGKFASSKDPKKKDSIISVNSIDIEVTKESPITSGTNTINPTSEADSTPETKANYPRKPLVSFKEDLTPSDNPFSKLYKETIETFDNNEEESSYSYEEINDQTNDNITARLDRIDEKLSEILGMLHTLVVASAGPTSARDGIRDAMVGLREEMIEKIRAEALMTNDRLEAMARLRNEESEKMAKATSDEVSLNPTSKKLSDLLEDNDSDNDLSLDDF

SEQ ID NO: 11127 - protein, 241 aa, Artificial Sequence
  derived and/or modified protein sequence (wt) from HRSV__AMT78542.1__P
MEKFAPEFHGEDANNRATKFLESIKGKFTSPKDPKKKDSIISVNSIDIEVTKESPITSNSTIINPINETDDTVGNKPNYQRKPLVSFKEDPTPSDNPFSKLYKETIETFDNNEEESSYSYEEINDQTNDNITARLDRIDEKLSEILGMLHTLVVASAGPTSARDGIRDAMVGLREEMIEKIRTEALMTNDRLEAMARLRNEESEKMAKDTSDEVSLNPTSEKLNNLLDGNDSDNDLSLEDF

SEQ ID NO: 11128 - protein, 241 aa, Artificial Sequence
  derived and/or modified protein sequence (wt) from HRSV__AMT78828.1__P
MEKFAPEFHGEDANNRATKFLESIKGKFTSPKDPKKKDSIISVNSIDIEVTKESPITSNSTIINQINETDDTAGNKPNYQRKPLVSFKEDPTPSDNPFSKLYKETIETFDNNEEESSYSYEEINDQTNDNITARLDRIDEKLSEILGMLHTLVVASAGPTSARDGIRDAMVGLREEMIEKIRTEALMTNDRLEAMARLRNEESEKMAKDTSDEVSLNPTSEKLNNLLEGNDSDNDLSLEDF

SEQ ID NO: 11129 - protein, 241 aa, Artificial Sequence
  derived and/or modified protein sequence (wt) from HRSV__AMT78988.1__P
MEKFAPEFHGEDANNRATKFLESIKGKFTSPKEPKKKDSIISVNSIDIEVTKESPITSNSTTINPINETDDTVGNKPNYQRKPLVSFKEDPTPSDNPFSKLYKETIETFDNNEEESSYSYEEINDQTNDNITARLDRIDEKLSEILGMLHTLVVASAGPTSARDGIRDAMVGLREEMIEKIRTEALMTNDRLEAMARLRNEESEKMAKDTSDEVSLNPTSEKLNNLLEGNDSDNDLSLEDF

SEQ ID NO: 11130 - protein, 241 aa, Artificial Sequence
  derived and/or modified protein sequence (wt) from HRSV__AMT79186.1__P
MEKFAPEFHGEDANNRATKFLESIKGKFTSPKDPKKKDSIISVNSIDIEVTKESPITSNSTIINQINETDDTVGNKPNYQRKPLVSFKEDPTPSDNPFSKLYKETIETFDNNEEESSYSYEEINDQTNDNITARLDRIDEKLSEILGMLHTLVVASAGPTSARDGIRDAMVGLREEMIEKIRTEALMTNDRLEAMARLRNEESEKMAKDTSDKVSLNPTSEKLNNLLEGNDSDNDLSLEDF

SEQ ID NO: 11131 - protein, 241 aa, Artificial Sequence
  derived and/or modified protein sequence (wt) from HRSV__AMT79703.1__P
MEKFAPEFHGEDANNKATKFLESIKGKFASSKDPKKKDSIISVNSIDIEVTKESPITSGTNTINPTSEADSTPETKANYPRKPLVSFKEDPTPSDNPFSKLYKETIETFDNNEEESSYSYEEINDQTNDNITARLDRIDEKLSEILGMLHTLVVASAGPTSARDGIRDAMVGLREEMIEKIRAEALMTNDRLEAMARLRNEESEKMAKDTSDEVSLNPTSKKLSDLLEDNDSDNDLSLDDF

SEQ ID NO: 11132 - protein, 241 aa, Artificial Sequence
  derived and/or modified protein sequence (wt) from HRSV__AMT79934.1__P
MEKFAPEFHGEDANNKATKFLESIKGKFASSKDPKKKDSIISVNSIDIEVTKESPITSGTNTINPTSEADSTPETKANYPRKPLVSFKEDLTLSDNPFSKLYKETIETFDNNEEESSYSYEEINDQTNDNITARLDRIDEKLSEILGMLHTLVVASAGPTSARDGIRDAMVGLREEMIEKIRAEALMTNDRLEAMARLRNEESEKMAKDTSDEVSLNPTSKKLSDLLEDNDSDNDLSLDDF

SEQ ID NO: 11133 - protein, 241 aa, Artificial Sequence
  derived and/or modified protein sequence (wt) from HRSV__ANZ79656.1__P
MEKFAPEFHGEDANNRATKFLESIKGKFTSPKDPKKKDSIISVNSIDIEVTKESPITSNSTIINPTNETDDTVGNKSNYQRKPLVSFKEDPTPSDNPFSKLYKETIETFDNNEEESSYSYEEINDQTNDNITARLDRIDEKLSEILGMLHTLVVASAGPTSARDGIRDAMVGLREEMIEKIRTEALMTNDRLEAMARLRNEESEKMAKDTSDEVSLNPTSEKLNNLLEGNDSDNDLSLEDF

SEQ ID NO: 11134 - protein, 241 aa, Artificial Sequence
  derived and/or modified protein sequence (wt) from HRSV__ANZ79964.1__P
MEKFAPEFHGEDANNKATKFLESIKGKFASSKDPKKKDSIISVNSIDIEVTKESPITSGINTINPTSEADSTPETKTNYPRKPLVSFKEDLTPSDNPFSKLYKETIETFDNNEEESSYSYEEINDQTNDNITARLDRIDEKLSEILGMLHTLVVASAGPTSARDGIRDAMVGLREEMIEKIRAEALMTNDRLEAMARLRNEESEKMAKDTSDEVSLNPTSKKLSDLLEDNDSDNDLSLDDF

SEQ ID NO: 11135 - protein, 241 aa, Artificial Sequence
  derived and/or modified protein sequence (wt) from HRSV__ANZ80151.1__P
MEKFAPEFHGEDANNRATKFLESIKGKFTSPKDPKKKDSIISVNSIDIEVTKESPITSNSTIINPTNETDDTVGNKPNYQRKPLVSFKEDPTPSDNPFSKLYKETIETFDNNEEESSYSYEEINDQTNDNITARLDRIDEKLSEILGMLHTLVVASAGPTSARDGIRDAMVGLREEMIEKIRTEALMTNDRLEAMARLRNEESEKMAKDTSDEVSLNPTSEKLNNLLERNDSDNDLSLEDF

SEQ ID NO: 11136 - protein, 241 aa, Artificial Sequence
  derived and/or modified protein sequence (wt) from HRSV__ANZ80272.1__P
MEKFAPEFHGEDANNKATKFLESIKGKFASSKDPKKKDSIISVNSIDIEVTKESPITSGTNIINPTSEADSTPETKANYPRKPLVSFKEDLTPSDNPFSKLYKETIETFDNNEEESSYSYEEINDQTNDNITARLDRIDEKLSEILGMLHTLVIASAGPTSARDGIRDAMVGLREEMIEKIRAEALMTNDRLEAMARLRNEESEKMAKDTSDEVSLNPTSKKLSDLLEDNDSDNDLSLDDF

SEQ ID NO: 11137 - protein, 241 aa, Artificial Sequence
  derived and/or modified protein sequence (wt) from HRSV__ANZ80305.1__P
MEKFAPEFHGEDANNRATKFLESIKGKFTSPKDPKKKDSIISVNSIDIEVTKESPITSNSTIINPINETDDTVGNKPNYQRKPLVSFKEDPTPSDNPFSKLYKETIETFDNNEEESSYSYEEINDQTNDNITARLDRIDEKLSEILGMLHTLVVASAGPTSARDGIRDAMVGLREELIEKIRTEALMTNDRLEAMARLRNEESEKMAKDTSDEVSLNPTSEKLNNLLEGNDSDNDLSLEDF

SEQ ID NO: 11138 - protein, 241 aa, Artificial Sequence
  derived and/or modified protein sequence (wt) from HRSV__ANZ80404.1__P
MEKFAPEFHGEDANNKATKFLESIKGKFASSKDPKKKDSIISVNSIDIEVTKESPITSGINIINPTSEADSTPETKTNYPRKPLVSFKEDLTPSDNPFSKLYKETIETFDNNEEESSYSYEEINDQTNDNITARLDRIDEKLSEILGMLHTLVVASAGPTSARDGIRDAMVGLREEMIEKIRAEALMTNDRLEAMARLRNEESEKMAKDTSDEVSLNPTSKKLSDLLEDNDSDNDLSLDDF

SEQ ID NO: 11139 - protein, 241 aa, Artificial Sequence
  derived and/or modified protein sequence (wt) from HRSV__AOS48239.1__P
MEKFAPEFHGEDANNKATKFLESIKGKFASSKDPKKKDSIISVNSIDIEVTKESPITSGANIINPTSEADSTPETKANYPRKPLVSFKEDLTPSDNPFSKLYKETIETFDNNEEESSYSYEEINDQTNDNITARLDRIDEKLSEILGMLHTLVVASAGPTSARDGIRDAMVGLREEMIEKIRAEALMTNDRLEAMARLRNEESEKMAKDTSDEVSLNPTSKKLSDLLEDNDSDNDLSLDDF

SEQ ID NO: 11140 - protein, 241 aa, Artificial Sequence
  derived and/or modified protein sequence (wt) from HRSV__AOS48305.1__P
MEKFAPEFHGEDANNRATKFLESIKGKFTSPKDPKKKDSIISVNSIDIEVTKESPITSNSTIINPINETDDTVGNKPSYQRKPLVSFKEDPTPSDNPFSKLYKETIETFDNNEEESSYSYEEINDQTNDNITARLDRIDEKLSEILGMLHTLVVASAGPTSARDGIRDAMVGLREEMIEKIRTEALMTNDRLEAMARLRNEESEKMAKDTSDEVSLNPTSEKLNNLLEGNDSDNDLSLEDF

SEQ ID NO: 11141 - protein, 241 aa, Artificial Sequence
  derived and/or modified protein sequence (wt) from HRSV__AOS48338.1__P
MEKFAPEFHGEDANNKATKFLESIKGKFASSKDPKKKDSIISVNSIDIEVTKESPITSSTNIINPTSEADSTPETKANYPRKPLVSFKEDLTPSDNPFSKLYKETIETFDNNEEESSYSYEEINDQTNDNITARLDRIDEKLSEILGMLHTLVVASAGPTSARDGIRDAMVGLREEMIEKIRAEALMTNDRLEAMARLRNEESEKMAKDTSDEVSLNPTSKKLSDLLEDNDSDNDLSLDDF

SEQ ID NO: 11142 - protein, 241 aa, Artificial Sequence
  derived and/or modified protein sequence (wt) from HRSV__AOS48349.1__P
MEKFAPEFHGEDANNKATKFLESIKGKFASSKDPKKKDSIISVNSIDIEVTKESPITSGTNIINPTSETDSTPETKANYPRKPLVSFKEDLTPSDNPFSKLYKETIETFDNNEEESSYSYEEINDQTNDNITARLDRIDEKLSEILGMLHTLVVASAGPTSARDGIRDAMVGLREEMIEKIRAEALMTNDRLEAMARLRNEESEKMAKDTSDEVSLNPTSKKLSDLLEDNDSDNDLSLDDF

SEQ ID NO: 11143 - protein, 241 aa, Artificial Sequence
  derived and/or modified protein sequence (wt) from HRSV__AOS48448.1__P
MEKFAPEFHGEDANNKATKFLESIKGKFASSKDPKKKDSIISVNSIDIEVTKESPITSGTNIVNPTSEADSTPETKANYPRKPLVSFKEDLTPSDNPFSKLYKETIETFDNNEEESSYSYEEINDQTNDNITARLDRIDEKLSEILGMLHTLVVASAGPTSARDGIRDAMVGLREEMIEKIRAEALMTNDRLEAMARLRNEESEKMAKDTSDEVSLNPTSKKLSDLLKDNDSDNDLSLDDF

SEQ ID NO: 11144 - protein, 241 aa, Artificial Sequence
  derived and/or modified protein sequence (wt) from HRSV__AOS48503.1__P
MEKFAPEFHGEDANNRATKFLESIKGKFTSPKDPKKKDSIISVNSIDIEVTKESPITSSSTIINPINETDDTVGNKPNYQRKPLVSFKEDPTPSDNPFSKLYKETIETFDNNEEESSYSYEEINDQTNDNITARLDRIDEKLSEILGMLHTLVVASAGPTSARDGIRDAMVGLREEMIEKIRTEALMTNDRLEAMARLRNEESEKMAKDTSDEVSLNPTSEKLNNLLEENDSDNDLSLEDF

SEQ ID NO: 11145 - protein, 241 aa, Artificial Sequence
  derived and/or modified protein sequence (wt) from HRSV__AOS48580.1__P
MEKFAPEFHGEDANNKATKFLESIKGKFASSKDPKKKDSIISVNSIDIEVTKESPITSGTNIINPTSEADSTPETKASYPRKPLVSFKEDLTPSDNPFSKLYKETIETFDNNEEESSYSYEEINDQTNDNITARLDRIDEKLSEILGMLHTLVVASAGPTSARDGIRDAMVGLREEMIEKIRAEALMTNDRLEAMARLRNEESEKMAKDTSDEVSLNPTSKKLSDLLEDNDSDNDLSLDDF

SEQ ID NO: 11146 - protein, 241 aa, Artificial Sequence
  derived and/or modified protein sequence (wt) from HRSV__AOS48734.1__P
MEKFAPEFHGEDANNKATKFLESIKGKFASSKDPKKKDSIISVNSIDIEVTKESPITSGTNIINPTSEADSTPETKANYPRKPLVSFKEDLTPSDNPFSKLYKETIETFDNNEEESSYSYEEINDQTNDNITARLDRIDEKLSEILGMLHTLVVASAGPTSARDGIRDAMVGLREEMIEKIRAEALTTNDRLEAMARLRNEESEKMAKDTSDEVSLNPTSKKLSDLLEDNDSDNDLSLDDF

SEQ ID NO: 11147 - protein, 241 aa, Artificial Sequence
  derived and/or modified protein sequence (wt) from HRSV__AOS48789.1__P
MEKFAPEFHGEDANNRATKFLESIKGKFTSPKDPKKKDSIISVNSIDIEVTKESPITSNSTIMNPINETDDTVGNKPNYQRKPLVSFKEDPTPSDNPFSKLYKETIETFDNNEEESSYSYEEINDQTNDNITARLDRIDEKLSEILGMLHTLVVASAGPTSARDGIRDAMVGLREEMIEKIRTEALMTNDRLEAMARLRNEESEKMAKDTSDEVSLNPTSEKLNNLLEGNDSDNDLSLEDF

SEQ ID NO: 11148 - protein, 241 aa, Artificial Sequence
  derived and/or modified protein sequence (wt) from HRSV__AOS48888.1__P
MEKFAPEFHGEDANNKATKFLESIKGKFASSKDPKKKDSIISVNSIDIEVTKESPITSGTNIINPTSEADSTPETKANYPRKPLVSFKEDLTPSDNPFSKLYKETIETFDNNEEESSYSYEEINDQTNDNIAARLDRIDEKLSEILGMLHTLVVASAGPTSARDGIRDAMVGLREEMIEKIRAEALMTNDRLEAMARLRNEESEKMAKDTSDEVSLNPTSKKLSDLLEDNDSDNDLSLDDF

SEQ ID NO: 11149 - protein, 241 aa, Artificial Sequence
  derived and/or modified protein sequence (wt) from HRSV__AOS49009.1__P
MEKFAPEFHGEDANNRATKFLESIKGKFTSPKDPKKKDSIISVNSIDIEVTKGSPITSNSTIINPINETDDTVGNKPNYQRKPLVSFKEDPTPSDNPFSKLYKETIETFDNNEEESSYSYEEINDQTNDNITARLDRIDEKLSEILGMLHTLVVASAGPTSARDGIRDAMVGLREEMIEKIRTEALMTNDRLEAMARLRNEESEKMAKDTSDEVSLNPTSEKLNNLLEGNDSDNDLSLEDF

SEQ ID NO: 11150 - protein, 241 aa, Artificial Sequence
  derived and/or modified protein sequence (wt) from HRSV__AOS49031.1__P
MEKFAPEFHGEDANNKATKFLESIKGKFASSKDPKKKDSIISVNSIDIEVTKESPITSGTNIINPTSEADSTPETKANYPRKPLVSFKEDLTPSDNPFSKLYKETIETFDNNEEESSYSYEEINDQTNDNITARLDRIDEKLSEILGMLHTLVVASAGPTSARDGIRDAMVGLREEMIEKIRAEALMTNDKLEAMARLRNEESEKMAKDTSDEVSLNPTSKKLSDLLEDNDSDNDLSLDDF

SEQ ID NO: 11151 - protein, 241 aa, Artificial Sequence
  derived and/or modified protein sequence (wt) from HRSV__AOS49174.1__P
MEKFAPEFHGEDANNKATKFLESIKGKFASSKDPKKKDSIISVNSIDIEVTKESPITSGTNIINPTSEADSTSETKANYPRKPLVSFKEDLTPSDNPFSKLYKETIETFDNNEEESSYSYEEINDQTNDNITARLDRIDEKLSEILGMLHTLVVASAGPTSARDGIRDAMVGLREEMIEKIRAEALMTNDRLEAMARLRNEESEKMAKDTSDEVSLNPTSKKLSDLLEDNDSDNDLSLDDF

SEQ ID NO: 11152 - protein, 241 aa, Artificial Sequence
  derived and/or modified protein sequence (wt) from HRSV__APW29968.1__P
MEKFAPEFHGEDANNRATKFLESTKGKFTSPKDPKKKDSIISVNSIDIEVTKESPITSNSTIINPTNETDDTAGNKPNYQRKPLVSFKEDPTPSDNPFSKLYKETIETFDNNEEESSYSYEEINDQTNDNITARLDRIDEKLSEILGMLHTLVVASAGPTSARDGIRDAMVGLREEMIEKIRTEALMTNDRLEAMARLRNEESEKMAKDTSDEVSLNPTSEKLNNLLEGNDSDNDLSLEDF

SEQ ID NO: 11153 - protein, 241 aa, Artificial Sequence
  derived and/or modified protein sequence (wt) from HRSV__APW78643.1__P
MDKFAPEFHGEDANNKATKFLESIKGKFASSKDPKKKDSIISVNSIDIEVTKESPITSGTNIINPTGEADSTSETKANYPRKPLVSFKEDLTPSDNPFSKLYKETIETFDNNEEESSYSYEEINDQTNDNITARLDRIDEKLSEILGMLHTLVVASAGPTSARDGIRDAMVGLREEMIEKIRAEALMTNDRLEAMARLRNEESEKMAKDTSDEVSLNPTSKKLSDLLEDNDSDNDLSLDDF

SEQ ID NO: 11154 - protein, 241 aa, Artificial Sequence
  derived and/or modified protein sequence (wt) from HRSV__APW78676.1__P
MEKFAPEFHGEDANNKATKFLESIKGKFASSKDSKKKDSIISVNSIDIEVTKESPITSGTNVVNPTSEADSTPETKANYPRKPLVSFKEDLTPSDNPFSKLYKETIETFDNNEEESSYSYEEINDQTNDNITARLDRIDEKLSEILGMLHTLVVASAGPTSARDGIRDAMVGLREEMIEKIRAEALMTNDRLEAMARLRNEESEKMAKDTSDEVSLNPTSKKLSDLLEDNDSDNDLSLDDF

SEQ ID NO: 11155 - protein, 241 aa, Artificial Sequence
  derived and/or modified protein sequence (wt) from HRSV__APW78698.1__P
MEKFAPEFHGEDANNKATKFLESIKGKFASSKDPKKKDSIISVNSIDIEVTKESPITSGTNIINPTSEADSTPETKANYPRKPLVSFKEDLTQSDNPFSKLYKETIETFDNNEEESSYSYEEINDQTNDNITARLDRIDEKLSEILGMLHTLVVASAGPTSARDGIRDAMVGLREEMIEKIRAEALMTNDRLEAMARLRNEESEKMAKDTSDEVSLNPTSKKLSDLLEDNDSDNDLSLDDF

SEQ ID NO: 11156 - protein, 241 aa, Artificial Sequence
  derived and/or modified protein sequence (wt) from HRSV__APW78731.1__P
MEKFAPEFHGEDANNKATKFLESIKGKFASSKDPKKKDSIISVNSIDIEVTKESPITSGTNIINPTSEADSTQETKANYPRKPLVSFKEDLTPSDNPFSKLYKETIETFDNNEEESSYSYEEINDQTNDNITARLDRIDEKLSEILGMLHTLVVASAGPTSARDGIRDAMVGLREEMIEKIRAEALMTNDRLEAMARLRNEESEKMAKDTSDEVSLNPTSKKLSDLLEDNDSDNDLSLDDF

SEQ ID NO: 11157 - protein, 241 aa, Artificial Sequence
  derived and/or modified protein sequence (wt) from HRSV__APW78797.1__P
MEKFAPEFHGEDANNKATKFLESIKGKFASSKDPKKKDSIISVNSIDIEVTKESPITSGTNIINPTSEADSTQETKANYPRKPLVSFKEDLTPSYNPFSKLYKETIETFDNNEEESSYSYEEINDQTNDNITARLDRIDEKLSEILGMLHTLVVASAGPTSARDGIRDAMVGLREEMIEKIRAEALMTNDRLEAMARLRNEESEKMAKDTSDEVSLNPTSKKLSDLLEDNDSDNDLSLDDF

SEQ ID NO: 11158 - protein, 241 aa, Artificial Sequence
  derived and/or modified protein sequence (wt) from HRSV__APW78819.1__P
MEKFAPEFHGEDANNKATKFLESIKGKFASSKDPKKKDSIISVNSIDIEVTKESPITSGTNIINPISEADSTPETRANYPRKPLVSFKEDLTPSDNPFSKLYKETIETFDNNEEESSYSYEEINDQTNDNITARLDRIDEKLSEILGMLHTLVVASAGPTSARDGIRDAMVGLREEMIEKIRAEALMTNDRLEAMARLRNEESEKMAKDTSDEVSLNPTSKKLSDLLEDNDSDNDLSLDDF

SEQ ID NO: 11159 - protein, 241 aa, Artificial Sequence
  derived and/or modified protein sequence (wt) from HRSV__APW78852.1__P
MEKFAPEFHGEDANNKATKFLESIKGKFASSKDPKKKDSIISVNSIDIEVTKESPITSGTNIINPTSEADSTPETKANYPRKPLVSFKEDLTPSDNPFSKLYKETIETFDNNEEESSYSYEEINDQTNDNITSRLDRIDEKLSEILGMLHTLVVASAGPTSARDGIRDAMVGLREEMIEKIRAEALMTNDRLEAMARLRNEESEKMAKDTSDEVSLNPTSKKLSDLLEDNDSDNDLSLDDF

SEQ ID NO: 11160 - protein, 241 aa, Artificial Sequence
  derived and/or modified protein sequence (wt) from HRSV__APW78874.1__P
MEKFAPEFHGEDANNKATKFLESIKGKFASSKDPKKKDSIISVNSIDIEVTKESPITSGTNIINPTGEADSTPETRANYPRKPLVSFKEDLTPSDNPFSKLYKETIETFDNNEEESSYSYEEINDQTNDNITARLDRIDEKLSEILGMLHTLVVASAGPTSARDGIRDAMVGLREEMIEKIRAEALMTNDRLEAMARLRNEESEKMAKDTSDEVSLNPTSKKLSDLLEDNDSDNDLSLDDF

SEQ ID NO: 11161 - protein, 241 aa, Artificial Sequence
  derived and/or modified protein sequence (wt) from HRSV__APW78896.1__P
MEKFAPEFHGEDANNKATKFLESIKGKFASSKDPKKKDSIISVNSIDIEVTKESPITSGTNIINPTSEADSTPETKANYPRKPLVSFKEDHTPSDNPFSKLYKETIETFDNNEEESSYSYEEINDQTNDNITARLDRIDEKLSEILGMLHTLVVASAGPTSARDGIRDAMVGLREEMIEKIRAEALMTNDRLEAMARLRNEESEKMAKDTSDEVSLNPTSKKLSDLLEDNDSDNDLSLDDF

SEQ ID NO: 11162 - protein, 241 aa, Artificial Sequence
  derived and/or modified protein sequence (wt) from HRSV__ARB07901.1__P
MEKFAPEFHGEDANNKATKFLESIKGKFASSKDPKKKDSIISVNSIDIEVIKESPITSGTNIINPTSEADSTPETKANYPRKPLVSFKEDLTPSDNPFSKLYKETIETFDNNEEESSYSYEEINDQTSDNITARLDRIDEKLSEILGMLHTLVVASAGPTSARDGIRDAMVGLREEMIEKIRAEALMTNDRLEAMARLRNEESEKMAKDTSDEVSLNPTSKKLSDLLEDNDSDNDLSLDDF

SEQ ID NO: 11163 - protein, 241 aa, Artificial Sequence
  derived and/or modified protein sequence (wt) from HRSV__ARB66324.1__P
MEKFAPEFHGEDANNRATKFLESIKGKFPSPKDPKKKDSIISVNSIDIEVTKESPITSNSTIINPINETDDTVGNKPNYQRKPLVSFKEDPTPSDNPFSKLYKETIETFDNNEEESSYSYEEINDQTNDNITARLDRIDEKLSEILGMLHTLVVASAGPTSARDGIRDAMVGLREEMIEKIRTEALMTNDRLEAMARLRNEESEKMAKDTSDEVSLNPTSEKLNNLLEGNDSDNDLSLEDF

SEQ ID NO: 11164 - protein, 241 aa, Artificial Sequence
  derived and/or modified protein sequence (wt) from HRSV__ARN61503.1__P
MEKFAPEFHGEDANNRATKFLESIKGKFTSPKDPKKKDSIISVNSIDMEVTKESPITSNSTIINPINETDDTVGNKPNYQRKPLVSFKEDPTPSDNPFSKLYKETIETFDNNEEGSSYSYEEINDQTNDNITARLDRIDEKLSEILGMLHTLVVASAGPTSARDGIRDAMVGLREEMIEKIRTEALMTNDRLEAMARLRNEESEKVAKDTSDEVSLNPTSEKLNNLLEGNDSDNDLSLEDF

SEQ ID NO: 11165 - protein, 241 aa, Artificial Sequence
  derived and/or modified protein sequence (wt) from HRSV__ART28313.1__P
MEKFAPEFHGEDANNRATKFLESIKGKFTSPKDPKKKDSIISVNSIDIEVTKESPITSNSTIINPTNETDDTAGSKPNYQRKPLVSFKEDPTPSDNPFSKLYKETIETFDNNEEESSYSYEEINDQTNDNITARLDRIDEKLSEILGMLHTLVVASAGPTSARDGIRDAMVGLREEMIEKIRTEALMTNDRLEAMARLRNEESEKMAKDTSDEVSLNPTSEKLNNLLEGNDSDNDLSLEDF

SEQ ID NO: 11166 - protein, 241 aa, Artificial Sequence
  derived and/or modified protein sequence (wt) from HRSV__ART28401.1__P
MEKFAPEFHGEDANNKATKFLESIKGKFASSKDPKKKDSIISVNSIDIEVTKESPITSGTNVINPTSEADSTPETKANYPRKPLVSFKEDLTPSDNPFSKLYKETIETFDNNEEESSYSYEEINDQTNDNITARLDRIDEKLSEILGMLHTLVVASAGPTSARDGIRDAMVGLREEMIEKIRAEALMTNDRLEAMARLRNEESEKMAKDTSDEVSLNPTSKKLSDLLEDNDSDNDLSLDDF

SEQ ID NO: 11167 - protein, 241 aa, Artificial Sequence
  derived and/or modified protein sequence (wt) from HRSV__ART28478.1__P
MEKFAPEFHGEDANNRATKFLESIKGKFTSPKDPKKKDSIISVNSIDIEATKESPITSNSTIINPINETDDTVGNKPNYQRKPLVSFKEDPTPSDNPFSKLYKETIETFDNNEEESSYSYEEINDQTNDNITARLDRIDEKLSEILGMLHTLVVASAGPTSARDGIRDAMVGLREEMIEKIRTEALMTNDRLEAMARLRNEESEKMAKDTSDEVSLNPTSEKLNNLLEGNDSDNDLSLEDF

SEQ ID NO: 11168 - protein, 241 aa, Artificial Sequence
  derived and/or modified protein sequence (wt) from HRSV__ART28500.1__P
MEKFAPEFHLFHDDLFAPKFLESIKGKFTSPKDPKKKDSIISVNSIDIEVTKESPITSNSTIINPINETDDTVGNKPNYQRKPLVSFKEDPTPSDNPFSKLYKETIETFDNNEEESSYSYEEINDQTNDNITARLDRIDEKLSEILGMLHTLVVASAGPTSARDGIRDAMVGLREEMIEKIRTEALMTNDRLEAMARLRNEESEKMAKDTSDEVSLNPTSEKLNNLLEGNDSDNDLSLEDF

SEQ ID NO: 11169 - protein, 241 aa, Artificial Sequence
  derived and/or modified protein sequence (wt) from HRSV__ART28544.1__P
MEKFAPEFHGEDANNKATKFLESIKGKFASSKDPKKKDSIISVNSIDIEVTKESPITSGTNIINPTSEADSTPETKANYPRKPLVSFKEDLTPSDNPFSKLYKETIETFDNNEEESSYSYEEINDQTNDNITARLDRIDEKLSEILGMLHTLVVASAGPTTARDGIRDAMVGLREEMIEKIRAEALMTNDRLEAMARLRNEESEKMAKDTSDEVSLNPTSKKLSDLLEDNDSDNDLSLDDF

SEQ ID NO: 11170 - protein, 241 aa, Artificial Sequence
  derived and/or modified protein sequence (wt) from HRSV__ASZ84938.1__P
MEKFAPEFHGEDANNKATKFLESIKGKFASSKDPKKKDSIISVNSIDIEVTKESPITSGTNIINPTSEADSTPETKANYPRKPLVSFKEDLTPSDNPFSKLYKETIETFDNNEEESSYSYEEINDQTNDNITARLDRIDEKLSEILGMLHTLVVASAGPTSARDGIRDAMVGLREEMIEKIRAEALMTNDRLEAMARLRNEESEKMAKDTSDEVSLNPTSKKLSDLLEGNDSDNDLSLDDF

SEQ ID NO: 11171 - protein, 241 aa, Artificial Sequence
  derived and/or modified protein sequence (wt) from HRSV__ASZ84960.1__P
MEKFAPEFHGEDANNKATKFLESIKGKFASSKDPKKKDSIISVNSIDIEVTKESPITSGTNIINPASEADSTPEPKANYPRKPLVSFKEDLTPSDNPFSKLYKETIETFDNNEEESSYSYEEINDQTNDNITARLDRIDEKLSEILGMLHTLVVASAGPTSARDGIRDAMVGLREEMIEKIRAEALMTNDRLEAMARLRNEESEKMAKDTSDEVSLNPTSKKLSDLLEDNDSDNDLSLDDF

SEQ ID NO: 11172 - protein, 241 aa, Artificial Sequence
  derived and/or modified protein sequence (wt) from HRSV__ATV81328.1__P
MEKFAPEFHLFHDDLFATKFLESIKGKFTSPKDPKKKDSIISVNSIDIEVTKESPITSNSTIINPINETDDNVGNKPNYQRKPLVSFKEDPTPSDNPFSKLYKETIETFDNNEEESSYSYEEINDQTNDNITARLDRIDEKLSEILGMLHTLVVASAGPTSARDGIRDAMVGLREEMIEKIRTEALMTNDRLEAMARLRNEESEKMAKDTSDEVSLNPTSEKLNNLLEGNDSDNDLSLEDF

SEQ ID NO: 11173 - protein, 241 aa, Artificial Sequence
  derived and/or modified protein sequence (wt) from HRSV__AUC68364.1__P
MEKFAPEFHGEDANNRATKFLESIKGKFTSPKDPKKKDSIISVNSIDIEVTKESPITSNSTIINPTNETDDTVGNKPNYQRKPLVSFKEDPTPSDNPFSKLYKETIETFDNNEEESSYSYEEINDQTNDNITARLDRIDEKLSEILGMLHTLVVASAGPTSARDGIRDAMVGLREEMIEKIRTEALMTNDRLEAMARLRNEESEKMAKDTSDEVSLNPTSEKLNNLLEGDDSDNDLSLEDF

SEQ ID NO: 11174 - protein, 241 aa, Artificial Sequence
  derived and/or modified protein sequence (wt) from HRSV__AUH15171.1__P
MEKFAPEFHGEDANNKATKFLESIKGKFASSKDHKKKDSIISVNSIDIEVTKESPITSGTNIINPTSEADSTPETKANYPRKPLVSFKEDLTPSDNPFSKLYKETIETFDNNEEESSYSYEEINDQTNDNITARLDRIDEKLSEILGMLHTLVVASAGPTSARDGIRDAMVGLREEMIEKIRAEALMTNDRLEAMARLRNEESEKMAKDTSDEVSLNPTSKKLSDLLEDNDSDNDLSLDDF

SEQ ID NO: 11175 - protein, 241 aa, Artificial Sequence
  derived and/or modified protein sequence (wt) from HRSV__NP_044592.1__P
MEKFAPEFHGEDANNRATKFLESIKGKFTSPKDPKKKDSIISVNSIDIEVTKESPITSNSTIINPTNETDDTVGNKPNYQRKPLVSFKEDPTPSDNPFSKLYKETIETFDNNEEESSYSYEEINDQTNDNITARLDRIDEKLSEILGMLHTLVVASAGPTSARDGIRDAMVGLREDMIEKIRTEALMTNDRLEAMARLRNEESEKMAKDTSDEVSLNPTSEKLNNLLEGNDSDNDLSLDDF

SEQ ID NO: 11176 - protein, 241 aa, Artificial Sequence
  derived and/or modified protein sequence (wt) from HRSV__P12579.1__P
MEKFAPEFHGEDANNRATKFLESIKGKFTSPKDPKKKDSIISVNSTDIEVTKESPITSNSTIINPTNETDDNAGNKPNYQRKPLVSFKEDPIPSDNPFSKLYKETIETFDNNEEESSYSYEEINDQTNDNITARLDRIDEKLSEILGMLHTLVVASAGPTSARDGIRDAMVGLREEMIEKIRTEALMTNDRLEAMARLRNEESEKMAKDTSDEVSLNPTSEKLNNLLEGNDSDNDLSLEDF

SEQ ID NO: 11177 - protein, 241 aa, Artificial Sequence
  derived and/or modified protein sequence (wt) from HRSV__P14156.1__P
MEKFAPEFHGEDANNRATKFLESIKGKFTSPKDPKKKDSIISVNSIDIEVTKESPITSNSTIINPTNETDDTVGNKPNYQRKPLVSFKEDPTPSDNPFSKLYKETIETFDNNEEESSYSYEEINDQTNDNITARLDRIDEKLSEILGMLHTLVVASAGPTSARDGIRDAMVGLREEMIEKIRTEALMTNDRLEAMARLRNEESEKMAKDTSDEVSLNPTSEKLNNLLEGNDSDNDLSLEDF

SEQ ID NO: 11178 - protein, 241 aa, Artificial Sequence
  derived and/or modified protein sequence (wt) from HRSV__P24567.1__P
MEKFAPEFHGEDANNKATKFLESIKGKFASSKDPKKKDSIISVNSIDIEVTKESPITSGTNIINPISEADSTPEAKANYPRKPLDSFKEDLTPSDNPFSKLYKETIETFDNNEEESSYSYEEINDQTNDNITARLDRIDEKLSEILGMLHTLVVASAGPTSARDGIRDAMVGLREEMIEKIRAEALMTNDRLEAMARLRNEESEKMAKDTSDEVSLNPTSKKLSNLLEDNDSDNDLSLDDF

SEQ ID NO: 11179 - protein, 241 aa, Artificial Sequence
  derived and/or modified protein sequence (wt) from HRSV__P33454.1__P
MEKFAPEFHGEDANTKATKFLESLKGKFTSSKDSRKKDSIISVNSIDIELPKESPITSTNHNINQPSEINDTIAANQVHIRKPLVSFKEELPSSENPFTKLYKETIETFDNNEEESSYSYDEINDQTNDNITARLDRIDEKLSEIIGMLHTLVVASAGPTAARDGIRDAMVGLREEMIEKIRSEALMTNDRLEAMARLRDEESEKMTKDTSDEVKLTPTSEKLNMVLEDESSDNDLSLEDF

SEQ ID NO: 11180 - protein, 241 aa, Artificial Sequence
  derived and/or modified protein sequence (wt) from HRSV__1512372B__P
MEKFAPEFHGEDANNRATKFLESIKGKFTSPKDPKKKDSIISVNSTDIEVTKESPITSNSTIINPTNETDDNAGNKPNYQRKPLVSFKEDPIPSDNPFSKLYKETIETFDNNEEESSYSYEEINDQTNDNITARLDRIDEKLSEILGMLHTLVVASAGPTSARDGIRDAMVGLREEMIEKIRTEALMTNDRLEAMARLRNEESEKMAKNTSDEVSLNPTSEKLNNLLEGNDSDNDLSLEDF

SEQ ID NO: 11181 - protein, 241 aa, Artificial Sequence
  derived and/or modified protein sequence (wt) from HRSV__2023379A__P
MEKFAPEFHGEDANNRATKFLESIKVKFTSPKDPKKKDSIISVNSIDIEVTKESPITSNSTIINPTNETDDNAGNKPNYQRKPLVSFKEDPIPSDNPFSKLYKETIETFDNNEEESSYSYEEINDQTNDNITARLDRIDEKLSEILGMLHTLVVASAGPTSARDGIRDAMVGLREEMIEKIRTEALMTNDRLEAMARLRNEESEKMAKDTSDEVSLNPTSEKLNNLLEGNDSDNDLSLEDF

SEQ ID NO: 11182 - protein, 241 aa, Artificial Sequence
  derived and/or modified protein sequence (wt) from HRSV__Q83956.1__P
MEKFAPEFHGEDANTKATKFLESLKGKFTSSKDSKKKDSIISVNSIDIELPKESPITSANHNISQSGENSDTPATNQVHTRKPLVSFREELPTSENPFTKLYKETIETFDNNEEESSYSYDEINDQTNDNITARLDRIDEKLSEIIGMLHTLVVASAGPTAARDGIRDAMVGLREEMIEKIRSEALMTNDRLEAMARLRNEESEKMAKDTSDDVNLNSTSEKLNTILEEDNSDNDLSLEDF

SEQ ID NO: 11183 - protein, 194 aa, Artificial Sequence
  derived and/or modified protein sequence (wt) from HRSV(A2)__P04545.1__M2-1
MSRRNPCKFEIRGHCLNGKRCHFSHNYFEWPPHALLVRQNFMLNRILKSMDKSIDTLSEISGAAELDRTEEYALGVVGVLESYIGSINNITKQSACVAMSKLLTELNSDDIKKLRDNEELNSPKIRVYNTVISYIESNRKNNKQTIHLLKRLPADVLKKTIKNTLDIHKSITINNPKESTVSDTNDHAKNNDTT

SEQ ID NO: 11184 - RNA, 585 nt, Artificial Sequence
  derived and/or modified CDS sequence (wt) from HRSV(A2)__P04545.1__M2-1
augucacgaaggaauccuugcaaauuugaaauucgaggucauugcuuaaaugguaagaggugucauuuuagucauaauuauuuugaauggccaccccaugcacugcuuguaagacaaaacuuuauguuaaacagaauacuuaagucuauggauaaaaguauagauaccuuaucagaaauaaguggagcugcagaguuggacagaacagaagaguaugcucuugguguaguuggagugcuagagaguuauauaggaucaauaaacaauauaacuaaacaaucagcauguguugccaugagcaaacuccucacugaacucaauagugaugauaucaaaaagcugagggacaaugaagagcuaaauucacccaagauaagaguguacaauacugucauaucauauauugaaagcaacaggaaaaacaauaaacaaacuauccaucuguuaaaaagauugccagcagacguauugaagaaaaccaucaaaaacacauuggauauccauaagagcauaaccaucaacaacccaaaagaaucaacuguuagugauacaaaugaccaugccaaaaauaaugauacuaccuga

SEQ ID NO: 11185 - RNA, 585 nt, Artificial Sequence
  derived and/or modified CDS sequence (opt1) from HRSV(A2)__P04545.1__M2-1
augagccgccggaaccccugcaaguucgagauccgcggccacugccugaacgggaagcggugccacuucucccacaacuacuucgaguggccgccccacgcccuccuggugcgccagaacuucaugcugaaccggauccucaagagcauggacaaguccaucgacacccugagcgagaucuccggcgccgcggagcuggaccgcaccgaggaguacgcccucggggucgugggcgugcuggagagcuacaucggguccaucaacaacaucacgaagcagagcgccugcgucgccauguccaagcugcucaccgagcugaacagcgacgacaucaagaagcugcgggacaacgaggagcucaacucccccaagauccgcguguacaacaccgugaucagcuacaucgaguccaaccggaagaacaacaagcagaccauccaccuccugaagcgccugcccgccgacguccugaagaagacgaucaagaacacccuggacauccacaagagcaucaccaucaacaacccgaaggaguccaccgugagcgacacgaacgaccacgcgaagaacaacgacaccaccuga

SEQ ID NO: 11186 - RNA, 585 nt, Artificial Sequence
  derived and/or modified CDS sequence (opt2) from HRSV(A2)__P04545.1__M2-1
augucccgccgcaaccccugcaaguucgagauccgcggccacugccucaacggcaagcgcugccacuucucccacaacuacuucgaguggcccccccacgcccuccucguccgccagaacuucaugcucaaccgcauccucaaguccauggacaaguccaucgacacccucuccgagaucuccggcgccgccgagcucgaccgcaccgaggaguacgcccucggcgucgucggcguccucgaguccuacaucggcuccaucaacaacaucaccaagcaguccgccugcgucgccauguccaagcuccucaccgagcucaacuccgacgacaucaagaagcuccgcgacaacgaggagcucaacucccccaagauccgcgucuacaacaccgucaucuccuacaucgaguccaaccgcaagaacaacaagcagaccauccaccuccucaagcgccuccccgccgacguccucaagaagaccaucaagaacacccucgacauccacaaguccaucaccaucaacaaccccaaggaguccaccgucuccgacaccaacgaccacgccaagaacaacgacaccaccuga

SEQ ID NO: 11187 - RNA, 585 nt, Artificial Sequence
  derived and/or modified CDS sequence (opt3) from HRSV(A2)__P04545.1__M2-1
augagcagaaggaaccccugcaaguucgagauccggggccacugucugaaugggaaacgcugccauuuuucccacaacuacuucgaauggccuccacaugcacuccuugugcgacagaauuuuaugcugaaccguauuuugaagucuauggacaaaucaauagauaccuuaagugagaucagcggagcugcagaacuggacagaacagaggaauaugcccuaggugucguuggcgugcucgaguccuacauugggucuaucaauaacauuacuaagcaaucggcguguguagcuaugucaaaacugcuuacggagcugaauagcgaugacaucaagaaguugagggauaacgaagaguuaaauaguccgaaaauacggguguauaacaccgucaucuccuacauugaaucuaaucgcaagaacaauaaacagacaauccaucugcugaagagacuccccgccgacgugcucaaaaagacuauuaagaacacccuggauauccacaaaagcauaacaauuaauaacccuaaggaguccaccguuucagacacuaacgaucacgccaaaaauaacgacacaaccuga

SEQ ID NO: 11188 - RNA, 585 nt, Artificial Sequence
  derived and/or modified CDS sequence (opt4) from HRSV(A2)__P04545.1__M2-1
augagcagaagaaaccccugcaaguucgagaucagaggccacugccugaacggcaagagaugccacuucagccacaacuacuucgaguggcccccccacgcccugcuggugagacagaacuucaugcugaacagaauccugaagagcauggacaagagcaucgacacccugagcgagaucagcggcgccgccgagcuggacagaaccgaggaguacgcccugggcguggugggcgugcuggagagcuacaucggcagcaucaacaacaucaccaagcagagcgccugcguggccaugagcaagcugcugaccgagcugaacagcgacgacaucaagaagcugagagacaacgaggagcugaacagccccaagaucagaguguacaacaccgugaucagcuacaucgagagcaacagaaagaacaacaagcagaccauccaccugcugaagagacugcccgccgacgugcugaagaagaccaucaagaacacccuggacauccacaagagcaucaccaucaacaaccccaaggagagcaccgugagcgacaccaacgaccacgccaagaacaacgacaccaccuga

SEQ ID NO: 11189 - RNA, 585 nt, Artificial Sequence
  derived and/or modified CDS sequence (opt5) from HRSV(A2)__P04545.1__M2-1
augagcagacggaaccccugcaaguucgagauccgcggccacugucugaaugggaaaagaugccauuuuucccacaacuacuucgaauggccuccgcaugcccuccuggugcggcagaauuuuaugcuuaaccgcauucugaagucuauggacaaaagcaucgauacccucuccgagauuucuggagcugccgaacuggacagaacagaggaauaugcgcuuggcgucguuggggugcuggagagcuacaucggauccauuaauaacaucacgaagcaaucugcuuguguggccaugagcaaacuccugaccgagcucaauuccgaugacaucaagaagcugcgggauaacgaggaacugaauagccccaaaauucgcgucuauaacacagugaucucuuacauugaauccaauagaaagaacaauaaacagaccauccaccuucugaagcggcucccugccgacguucugaaaaagacaauuaagaacacccuugauauccauaaaagcauuacaaucaauaaccccaaggagucuaccguguccgacacgaacgaucacgcuaaaaauaacgacaccacauga

SEQ ID NO: 11190 - RNA, 585 nt, Artificial Sequence
  derived and/or modified CDS sequence (opt6) from HRSV(A2)__P04545.1__M2-1
augucaagaagaaacccaugcaaauucgaaauaagaggacacugccuaaacggaaaaagaugccacuucucacacaacuacuucgaauggccaccacacgcacuacuuguaagacaaaacuucaugcuaaacagaauacuaaaaucaauggacaaaucaauagacacauuaucagaaauaucaggagcagcagaacucgacagaacagaagaauacgcacuaggaguaguaggaguacuagaaucauacauaggaucaauaaacaacauaacaaaacaaucagcaugcguagccauguccaaacuacuaacagaacuaaacuccgacgacauaaaaaaacuaagagacaacgaagaacuaaacucaccaaaaauaagaguauacaacacaguaauaucauacauagaaucaaacagaaaaaacaauaaacaaacaauacaccuacuaaaaagacucccagcagacguacuaaaaaaaacaauaaaaaacacacuagacauccacaaaucaauaacaauaaacaacccaaaagaaucaacagucucagacaccaacgaccacgcaaaaaacaacgacacaacauaa

SEQ ID NO: 11191 - RNA, 585 nt, Artificial Sequence
  derived and/or modified CDS sequence (opt11) from HRSV(A2)__P04545.1__M2-1
augucacgacgcaaccccugcaaauucgaaauccgcggccacugccuaaacggcaaacgcugccacuucucccacaacuacuucgaauggcccccccacgcccuccuuguccgccaaaacuucaugcucaaccgcauccucaaauccauggacaaaagcaucgacacccucuccgaaaucuccggcgcagccgaacucgaccgcaccgaagaauacgcccucggcgucguaggcguccucgaauccuacaucggcucaaucaacaacaucaccaaacaauccgccugcgucgccauguccaaacuccucaccgaacucaacuccgacgacaucaaaaaacuccgcgacaacgaagaacucaacucccccaaaauccgagucuacaacaccguaaucuccuacaucgaauccaaccgcaaaaacaacaaacaaaccauccaccuacuaaaacgacuccccgccgacguccucaaaaaaacaaucaaaaacacccucgacauccacaaauccaucaccaucaacaaccccaaagaaucaaccgucuccgacaccaacgaccacgccaaaaacaacgacaccaccuga

SEQ ID NO: 11192 - RNA, 861 nt, Artificial Sequence
  mRNA product Design a-1 comprising derived and/or modified sequence from HRSV(A2)__P04545.1__M2-1 (wt)
gggagagucccgcagucggcguccagcggcucugcuuguucgugugugugucguugcaggccuuauucaagcuuaccaugucacgaaggaauccuugcaaauuugaaauucgaggucauugcuuaaaugguaagaggugucauuuuagucauaauuauuuugaauggccaccccaugcacugcuuguaagacaaaacuuuauguuaaacagaauacuuaagucuauggauaaaaguauagauaccuuaucagaaauaaguggagcugcagaguuggacagaacagaagaguaugcucuugguguaguuggagugcuagagaguuauauaggaucaauaaacaauauaacuaaacaaucagcauguguugccaugagcaaacuccucacugaacucaauagugaugauaucaaaaagcugagggacaaugaagagcuaaauucacccaagauaagaguguacaauacugucauaucauauauugaaagcaacaggaaaaacaauaaacaaacuauccaucuguuaaaaagauugccagcagacguauugaagaaaaccaucaaaaacacauuggauauccauaagagcauaaccaucaacaacccaaaagaaucaacuguuagugauacaaaugaccaugccaaaaauaaugauacuaccugaggacuagucccuguucccagagcccacuuuuuuuucuuuuuuugaaauaaaauagccugucuuucagaucuaaaaaaaaaaaaaaaaaaaaaaaaaaaaaaaaaaaaaaaaaaaaaaaaaaaaaaaaaaaaaaaaugcaucccccccccccccccccccccccccccccccaaaggcucuuuucagagccaccagaauu

SEQ ID NO: 11193 - RNA, 861 nt, Artificial Sequence
  mRNA product Design a-1 comprising derived and/or modified sequence from HRSV(A2)__P04545.1__M2-1 (opt1)
gggagagucccgcagucggcguccagcggcucugcuuguucgugugugugucguugcaggccuuauucaagcuuaccaugagccgccggaaccccugcaaguucgagauccgcggccacugccugaacgggaagcggugccacuucucccacaacuacuucgaguggccgccccacgcccuccuggugcgccagaacuucaugcugaaccggauccucaagagcauggacaaguccaucgacacccugagcgagaucuccggcgccgcggagcuggaccgcaccgaggaguacgcccucggggucgugggcgugcuggagagcuacaucggguccaucaacaacaucacgaagcagagcgccugcgucgccauguccaagcugcucaccgagcugaacagcgacgacaucaagaagcugcgggacaacgaggagcucaacucccccaagauccgcguguacaacaccgugaucagcuacaucgaguccaaccggaagaacaacaagcagaccauccaccuccugaagcgccugcccgccgacguccugaagaagacgaucaagaacacccuggacauccacaagagcaucaccaucaacaacccgaaggaguccaccgugagcgacacgaacgaccacgcgaagaacaacgacaccaccugaggacuagucccuguucccagagcccacuuuuuuuucuuuuuuugaaauaaaauagccugucuuucagaucuaaaaaaaaaaaaaaaaaaaaaaaaaaaaaaaaaaaaaaaaaaaaaaaaaaaaaaaaaaaaaaaaugcaucccccccccccccccccccccccccccccccaaaggcucuuuucagagccaccagaauu

SEQ ID NO: 11194 - RNA, 861 nt, Artificial Sequence
  mRNA product Design a-1 comprising derived and/or modified sequence from HRSV(A2)__P04545.1__M2-1 (opt2)
gggagagucccgcagucggcguccagcggcucugcuuguucgugugugugucguugcaggccuuauucaagcuuaccaugucccgccgcaaccccugcaaguucgagauccgcggccacugccucaacggcaagcgcugccacuucucccacaacuacuucgaguggcccccccacgcccuccucguccgccagaacuucaugcucaaccgcauccucaaguccauggacaaguccaucgacacccucuccgagaucuccggcgccgccgagcucgaccgcaccgaggaguacgcccucggcgucgucggcguccucgaguccuacaucggcuccaucaacaacaucaccaagcaguccgccugcgucgccauguccaagcuccucaccgagcucaacuccgacgacaucaagaagcuccgcgacaacgaggagcucaacucccccaagauccgcgucuacaacaccgucaucuccuacaucgaguccaaccgcaagaacaacaagcagaccauccaccuccucaagcgccuccccgccgacguccucaagaagaccaucaagaacacccucgacauccacaaguccaucaccaucaacaaccccaaggaguccaccgucuccgacaccaacgaccacgccaagaacaacgacaccaccugaggacuagucccuguucccagagcccacuuuuuuuucuuuuuuugaaauaaaauagccugucuuucagaucuaaaaaaaaaaaaaaaaaaaaaaaaaaaaaaaaaaaaaaaaaaaaaaaaaaaaaaaaaaaaaaaaugcaucccccccccccccccccccccccccccccccaaaggcucuuuucagagccaccagaauu

SEQ ID NO: 11195 - RNA, 861 nt, Artificial Sequence
  mRNA product Design a-1 comprising derived and/or modified sequence from HRSV(A2)__P04545.1__M2-1 (opt3)
gggagagucccgcagucggcguccagcggcucugcuuguucgugugugugucguugcaggccuuauucaagcuuaccaugagcagaaggaaccccugcaaguucgagauccggggccacugucugaaugggaaacgcugccauuuuucccacaacuacuucgaauggccuccacaugcacuccuugugcgacagaauuuuaugcugaaccguauuuugaagucuauggacaaaucaauagauaccuuaagugagaucagcggagcugcagaacuggacagaacagaggaauaugcccuaggugucguuggcgugcucgaguccuacauugggucuaucaauaacauuacuaagcaaucggcguguguagcuaugucaaaacugcuuacggagcugaauagcgaugacaucaagaaguugagggauaacgaagaguuaaauaguccgaaaauacggguguauaacaccgucaucuccuacauugaaucuaaucgcaagaacaauaaacagacaauccaucugcugaagagacuccccgccgacgugcucaaaaagacuauuaagaacacccuggauauccacaaaagcauaacaauuaauaacccuaaggaguccaccguuucagacacuaacgaucacgccaaaaauaacgacacaaccugaggacuagucccuguucccagagcccacuuuuuuuucuuuuuuugaaauaaaauagccugucuuucagaucuaaaaaaaaaaaaaaaaaaaaaaaaaaaaaaaaaaaaaaaaaaaaaaaaaaaaaaaaaaaaaaaaugcaucccccccccccccccccccccccccccccccaaaggcucuuuucagagccaccagaauu

SEQ ID NO: 11196 - RNA, 861 nt, Artificial Sequence
  mRNA product Design a-1 comprising derived and/or modified sequence from HRSV(A2)__P04545.1__M2-1 (opt4)
gggagagucccgcagucggcguccagcggcucugcuuguucgugugugugucguugcaggccuuauucaagcuuaccaugagcagaagaaaccccugcaaguucgagaucagaggccacugccugaacggcaagagaugccacuucagccacaacuacuucgaguggcccccccacgcccugcuggugagacagaacuucaugcugaacagaauccugaagagcauggacaagagcaucgacacccugagcgagaucagcggcgccgccgagcuggacagaaccgaggaguacgcccugggcguggugggcgugcuggagagcuacaucggcagcaucaacaacaucaccaagcagagcgccugcguggccaugagcaagcugcugaccgagcugaacagcgacgacaucaagaagcugagagacaacgaggagcugaacagccccaagaucagaguguacaacaccgugaucagcuacaucgagagcaacagaaagaacaacaagcagaccauccaccugcugaagagacugcccgccgacgugcugaagaagaccaucaagaacacccuggacauccacaagagcaucaccaucaacaaccccaaggagagcaccgugagcgacaccaacgaccacgccaagaacaacgacaccaccugaggacuagucccuguucccagagcccacuuuuuuuucuuuuuuugaaauaaaauagccugucuuucagaucuaaaaaaaaaaaaaaaaaaaaaaaaaaaaaaaaaaaaaaaaaaaaaaaaaaaaaaaaaaaaaaaaugcaucccccccccccccccccccccccccccccccaaaggcucuuuucagagccaccagaauu

SEQ ID NO: 11197 - RNA, 861 nt, Artificial Sequence
  mRNA product Design a-1 comprising derived and/or modified sequence from HRSV(A2)__P04545.1__M2-1 (opt5)
gggagagucccgcagucggcguccagcggcucugcuuguucgugugugugucguugcaggccuuauucaagcuuaccaugagcagacggaaccccugcaaguucgagauccgcggccacugucugaaugggaaaagaugccauuuuucccacaacuacuucgaauggccuccgcaugcccuccuggugcggcagaauuuuaugcuuaaccgcauucugaagucuauggacaaaagcaucgauacccucuccgagauuucuggagcugccgaacuggacagaacagaggaauaugcgcuuggcgucguuggggugcuggagagcuacaucggauccauuaauaacaucacgaagcaaucugcuuguguggccaugagcaaacuccugaccgagcucaauuccgaugacaucaagaagcugcgggauaacgaggaacugaauagccccaaaauucgcgucuauaacacagugaucucuuacauugaauccaauagaaagaacaauaaacagaccauccaccuucugaagcggcucccugccgacguucugaaaaagacaauuaagaacacccuugauauccauaaaagcauuacaaucaauaaccccaaggagucuaccguguccgacacgaacgaucacgcuaaaaauaacgacaccacaugaggacuagucccuguucccagagcccacuuuuuuuucuuuuuuugaaauaaaauagccugucuuucagaucuaaaaaaaaaaaaaaaaaaaaaaaaaaaaaaaaaaaaaaaaaaaaaaaaaaaaaaaaaaaaaaaaugcaucccccccccccccccccccccccccccccccaaaggcucuuuucagagccaccagaauu

SEQ ID NO: 11198 - RNA, 861 nt, Artificial Sequence
  mRNA product Design a-1 comprising derived and/or modified sequence from HRSV(A2)__P04545.1__M2-1 (opt6)
gggagagucccgcagucggcguccagcggcucugcuuguucgugugugugucguugcaggccuuauucaagcuuaccaugucaagaagaaacccaugcaaauucgaaauaagaggacacugccuaaacggaaaaagaugccacuucucacacaacuacuucgaauggccaccacacgcacuacuuguaagacaaaacuucaugcuaaacagaauacuaaaaucaauggacaaaucaauagacacauuaucagaaauaucaggagcagcagaacucgacagaacagaagaauacgcacuaggaguaguaggaguacuagaaucauacauaggaucaauaaacaacauaacaaaacaaucagcaugcguagccauguccaaacuacuaacagaacuaaacuccgacgacauaaaaaaacuaagagacaacgaagaacuaaacucaccaaaaauaagaguauacaacacaguaauaucauacauagaaucaaacagaaaaaacaauaaacaaacaauacaccuacuaaaaagacucccagcagacguacuaaaaaaaacaauaaaaaacacacuagacauccacaaaucaauaacaauaaacaacccaaaagaaucaacagucucagacaccaacgaccacgcaaaaaacaacgacacaacauaaggacuagucccuguucccagagcccacuuuuuuuucuuuuuuugaaauaaaauagccugucuuucagaucuaaaaaaaaaaaaaaaaaaaaaaaaaaaaaaaaaaaaaaaaaaaaaaaaaaaaaaaaaaaaaaaaugcaucccccccccccccccccccccccccccccccaaaggcucuuuucagagccaccagaauu

SEQ ID NO: 11199 - RNA, 861 nt, Artificial Sequence
  mRNA product Design a-1 comprising derived and/or modified sequence from HRSV(A2)__P04545.1__M2-1 (opt11)
gggagagucccgcagucggcguccagcggcucugcuuguucgugugugugucguugcaggccuuauucaagcuuaccaugucacgacgcaaccccugcaaauucgaaauccgcggccacugccuaaacggcaaacgcugccacuucucccacaacuacuucgaauggcccccccacgcccuccuuguccgccaaaacuucaugcucaaccgcauccucaaauccauggacaaaagcaucgacacccucuccgaaaucuccggcgcagccgaacucgaccgcaccgaagaauacgcccucggcgucguaggcguccucgaauccuacaucggcucaaucaacaacaucaccaaacaauccgccugcgucgccauguccaaacuccucaccgaacucaacuccgacgacaucaaaaaacuccgcgacaacgaagaacucaacucccccaaaauccgagucuacaacaccguaaucuccuacaucgaauccaaccgcaaaaacaacaaacaaaccauccaccuacuaaaacgacuccccgccgacguccucaaaaaaacaaucaaaaacacccucgacauccacaaauccaucaccaucaacaaccccaaagaaucaaccgucuccgacaccaacgaccacgccaaaaacaacgacaccaccugaggacuagucccuguucccagagcccacuuuuuuuucuuuuuuugaaauaaaauagccugucuuucagaucuaaaaaaaaaaaaaaaaaaaaaaaaaaaaaaaaaaaaaaaaaaaaaaaaaaaaaaaaaaaaaaaaugcaucccccccccccccccccccccccccccccccaaaggcucuuuucagagccaccagaauu

SEQ ID NO: 11200 - RNA, 880 nt, Artificial Sequence
  mRNA product Design a-2 comprising derived and/or modified sequence from HRSV(A2)__P04545.1__M2-1 (wt)
gggagaguccgcucagccagguugcagaagcggcuuagcguguguccuaaucuucucucugcguguagguaggccugugccgcaaacaagcuuaccaugucacgaaggaauccuugcaaauuugaaauucgaggucauugcuuaaaugguaagaggugucauuuuagucauaauuauuuugaauggccaccccaugcacugcuuguaagacaaaacuuuauguuaaacagaauacuuaagucuauggauaaaaguauagauaccuuaucagaaauaaguggagcugcagaguuggacagaacagaagaguaugcucuugguguaguuggagugcuagagaguuauauaggaucaauaaacaauauaacuaaacaaucagcauguguugccaugagcaaacuccucacugaacucaauagugaugauaucaaaaagcugagggacaaugaagagcuaaauucacccaagauaagaguguacaauacugucauaucauauauugaaagcaacaggaaaaacaauaaacaaacuauccaucuguuaaaaagauugccagcagacguauugaagaaaaccaucaaaaacacauuggauauccauaagagcauaaccaucaacaacccaaaagaaucaacuguuagugauacaaaugaccaugccaaaaauaaugauacuaccugaggacuagucccuguucccagagcccacuuuuuuuucuuuuuuugaaauaaaauagccugucuuucagaucuaaaaaaaaaaaaaaaaaaaaaaaaaaaaaaaaaaaaaaaaaaaaaaaaaaaaaaaaaaaaaaaaugcaucccccccccccccccccccccccccccccccaaaggcucuuuucagagccaccagaauu

SEQ ID NO: 11201 - RNA, 880 nt, Artificial Sequence
  mRNA product Design a-2 comprising derived and/or modified sequence from HRSV(A2)__P04545.1__M2-1 (opt1)
gggagaguccgcucagccagguugcagaagcggcuuagcguguguccuaaucuucucucugcguguagguaggccugugccgcaaacaagcuuaccaugagccgccggaaccccugcaaguucgagauccgcggccacugccugaacgggaagcggugccacuucucccacaacuacuucgaguggccgccccacgcccuccuggugcgccagaacuucaugcugaaccggauccucaagagcauggacaaguccaucgacacccugagcgagaucuccggcgccgcggagcuggaccgcaccgaggaguacgcccucggggucgugggcgugcuggagagcuacaucggguccaucaacaacaucacgaagcagagcgccugcgucgccauguccaagcugcucaccgagcugaacagcgacgacaucaagaagcugcgggacaacgaggagcucaacucccccaagauccgcguguacaacaccgugaucagcuacaucgaguccaaccggaagaacaacaagcagaccauccaccuccugaagcgccugcccgccgacguccugaagaagacgaucaagaacacccuggacauccacaagagcaucaccaucaacaacccgaaggaguccaccgugagcgacacgaacgaccacgcgaagaacaacgacaccaccugaggacuagucccuguucccagagcccacuuuuuuuucuuuuuuugaaauaaaauagccugucuuucagaucuaaaaaaaaaaaaaaaaaaaaaaaaaaaaaaaaaaaaaaaaaaaaaaaaaaaaaaaaaaaaaaaaugcaucccccccccccccccccccccccccccccccaaaggcucuuuucagagccaccagaauu

SEQ ID NO: 11202 - RNA, 880 nt, Artificial Sequence
  mRNA product Design a-2 comprising derived and/or modified sequence from HRSV(A2)__P04545.1__M2-1 (opt2)
gggagaguccgcucagccagguugcagaagcggcuuagcguguguccuaaucuucucucugcguguagguaggccugugccgcaaacaagcuuaccaugucccgccgcaaccccugcaaguucgagauccgcggccacugccucaacggcaagcgcugccacuucucccacaacuacuucgaguggcccccccacgcccuccucguccgccagaacuucaugcucaaccgcauccucaaguccauggacaaguccaucgacacccucuccgagaucuccggcgccgccgagcucgaccgcaccgaggaguacgcccucggcgucgucggcguccucgaguccuacaucggcuccaucaacaacaucaccaagcaguccgccugcgucgccauguccaagcuccucaccgagcucaacuccgacgacaucaagaagcuccgcgacaacgaggagcucaacucccccaagauccgcgucuacaacaccgucaucuccuacaucgaguccaaccgcaagaacaacaagcagaccauccaccuccucaagcgccuccccgccgacguccucaagaagaccaucaagaacacccucgacauccacaaguccaucaccaucaacaaccccaaggaguccaccgucuccgacaccaacgaccacgccaagaacaacgacaccaccugaggacuagucccuguucccagagcccacuuuuuuuucuuuuuuugaaauaaaauagccugucuuucagaucuaaaaaaaaaaaaaaaaaaaaaaaaaaaaaaaaaaaaaaaaaaaaaaaaaaaaaaaaaaaaaaaaugcaucccccccccccccccccccccccccccccccaaaggcucuuuucagagccaccagaauu

SEQ ID NO: 11203 - RNA, 880 nt, Artificial Sequence
  mRNA product Design a-2 comprising derived and/or modified sequence from HRSV(A2)__P04545.1__M2-1 (opt3)
gggagaguccgcucagccagguugcagaagcggcuuagcguguguccuaaucuucucucugcguguagguaggccugugccgcaaacaagcuuaccaugagcagaaggaaccccugcaaguucgagauccggggccacugucugaaugggaaacgcugccauuuuucccacaacuacuucgaauggccuccacaugcacuccuugugcgacagaauuuuaugcugaaccguauuuugaagucuauggacaaaucaauagauaccuuaagugagaucagcggagcugcagaacuggacagaacagaggaauaugcccuaggugucguuggcgugcucgaguccuacauugggucuaucaauaacauuacuaagcaaucggcguguguagcuaugucaaaacugcuuacggagcugaauagcgaugacaucaagaaguugagggauaacgaagaguuaaauaguccgaaaauacggguguauaacaccgucaucuccuacauugaaucuaaucgcaagaacaauaaacagacaauccaucugcugaagagacuccccgccgacgugcucaaaaagacuauuaagaacacccuggauauccacaaaagcauaacaauuaauaacccuaaggaguccaccguuucagacacuaacgaucacgccaaaaauaacgacacaaccugaggacuagucccuguucccagagcccacuuuuuuuucuuuuuuugaaauaaaauagccugucuuucagaucuaaaaaaaaaaaaaaaaaaaaaaaaaaaaaaaaaaaaaaaaaaaaaaaaaaaaaaaaaaaaaaaaugcaucccccccccccccccccccccccccccccccaaaggcucuuuucagagccaccagaauu

SEQ ID NO: 11204 - RNA, 880 nt, Artificial Sequence
  mRNA product Design a-2 comprising derived and/or modified sequence from HRSV(A2)__P04545.1__M2-1 (opt4)
gggagaguccgcucagccagguugcagaagcggcuuagcguguguccuaaucuucucucugcguguagguaggccugugccgcaaacaagcuuaccaugagcagaagaaaccccugcaaguucgagaucagaggccacugccugaacggcaagagaugccacuucagccacaacuacuucgaguggcccccccacgcccugcuggugagacagaacuucaugcugaacagaauccugaagagcauggacaagagcaucgacacccugagcgagaucagcggcgccgccgagcuggacagaaccgaggaguacgcccugggcguggugggcgugcuggagagcuacaucggcagcaucaacaacaucaccaagcagagcgccugcguggccaugagcaagcugcugaccgagcugaacagcgacgacaucaagaagcugagagacaacgaggagcugaacagccccaagaucagaguguacaacaccgugaucagcuacaucgagagcaacagaaagaacaacaagcagaccauccaccugcugaagagacugcccgccgacgugcugaagaagaccaucaagaacacccuggacauccacaagagcaucaccaucaacaaccccaaggagagcaccgugagcgacaccaacgaccacgccaagaacaacgacaccaccugaggacuagucccuguucccagagcccacuuuuuuuucuuuuuuugaaauaaaauagccugucuuucagaucuaaaaaaaaaaaaaaaaaaaaaaaaaaaaaaaaaaaaaaaaaaaaaaaaaaaaaaaaaaaaaaaaugcaucccccccccccccccccccccccccccccccaaaggcucuuuucagagccaccagaauu

SEQ ID NO: 11205 - RNA, 880 nt, Artificial Sequence
  mRNA product Design a-2 comprising derived and/or modified sequence from HRSV(A2)__P04545.1__M2-1 (opt5)
gggagaguccgcucagccagguugcagaagcggcuuagcguguguccuaaucuucucucugcguguagguaggccugugccgcaaacaagcuuaccaugagcagacggaaccccugcaaguucgagauccgcggccacugucugaaugggaaaagaugccauuuuucccacaacuacuucgaauggccuccgcaugcccuccuggugcggcagaauuuuaugcuuaaccgcauucugaagucuauggacaaaagcaucgauacccucuccgagauuucuggagcugccgaacuggacagaacagaggaauaugcgcuuggcgucguuggggugcuggagagcuacaucggauccauuaauaacaucacgaagcaaucugcuuguguggccaugagcaaacuccugaccgagcucaauuccgaugacaucaagaagcugcgggauaacgaggaacugaauagccccaaaauucgcgucuauaacacagugaucucuuacauugaauccaauagaaagaacaauaaacagaccauccaccuucugaagcggcucccugccgacguucugaaaaagacaauuaagaacacccuugauauccauaaaagcauuacaaucaauaaccccaaggagucuaccguguccgacacgaacgaucacgcuaaaaauaacgacaccacaugaggacuagucccuguucccagagcccacuuuuuuuucuuuuuuugaaauaaaauagccugucuuucagaucuaaaaaaaaaaaaaaaaaaaaaaaaaaaaaaaaaaaaaaaaaaaaaaaaaaaaaaaaaaaaaaaaugcaucccccccccccccccccccccccccccccccaaaggcucuuuucagagccaccagaauu

SEQ ID NO: 11206 - RNA, 880 nt, Artificial Sequence
  mRNA product Design a-2 comprising derived and/or modified sequence from HRSV(A2)__P04545.1__M2-1 (opt6)
gggagaguccgcucagccagguugcagaagcggcuuagcguguguccuaaucuucucucugcguguagguaggccugugccgcaaacaagcuuaccaugucaagaagaaacccaugcaaauucgaaauaagaggacacugccuaaacggaaaaagaugccacuucucacacaacuacuucgaauggccaccacacgcacuacuuguaagacaaaacuucaugcuaaacagaauacuaaaaucaauggacaaaucaauagacacauuaucagaaauaucaggagcagcagaacucgacagaacagaagaauacgcacuaggaguaguaggaguacuagaaucauacauaggaucaauaaacaacauaacaaaacaaucagcaugcguagccauguccaaacuacuaacagaacuaaacuccgacgacauaaaaaaacuaagagacaacgaagaacuaaacucaccaaaaauaagaguauacaacacaguaauaucauacauagaaucaaacagaaaaaacaauaaacaaacaauacaccuacuaaaaagacucccagcagacguacuaaaaaaaacaauaaaaaacacacuagacauccacaaaucaauaacaauaaacaacccaaaagaaucaacagucucagacaccaacgaccacgcaaaaaacaacgacacaacauaaggacuagucccuguucccagagcccacuuuuuuuucuuuuuuugaaauaaaauagccugucuuucagaucuaaaaaaaaaaaaaaaaaaaaaaaaaaaaaaaaaaaaaaaaaaaaaaaaaaaaaaaaaaaaaaaaugcaucccccccccccccccccccccccccccccccaaaggcucuuuucagagccaccagaauu

SEQ ID NO: 11207 - RNA, 880 nt, Artificial Sequence
  mRNA product Design a-2 comprising derived and/or modified sequence from HRSV(A2)__P04545.1__M2-1 (opt11)
gggagaguccgcucagccagguugcagaagcggcuuagcguguguccuaaucuucucucugcguguagguaggccugugccgcaaacaagcuuaccaugucacgacgcaaccccugcaaauucgaaauccgcggccacugccuaaacggcaaacgcugccacuucucccacaacuacuucgaauggcccccccacgcccuccuuguccgccaaaacuucaugcucaaccgcauccucaaauccauggacaaaagcaucgacacccucuccgaaaucuccggcgcagccgaacucgaccgcaccgaagaauacgcccucggcgucguaggcguccucgaauccuacaucggcucaaucaacaacaucaccaaacaauccgccugcgucgccauguccaaacuccucaccgaacucaacuccgacgacaucaaaaaacuccgcgacaacgaagaacucaacucccccaaaauccgagucuacaacaccguaaucuccuacaucgaauccaaccgcaaaaacaacaaacaaaccauccaccuacuaaaacgacuccccgccgacguccucaaaaaaacaaucaaaaacacccucgacauccacaaauccaucaccaucaacaaccccaaagaaucaaccgucuccgacaccaacgaccacgccaaaaacaacgacaccaccugaggacuagucccuguucccagagcccacuuuuuuuucuuuuuuugaaauaaaauagccugucuuucagaucuaaaaaaaaaaaaaaaaaaaaaaaaaaaaaaaaaaaaaaaaaaaaaaaaaaaaaaaaaaaaaaaaugcaucccccccccccccccccccccccccccccccaaaggcucuuuucagagccaccagaauu

SEQ ID NO: 11208 - RNA, 958 nt, Artificial Sequence
  mRNA product Design a-3 comprising derived and/or modified sequence from HRSV(A2)__P04545.1__M2-1 (wt)
gggagagggcgcuuggcuugcaaggacccugagcugcggcauugaagcacacccaacccaacucgacugaagucagccucacugaaccggaucugagaaucuucucucucugggcuugccagggcucuccgaaccuagcuagcauccucuucaauuccaacuagaaagcuuaccaugucacgaaggaauccuugcaaauuugaaauucgaggucauugcuuaaaugguaagaggugucauuuuagucauaauuauuuugaauggccaccccaugcacugcuuguaagacaaaacuuuauguuaaacagaauacuuaagucuauggauaaaaguauagauaccuuaucagaaauaaguggagcugcagaguuggacagaacagaagaguaugcucuugguguaguuggagugcuagagaguuauauaggaucaauaaacaauauaacuaaacaaucagcauguguugccaugagcaaacuccucacugaacucaauagugaugauaucaaaaagcugagggacaaugaagagcuaaauucacccaagauaagaguguacaauacugucauaucauauauugaaagcaacaggaaaaacaauaaacaaacuauccaucuguuaaaaagauugccagcagacguauugaagaaaaccaucaaaaacacauuggauauccauaagagcauaaccaucaacaacccaaaagaaucaacuguuagugauacaaaugaccaugccaaaaauaaugauacuaccugaggacuagucccuguucccagagcccacuuuuuuuucuuuuuuugaaauaaaauagccugucuuucagaucuaaaaaaaaaaaaaaaaaaaaaaaaaaaaaaaaaaaaaaaaaaaaaaaaaaaaaaaaaaaaaaaaugcaucccccccccccccccccccccccccccccccaaaggcucuuuucagagccaccagaauu

SEQ ID NO: 11209 - RNA, 958 nt, Artificial Sequence
  mRNA product Design a-3 comprising derived and/or modified sequence from HRSV(A2)__P04545.1__M2-1 (opt1)
gggagagggcgcuuggcuugcaaggacccugagcugcggcauugaagcacacccaacccaacucgacugaagucagccucacugaaccggaucugagaaucuucucucucugggcuugccagggcucuccgaaccuagcuagcauccucuucaauuccaacuagaaagcuuaccaugagccgccggaaccccugcaaguucgagauccgcggccacugccugaacgggaagcggugccacuucucccacaacuacuucgaguggccgccccacgcccuccuggugcgccagaacuucaugcugaaccggauccucaagagcauggacaaguccaucgacacccugagcgagaucuccggcgccgcggagcuggaccgcaccgaggaguacgcccucggggucgugggcgugcuggagagcuacaucggguccaucaacaacaucacgaagcagagcgccugcgucgccauguccaagcugcucaccgagcugaacagcgacgacaucaagaagcugcgggacaacgaggagcucaacucccccaagauccgcguguacaacaccgugaucagcuacaucgaguccaaccggaagaacaacaagcagaccauccaccuccugaagcgccugcccgccgacguccugaagaagacgaucaagaacacccuggacauccacaagagcaucaccaucaacaacccgaaggaguccaccgugagcgacacgaacgaccacgcgaagaacaacgacaccaccugaggacuagucccuguucccagagcccacuuuuuuuucuuuuuuugaaauaaaauagccugucuuucagaucuaaaaaaaaaaaaaaaaaaaaaaaaaaaaaaaaaaaaaaaaaaaaaaaaaaaaaaaaaaaaaaaaugcaucccccccccccccccccccccccccccccccaaaggcucuuuucagagccaccagaauu

SEQ ID NO: 11210 - RNA, 958 nt, Artificial Sequence
  mRNA product Design a-3 comprising derived and/or modified sequence from HRSV(A2)__P04545.1__M2-1 (opt2)
gggagagggcgcuuggcuugcaaggacccugagcugcggcauugaagcacacccaacccaacucgacugaagucagccucacugaaccggaucugagaaucuucucucucugggcuugccagggcucuccgaaccuagcuagcauccucuucaauuccaacuagaaagcuuaccaugucccgccgcaaccccugcaaguucgagauccgcggccacugccucaacggcaagcgcugccacuucucccacaacuacuucgaguggcccccccacgcccuccucguccgccagaacuucaugcucaaccgcauccucaaguccauggacaaguccaucgacacccucuccgagaucuccggcgccgccgagcucgaccgcaccgaggaguacgcccucggcgucgucggcguccucgaguccuacaucggcuccaucaacaacaucaccaagcaguccgccugcgucgccauguccaagcuccucaccgagcucaacuccgacgacaucaagaagcuccgcgacaacgaggagcucaacucccccaagauccgcgucuacaacaccgucaucuccuacaucgaguccaaccgcaagaacaacaagcagaccauccaccuccucaagcgccuccccgccgacguccucaagaagaccaucaagaacacccucgacauccacaaguccaucaccaucaacaaccccaaggaguccaccgucuccgacaccaacgaccacgccaagaacaacgacaccaccugaggacuagucccuguucccagagcccacuuuuuuuucuuuuuuugaaauaaaauagccugucuuucagaucuaaaaaaaaaaaaaaaaaaaaaaaaaaaaaaaaaaaaaaaaaaaaaaaaaaaaaaaaaaaaaaaaugcaucccccccccccccccccccccccccccccccaaaggcucuuuucagagccaccagaauu

SEQ ID NO: 11211 - RNA, 958 nt, Artificial Sequence
  mRNA product Design a-3 comprising derived and/or modified sequence from HRSV(A2)__P04545.1__M2-1 (opt3)
gggagagggcgcuuggcuugcaaggacccugagcugcggcauugaagcacacccaacccaacucgacugaagucagccucacugaaccggaucugagaaucuucucucucugggcuugccagggcucuccgaaccuagcuagcauccucuucaauuccaacuagaaagcuuaccaugagcagaaggaaccccugcaaguucgagauccggggccacugucugaaugggaaacgcugccauuuuucccacaacuacuucgaauggccuccacaugcacuccuugugcgacagaauuuuaugcugaaccguauuuugaagucuauggacaaaucaauagauaccuuaagugagaucagcggagcugcagaacuggacagaacagaggaauaugcccuaggugucguuggcgugcucgaguccuacauugggucuaucaauaacauuacuaagcaaucggcguguguagcuaugucaaaacugcuuacggagcugaauagcgaugacaucaagaaguugagggauaacgaagaguuaaauaguccgaaaauacggguguauaacaccgucaucuccuacauugaaucuaaucgcaagaacaauaaacagacaauccaucugcugaagagacuccccgccgacgugcucaaaaagacuauuaagaacacccuggauauccacaaaagcauaacaauuaauaacccuaaggaguccaccguuucagacacuaacgaucacgccaaaaauaacgacacaaccugaggacuagucccuguucccagagcccacuuuuuuuucuuuuuuugaaauaaaauagccugucuuucagaucuaaaaaaaaaaaaaaaaaaaaaaaaaaaaaaaaaaaaaaaaaaaaaaaaaaaaaaaaaaaaaaaaugcaucccccccccccccccccccccccccccccccaaaggcucuuuucagagccaccagaauu

SEQ ID NO: 11212 - RNA, 958 nt, Artificial Sequence
  mRNA product Design a-3 comprising derived and/or modified sequence from HRSV(A2)__P04545.1__M2-1 (opt4)
gggagagggcgcuuggcuugcaaggacccugagcugcggcauugaagcacacccaacccaacucgacugaagucagccucacugaaccggaucugagaaucuucucucucugggcuugccagggcucuccgaaccuagcuagcauccucuucaauuccaacuagaaagcuuaccaugagcagaagaaaccccugcaaguucgagaucagaggccacugccugaacggcaagagaugccacuucagccacaacuacuucgaguggcccccccacgcccugcuggugagacagaacuucaugcugaacagaauccugaagagcauggacaagagcaucgacacccugagcgagaucagcggcgccgccgagcuggacagaaccgaggaguacgcccugggcguggugggcgugcuggagagcuacaucggcagcaucaacaacaucaccaagcagagcgccugcguggccaugagcaagcugcugaccgagcugaacagcgacgacaucaagaagcugagagacaacgaggagcugaacagccccaagaucagaguguacaacaccgugaucagcuacaucgagagcaacagaaagaacaacaagcagaccauccaccugcugaagagacugcccgccgacgugcugaagaagaccaucaagaacacccuggacauccacaagagcaucaccaucaacaaccccaaggagagcaccgugagcgacaccaacgaccacgccaagaacaacgacaccaccugaggacuagucccuguucccagagcccacuuuuuuuucuuuuuuugaaauaaaauagccugucuuucagaucuaaaaaaaaaaaaaaaaaaaaaaaaaaaaaaaaaaaaaaaaaaaaaaaaaaaaaaaaaaaaaaaaugcaucccccccccccccccccccccccccccccccaaaggcucuuuucagagccaccagaauu

SEQ ID NO: 11213 - RNA, 958 nt, Artificial Sequence
  mRNA product Design a-3 comprising derived and/or modified sequence from HRSV(A2)__P04545.1__M2-1 (opt5)
gggagagggcgcuuggcuugcaaggacccugagcugcggcauugaagcacacccaacccaacucgacugaagucagccucacugaaccggaucugagaaucuucucucucugggcuugccagggcucuccgaaccuagcuagcauccucuucaauuccaacuagaaagcuuaccaugagcagacggaaccccugcaaguucgagauccgcggccacugucugaaugggaaaagaugccauuuuucccacaacuacuucgaauggccuccgcaugcccuccuggugcggcagaauuuuaugcuuaaccgcauucugaagucuauggacaaaagcaucgauacccucuccgagauuucuggagcugccgaacuggacagaacagaggaauaugcgcuuggcgucguuggggugcuggagagcuacaucggauccauuaauaacaucacgaagcaaucugcuuguguggccaugagcaaacuccugaccgagcucaauuccgaugacaucaagaagcugcgggauaacgaggaacugaauagccccaaaauucgcgucuauaacacagugaucucuuacauugaauccaauagaaagaacaauaaacagaccauccaccuucugaagcggcucccugccgacguucugaaaaagacaauuaagaacacccuugauauccauaaaagcauuacaaucaauaaccccaaggagucuaccguguccgacacgaacgaucacgcuaaaaauaacgacaccacaugaggacuagucccuguucccagagcccacuuuuuuuucuuuuuuugaaauaaaauagccugucuuucagaucuaaaaaaaaaaaaaaaaaaaaaaaaaaaaaaaaaaaaaaaaaaaaaaaaaaaaaaaaaaaaaaaaugcaucccccccccccccccccccccccccccccccaaaggcucuuuucagagccaccagaauu

SEQ ID NO: 11214 - RNA, 958 nt, Artificial Sequence
  mRNA product Design a-3 comprising derived and/or modified sequence from HRSV(A2)__P04545.1__M2-1 (opt6)
gggagagggcgcuuggcuugcaaggacccugagcugcggcauugaagcacacccaacccaacucgacugaagucagccucacugaaccggaucugagaaucuucucucucugggcuugccagggcucuccgaaccuagcuagcauccucuucaauuccaacuagaaagcuuaccaugucaagaagaaacccaugcaaauucgaaauaagaggacacugccuaaacggaaaaagaugccacuucucacacaacuacuucgaauggccaccacacgcacuacuuguaagacaaaacuucaugcuaaacagaauacuaaaaucaauggacaaaucaauagacacauuaucagaaauaucaggagcagcagaacucgacagaacagaagaauacgcacuaggaguaguaggaguacuagaaucauacauaggaucaauaaacaacauaacaaaacaaucagcaugcguagccauguccaaacuacuaacagaacuaaacuccgacgacauaaaaaaacuaagagacaacgaagaacuaaacucaccaaaaauaagaguauacaacacaguaauaucauacauagaaucaaacagaaaaaacaauaaacaaacaauacaccuacuaaaaagacucccagcagacguacuaaaaaaaacaauaaaaaacacacuagacauccacaaaucaauaacaauaaacaacccaaaagaaucaacagucucagacaccaacgaccacgcaaaaaacaacgacacaacauaaggacuagucccuguucccagagcccacuuuuuuuucuuuuuuugaaauaaaauagccugucuuucagaucuaaaaaaaaaaaaaaaaaaaaaaaaaaaaaaaaaaaaaaaaaaaaaaaaaaaaaaaaaaaaaaaaugcaucccccccccccccccccccccccccccccccaaaggcucuuuucagagccaccagaauu

SEQ ID NO: 11215 - RNA, 958 nt, Artificial Sequence
  mRNA product Design a-3 comprising derived and/or modified sequence from HRSV(A2)__P04545.1__M2-1 (opt11)
gggagagggcgcuuggcuugcaaggacccugagcugcggcauugaagcacacccaacccaacucgacugaagucagccucacugaaccggaucugagaaucuucucucucugggcuugccagggcucuccgaaccuagcuagcauccucuucaauuccaacuagaaagcuuaccaugucacgacgcaaccccugcaaauucgaaauccgcggccacugccuaaacggcaaacgcugccacuucucccacaacuacuucgaauggcccccccacgcccuccuuguccgccaaaacuucaugcucaaccgcauccucaaauccauggacaaaagcaucgacacccucuccgaaaucuccggcgcagccgaacucgaccgcaccgaagaauacgcccucggcgucguaggcguccucgaauccuacaucggcucaaucaacaacaucaccaaacaauccgccugcgucgccauguccaaacuccucaccgaacucaacuccgacgacaucaaaaaacuccgcgacaacgaagaacucaacucccccaaaauccgagucuacaacaccguaaucuccuacaucgaauccaaccgcaaaaacaacaaacaaaccauccaccuacuaaaacgacuccccgccgacguccucaaaaaaacaaucaaaaacacccucgacauccacaaauccaucaccaucaacaaccccaaagaaucaaccgucuccgacaccaacgaccacgccaaaaacaacgacaccaccugaggacuagucccuguucccagagcccacuuuuuuuucuuuuuuugaaauaaaauagccugucuuucagaucuaaaaaaaaaaaaaaaaaaaaaaaaaaaaaaaaaaaaaaaaaaaaaaaaaaaaaaaaaaaaaaaaugcaucccccccccccccccccccccccccccccccaaaggcucuuuucagagccaccagaauu

SEQ ID NO: 11216 - RNA, 907 nt, Artificial Sequence
  mRNA product Design a-4 comprising derived and/or modified sequence from HRSV(A2)__P04545.1__M2-1 (wt)
gggagacuccugucgggcggaaguaggaggaguagaguuuaaaaacaguacucuuuuuccgguucgggacguaguugaagcaacgacaagccggauaaccgcucuugagacaggaagcuuaccaugucacgaaggaauccuugcaaauuugaaauucgaggucauugcuuaaaugguaagaggugucauuuuagucauaauuauuuugaauggccaccccaugcacugcuuguaagacaaaacuuuauguuaaacagaauacuuaagucuauggauaaaaguauagauaccuuaucagaaauaaguggagcugcagaguuggacagaacagaagaguaugcucuugguguaguuggagugcuagagaguuauauaggaucaauaaacaauauaacuaaacaaucagcauguguugccaugagcaaacuccucacugaacucaauagugaugauaucaaaaagcugagggacaaugaagagcuaaauucacccaagauaagaguguacaauacugucauaucauauauugaaagcaacaggaaaaacaauaaacaaacuauccaucuguuaaaaagauugccagcagacguauugaagaaaaccaucaaaaacacauuggauauccauaagagcauaaccaucaacaacccaaaagaaucaacuguuagugauacaaaugaccaugccaaaaauaaugauacuaccugaggacuagucccuguucccagagcccacuuuuuuuucuuuuuuugaaauaaaauagccugucuuucagaucuaaaaaaaaaaaaaaaaaaaaaaaaaaaaaaaaaaaaaaaaaaaaaaaaaaaaaaaaaaaaaaaaugcaucccccccccccccccccccccccccccccccaaaggcucuuuucagagccaccagaauu

SEQ ID NO: 11217 - RNA, 907 nt, Artificial Sequence
  mRNA product Design a-4 comprising derived and/or modified sequence from HRSV(A2)__P04545.1__M2-1 (opt1)
gggagacuccugucgggcggaaguaggaggaguagaguuuaaaaacaguacucuuuuuccgguucgggacguaguugaagcaacgacaagccggauaaccgcucuugagacaggaagcuuaccaugagccgccggaaccccugcaaguucgagauccgcggccacugccugaacgggaagcggugccacuucucccacaacuacuucgaguggccgccccacgcccuccuggugcgccagaacuucaugcugaaccggauccucaagagcauggacaaguccaucgacacccugagcgagaucuccggcgccgcggagcuggaccgcaccgaggaguacgcccucggggucgugggcgugcuggagagcuacaucggguccaucaacaacaucacgaagcagagcgccugcgucgccauguccaagcugcucaccgagcugaacagcgacgacaucaagaagcugcgggacaacgaggagcucaacucccccaagauccgcguguacaacaccgugaucagcuacaucgaguccaaccggaagaacaacaagcagaccauccaccuccugaagcgccugcccgccgacguccugaagaagacgaucaagaacacccuggacauccacaagagcaucaccaucaacaacccgaaggaguccaccgugagcgacacgaacgaccacgcgaagaacaacgacaccaccugaggacuagucccuguucccagagcccacuuuuuuuucuuuuuuugaaauaaaauagccugucuuucagaucuaaaaaaaaaaaaaaaaaaaaaaaaaaaaaaaaaaaaaaaaaaaaaaaaaaaaaaaaaaaaaaaaugcaucccccccccccccccccccccccccccccccaaaggcucuuuucagagccaccagaauu

SEQ ID NO: 11218 - RNA, 907 nt, Artificial Sequence
  mRNA product Design a-4 comprising derived and/or modified sequence from HRSV(A2)__P04545.1__M2-1 (opt2)
gggagacuccugucgggcggaaguaggaggaguagaguuuaaaaacaguacucuuuuuccgguucgggacguaguugaagcaacgacaagccggauaaccgcucuugagacaggaagcuuaccaugucccgccgcaaccccugcaaguucgagauccgcggccacugccucaacggcaagcgcugccacuucucccacaacuacuucgaguggcccccccacgcccuccucguccgccagaacuucaugcucaaccgcauccucaaguccauggacaaguccaucgacacccucuccgagaucuccggcgccgccgagcucgaccgcaccgaggaguacgcccucggcgucgucggcguccucgaguccuacaucggcuccaucaacaacaucaccaagcaguccgccugcgucgccauguccaagcuccucaccgagcucaacuccgacgacaucaagaagcuccgcgacaacgaggagcucaacucccccaagauccgcgucuacaacaccgucaucuccuacaucgaguccaaccgcaagaacaacaagcagaccauccaccuccucaagcgccuccccgccgacguccucaagaagaccaucaagaacacccucgacauccacaaguccaucaccaucaacaaccccaaggaguccaccgucuccgacaccaacgaccacgccaagaacaacgacaccaccugaggacuagucccuguucccagagcccacuuuuuuuucuuuuuuugaaauaaaauagccugucuuucagaucuaaaaaaaaaaaaaaaaaaaaaaaaaaaaaaaaaaaaaaaaaaaaaaaaaaaaaaaaaaaaaaaaugcaucccccccccccccccccccccccccccccccaaaggcucuuuucagagccaccagaauu

SEQ ID NO: 11219 - RNA, 907 nt, Artificial Sequence
  mRNA product Design a-4 comprising derived and/or modified sequence from HRSV(A2)__P04545.1__M2-1 (opt3)
gggagacuccugucgggcggaaguaggaggaguagaguuuaaaaacaguacucuuuuuccgguucgggacguaguugaagcaacgacaagccggauaaccgcucuugagacaggaagcuuaccaugagcagaaggaaccccugcaaguucgagauccggggccacugucugaaugggaaacgcugccauuuuucccacaacuacuucgaauggccuccacaugcacuccuugugcgacagaauuuuaugcugaaccguauuuugaagucuauggacaaaucaauagauaccuuaagugagaucagcggagcugcagaacuggacagaacagaggaauaugcccuaggugucguuggcgugcucgaguccuacauugggucuaucaauaacauuacuaagcaaucggcguguguagcuaugucaaaacugcuuacggagcugaauagcgaugacaucaagaaguugagggauaacgaagaguuaaauaguccgaaaauacggguguauaacaccgucaucuccuacauugaaucuaaucgcaagaacaauaaacagacaauccaucugcugaagagacuccccgccgacgugcucaaaaagacuauuaagaacacccuggauauccacaaaagcauaacaauuaauaacccuaaggaguccaccguuucagacacuaacgaucacgccaaaaauaacgacacaaccugaggacuagucccuguucccagagcccacuuuuuuuucuuuuuuugaaauaaaauagccugucuuucagaucuaaaaaaaaaaaaaaaaaaaaaaaaaaaaaaaaaaaaaaaaaaaaaaaaaaaaaaaaaaaaaaaaugcaucccccccccccccccccccccccccccccccaaaggcucuuuucagagccaccagaauu

SEQ ID NO: 11220 - RNA, 907 nt, Artificial Sequence
  mRNA product Design a-4 comprising derived and/or modified sequence from HRSV(A2)__P04545.1__M2-1 (opt4)
gggagacuccugucgggcggaaguaggaggaguagaguuuaaaaacaguacucuuuuuccgguucgggacguaguugaagcaacgacaagccggauaaccgcucuugagacaggaagcuuaccaugagcagaagaaaccccugcaaguucgagaucagaggccacugccugaacggcaagagaugccacuucagccacaacuacuucgaguggcccccccacgcccugcuggugagacagaacuucaugcugaacagaauccugaagagcauggacaagagcaucgacacccugagcgagaucagcggcgccgccgagcuggacagaaccgaggaguacgcccugggcguggugggcgugcuggagagcuacaucggcagcaucaacaacaucaccaagcagagcgccugcguggccaugagcaagcugcugaccgagcugaacagcgacgacaucaagaagcugagagacaacgaggagcugaacagccccaagaucagaguguacaacaccgugaucagcuacaucgagagcaacagaaagaacaacaagcagaccauccaccugcugaagagacugcccgccgacgugcugaagaagaccaucaagaacacccuggacauccacaagagcaucaccaucaacaaccccaaggagagcaccgugagcgacaccaacgaccacgccaagaacaacgacaccaccugaggacuagucccuguucccagagcccacuuuuuuuucuuuuuuugaaauaaaauagccugucuuucagaucuaaaaaaaaaaaaaaaaaaaaaaaaaaaaaaaaaaaaaaaaaaaaaaaaaaaaaaaaaaaaaaaaugcaucccccccccccccccccccccccccccccccaaaggcucuuuucagagccaccagaauu

SEQ ID NO: 11221 - RNA, 907 nt, Artificial Sequence
  mRNA product Design a-4 comprising derived and/or modified sequence from HRSV(A2)__P04545.1__M2-1 (opt5)
gggagacuccugucgggcggaaguaggaggaguagaguuuaaaaacaguacucuuuuuccgguucgggacguaguugaagcaacgacaagccggauaaccgcucuugagacaggaagcuuaccaugagcagacggaaccccugcaaguucgagauccgcggccacugucugaaugggaaaagaugccauuuuucccacaacuacuucgaauggccuccgcaugcccuccuggugcggcagaauuuuaugcuuaaccgcauucugaagucuauggacaaaagcaucgauacccucuccgagauuucuggagcugccgaacuggacagaacagaggaauaugcgcuuggcgucguuggggugcuggagagcuacaucggauccauuaauaacaucacgaagcaaucugcuuguguggccaugagcaaacuccugaccgagcucaauuccgaugacaucaagaagcugcgggauaacgaggaacugaauagccccaaaauucgcgucuauaacacagugaucucuuacauugaauccaauagaaagaacaauaaacagaccauccaccuucugaagcggcucccugccgacguucugaaaaagacaauuaagaacacccuugauauccauaaaagcauuacaaucaauaaccccaaggagucuaccguguccgacacgaacgaucacgcuaaaaauaacgacaccacaugaggacuagucccuguucccagagcccacuuuuuuuucuuuuuuugaaauaaaauagccugucuuucagaucuaaaaaaaaaaaaaaaaaaaaaaaaaaaaaaaaaaaaaaaaaaaaaaaaaaaaaaaaaaaaaaaaugcaucccccccccccccccccccccccccccccccaaaggcucuuuucagagccaccagaauu

SEQ ID NO: 11222 - RNA, 907 nt, Artificial Sequence
  mRNA product Design a-4 comprising derived and/or modified sequence from HRSV(A2)__P04545.1__M2-1 (opt6)
gggagacuccugucgggcggaaguaggaggaguagaguuuaaaaacaguacucuuuuuccgguucgggacguaguugaagcaacgacaagccggauaaccgcucuugagacaggaagcuuaccaugucaagaagaaacccaugcaaauucgaaauaagaggacacugccuaaacggaaaaagaugccacuucucacacaacuacuucgaauggccaccacacgcacuacuuguaagacaaaacuucaugcuaaacagaauacuaaaaucaauggacaaaucaauagacacauuaucagaaauaucaggagcagcagaacucgacagaacagaagaauacgcacuaggaguaguaggaguacuagaaucauacauaggaucaauaaacaacauaacaaaacaaucagcaugcguagccauguccaaacuacuaacagaacuaaacuccgacgacauaaaaaaacuaagagacaacgaagaacuaaacucaccaaaaauaagaguauacaacacaguaauaucauacauagaaucaaacagaaaaaacaauaaacaaacaauacaccuacuaaaaagacucccagcagacguacuaaaaaaaacaauaaaaaacacacuagacauccacaaaucaauaacaauaaacaacccaaaagaaucaacagucucagacaccaacgaccacgcaaaaaacaacgacacaacauaaggacuagucccuguucccagagcccacuuuuuuuucuuuuuuugaaauaaaauagccugucuuucagaucuaaaaaaaaaaaaaaaaaaaaaaaaaaaaaaaaaaaaaaaaaaaaaaaaaaaaaaaaaaaaaaaaugcaucccccccccccccccccccccccccccccccaaaggcucuuuucagagccaccagaauu

SEQ ID NO: 11223 - RNA, 907 nt, Artificial Sequence
  mRNA product Design a-4 comprising derived and/or modified sequence from HRSV(A2)__P04545.1__M2-1 (opt11)
gggagacuccugucgggcggaaguaggaggaguagaguuuaaaaacaguacucuuuuuccgguucgggacguaguugaagcaacgacaagccggauaaccgcucuugagacaggaagcuuaccaugucacgacgcaaccccugcaaauucgaaauccgcggccacugccuaaacggcaaacgcugccacuucucccacaacuacuucgaauggcccccccacgcccuccuuguccgccaaaacuucaugcucaaccgcauccucaaauccauggacaaaagcaucgacacccucuccgaaaucuccggcgcagccgaacucgaccgcaccgaagaauacgcccucggcgucguaggcguccucgaauccuacaucggcucaaucaacaacaucaccaaacaauccgccugcgucgccauguccaaacuccucaccgaacucaacuccgacgacaucaaaaaacuccgcgacaacgaagaacucaacucccccaaaauccgagucuacaacaccguaaucuccuacaucgaauccaaccgcaaaaacaacaaacaaaccauccaccuacuaaaacgacuccccgccgacguccucaaaaaaacaaucaaaaacacccucgacauccacaaauccaucaccaucaacaaccccaaagaaucaaccgucuccgacaccaacgaccacgccaaaaacaacgacaccaccugaggacuagucccuguucccagagcccacuuuuuuuucuuuuuuugaaauaaaauagccugucuuucagaucuaaaaaaaaaaaaaaaaaaaaaaaaaaaaaaaaaaaaaaaaaaaaaaaaaaaaaaaaaaaaaaaaugcaucccccccccccccccccccccccccccccccaaaggcucuuuucagagccaccagaauu

SEQ ID NO: 11224 - RNA, 853 nt, Artificial Sequence
  mRNA product Design a-5 comprising derived and/or modified sequence from HRSV(A2)__P04545.1__M2-1 (wt)
gggagacuuucccauucuguagcagaauuugguguugccuguggucuuggucccgcggagaagcuuaccaugucacgaaggaauccuugcaaauuugaaauucgaggucauugcuuaaaugguaagaggugucauuuuagucauaauuauuuugaauggccaccccaugcacugcuuguaagacaaaacuuuauguuaaacagaauacuuaagucuauggauaaaaguauagauaccuuaucagaaauaaguggagcugcagaguuggacagaacagaagaguaugcucuugguguaguuggagugcuagagaguuauauaggaucaauaaacaauauaacuaaacaaucagcauguguugccaugagcaaacuccucacugaacucaauagugaugauaucaaaaagcugagggacaaugaagagcuaaauucacccaagauaagaguguacaauacugucauaucauauauugaaagcaacaggaaaaacaauaaacaaacuauccaucuguuaaaaagauugccagcagacguauugaagaaaaccaucaaaaacacauuggauauccauaagagcauaaccaucaacaacccaaaagaaucaacuguuagugauacaaaugaccaugccaaaaauaaugauacuaccugaggacuagucccuguucccagagcccacuuuuuuuucuuuuuuugaaauaaaauagccugucuuucagaucuaaaaaaaaaaaaaaaaaaaaaaaaaaaaaaaaaaaaaaaaaaaaaaaaaaaaaaaaaaaaaaaaugcaucccccccccccccccccccccccccccccccaaaggcucuuuucagagccaccagaauu

SEQ ID NO: 11225 - RNA, 853 nt, Artificial Sequence
  mRNA product Design a-5 comprising derived and/or modified sequence from HRSV(A2)__P04545.1__M2-1 (opt1)
gggagacuuucccauucuguagcagaauuugguguugccuguggucuuggucccgcggagaagcuuaccaugagccgccggaaccccugcaaguucgagauccgcggccacugccugaacgggaagcggugccacuucucccacaacuacuucgaguggccgccccacgcccuccuggugcgccagaacuucaugcugaaccggauccucaagagcauggacaaguccaucgacacccugagcgagaucuccggcgccgcggagcuggaccgcaccgaggaguacgcccucggggucgugggcgugcuggagagcuacaucggguccaucaacaacaucacgaagcagagcgccugcgucgccauguccaagcugcucaccgagcugaacagcgacgacaucaagaagcugcgggacaacgaggagcucaacucccccaagauccgcguguacaacaccgugaucagcuacaucgaguccaaccggaagaacaacaagcagaccauccaccuccugaagcgccugcccgccgacguccugaagaagacgaucaagaacacccuggacauccacaagagcaucaccaucaacaacccgaaggaguccaccgugagcgacacgaacgaccacgcgaagaacaacgacaccaccugaggacuagucccuguucccagagcccacuuuuuuuucuuuuuuugaaauaaaauagccugucuuucagaucuaaaaaaaaaaaaaaaaaaaaaaaaaaaaaaaaaaaaaaaaaaaaaaaaaaaaaaaaaaaaaaaaugcaucccccccccccccccccccccccccccccccaaaggcucuuuucagagccaccagaauu

SEQ ID NO: 11226 - RNA, 853 nt, Artificial Sequence
  mRNA product Design a-5 comprising derived and/or modified sequence from HRSV(A2)__P04545.1__M2-1 (opt2)
gggagacuuucccauucuguagcagaauuugguguugccuguggucuuggucccgcggagaagcuuaccaugucccgccgcaaccccugcaaguucgagauccgcggccacugccucaacggcaagcgcugccacuucucccacaacuacuucgaguggcccccccacgcccuccucguccgccagaacuucaugcucaaccgcauccucaaguccauggacaaguccaucgacacccucuccgagaucuccggcgccgccgagcucgaccgcaccgaggaguacgcccucggcgucgucggcguccucgaguccuacaucggcuccaucaacaacaucaccaagcaguccgccugcgucgccauguccaagcuccucaccgagcucaacuccgacgacaucaagaagcuccgcgacaacgaggagcucaacucccccaagauccgcgucuacaacaccgucaucuccuacaucgaguccaaccgcaagaacaacaagcagaccauccaccuccucaagcgccuccccgccgacguccucaagaagaccaucaagaacacccucgacauccacaaguccaucaccaucaacaaccccaaggaguccaccgucuccgacaccaacgaccacgccaagaacaacgacaccaccugaggacuagucccuguucccagagcccacuuuuuuuucuuuuuuugaaauaaaauagccugucuuucagaucuaaaaaaaaaaaaaaaaaaaaaaaaaaaaaaaaaaaaaaaaaaaaaaaaaaaaaaaaaaaaaaaaugcaucccccccccccccccccccccccccccccccaaaggcucuuuucagagccaccagaauu

SEQ ID NO: 11227 - RNA, 853 nt, Artificial Sequence
  mRNA product Design a-5 comprising derived and/or modified sequence from HRSV(A2)__P04545.1__M2-1 (opt3)
gggagacuuucccauucuguagcagaauuugguguugccuguggucuuggucccgcggagaagcuuaccaugagcagaaggaaccccugcaaguucgagauccggggccacugucugaaugggaaacgcugccauuuuucccacaacuacuucgaauggccuccacaugcacuccuugugcgacagaauuuuaugcugaaccguauuuugaagucuauggacaaaucaauagauaccuuaagugagaucagcggagcugcagaacuggacagaacagaggaauaugcccuaggugucguuggcgugcucgaguccuacauugggucuaucaauaacauuacuaagcaaucggcguguguagcuaugucaaaacugcuuacggagcugaauagcgaugacaucaagaaguugagggauaacgaagaguuaaauaguccgaaaauacggguguauaacaccgucaucuccuacauugaaucuaaucgcaagaacaauaaacagacaauccaucugcugaagagacuccccgccgacgugcucaaaaagacuauuaagaacacccuggauauccacaaaagcauaacaauuaauaacccuaaggaguccaccguuucagacacuaacgaucacgccaaaaauaacgacacaaccugaggacuagucccuguucccagagcccacuuuuuuuucuuuuuuugaaauaaaauagccugucuuucagaucuaaaaaaaaaaaaaaaaaaaaaaaaaaaaaaaaaaaaaaaaaaaaaaaaaaaaaaaaaaaaaaaaugcaucccccccccccccccccccccccccccccccaaaggcucuuuucagagccaccagaauu

SEQ ID NO: 11228 - RNA, 853 nt, Artificial Sequence
  mRNA product Design a-5 comprising derived and/or modified sequence from HRSV(A2)__P04545.1__M2-1 (opt4)
gggagacuuucccauucuguagcagaauuugguguugccuguggucuuggucccgcggagaagcuuaccaugagcagaagaaaccccugcaaguucgagaucagaggccacugccugaacggcaagagaugccacuucagccacaacuacuucgaguggcccccccacgcccugcuggugagacagaacuucaugcugaacagaauccugaagagcauggacaagagcaucgacacccugagcgagaucagcggcgccgccgagcuggacagaaccgaggaguacgcccugggcguggugggcgugcuggagagcuacaucggcagcaucaacaacaucaccaagcagagcgccugcguggccaugagcaagcugcugaccgagcugaacagcgacgacaucaagaagcugagagacaacgaggagcugaacagccccaagaucagaguguacaacaccgugaucagcuacaucgagagcaacagaaagaacaacaagcagaccauccaccugcugaagagacugcccgccgacgugcugaagaagaccaucaagaacacccuggacauccacaagagcaucaccaucaacaaccccaaggagagcaccgugagcgacaccaacgaccacgccaagaacaacgacaccaccugaggacuagucccuguucccagagcccacuuuuuuuucuuuuuuugaaauaaaauagccugucuuucagaucuaaaaaaaaaaaaaaaaaaaaaaaaaaaaaaaaaaaaaaaaaaaaaaaaaaaaaaaaaaaaaaaaugcaucccccccccccccccccccccccccccccccaaaggcucuuuucagagccaccagaauu

SEQ ID NO: 11229 - RNA, 853 nt, Artificial Sequence
  mRNA product Design a-5 comprising derived and/or modified sequence from HRSV(A2)__P04545.1__M2-1 (opt5)
gggagacuuucccauucuguagcagaauuugguguugccuguggucuuggucccgcggagaagcuuaccaugagcagacggaaccccugcaaguucgagauccgcggccacugucugaaugggaaaagaugccauuuuucccacaacuacuucgaauggccuccgcaugcccuccuggugcggcagaauuuuaugcuuaaccgcauucugaagucuauggacaaaagcaucgauacccucuccgagauuucuggagcugccgaacuggacagaacagaggaauaugcgcuuggcgucguuggggugcuggagagcuacaucggauccauuaauaacaucacgaagcaaucugcuuguguggccaugagcaaacuccugaccgagcucaauuccgaugacaucaagaagcugcgggauaacgaggaacugaauagccccaaaauucgcgucuauaacacagugaucucuuacauugaauccaauagaaagaacaauaaacagaccauccaccuucugaagcggcucccugccgacguucugaaaaagacaauuaagaacacccuugauauccauaaaagcauuacaaucaauaaccccaaggagucuaccguguccgacacgaacgaucacgcuaaaaauaacgacaccacaugaggacuagucccuguucccagagcccacuuuuuuuucuuuuuuugaaauaaaauagccugucuuucagaucuaaaaaaaaaaaaaaaaaaaaaaaaaaaaaaaaaaaaaaaaaaaaaaaaaaaaaaaaaaaaaaaaugcaucccccccccccccccccccccccccccccccaaaggcucuuuucagagccaccagaauu

SEQ ID NO: 11230 - RNA, 853 nt, Artificial Sequence
  mRNA product Design a-5 comprising derived and/or modified sequence from HRSV(A2)__P04545.1__M2-1 (opt6)
gggagacuuucccauucuguagcagaauuugguguugccuguggucuuggucccgcggagaagcuuaccaugucaagaagaaacccaugcaaauucgaaauaagaggacacugccuaaacggaaaaagaugccacuucucacacaacuacuucgaauggccaccacacgcacuacuuguaagacaaaacuucaugcuaaacagaauacuaaaaucaauggacaaaucaauagacacauuaucagaaauaucaggagcagcagaacucgacagaacagaagaauacgcacuaggaguaguaggaguacuagaaucauacauaggaucaauaaacaacauaacaaaacaaucagcaugcguagccauguccaaacuacuaacagaacuaaacuccgacgacauaaaaaaacuaagagacaacgaagaacuaaacucaccaaaaauaagaguauacaacacaguaauaucauacauagaaucaaacagaaaaaacaauaaacaaacaauacaccuacuaaaaagacucccagcagacguacuaaaaaaaacaauaaaaaacacacuagacauccacaaaucaauaacaauaaacaacccaaaagaaucaacagucucagacaccaacgaccacgcaaaaaacaacgacacaacauaaggacuagucccuguucccagagcccacuuuuuuuucuuuuuuugaaauaaaauagccugucuuucagaucuaaaaaaaaaaaaaaaaaaaaaaaaaaaaaaaaaaaaaaaaaaaaaaaaaaaaaaaaaaaaaaaaugcaucccccccccccccccccccccccccccccccaaaggcucuuuucagagccaccagaauu

SEQ ID NO: 11231 - RNA, 853 nt, Artificial Sequence
  mRNA product Design a-5 comprising derived and/or modified sequence from HRSV(A2)__P04545.1__M2-1 (opt11)
gggagacuuucccauucuguagcagaauuugguguugccuguggucuuggucccgcggagaagcuuaccaugucacgacgcaaccccugcaaauucgaaauccgcggccacugccuaaacggcaaacgcugccacuucucccacaacuacuucgaauggcccccccacgcccuccuuguccgccaaaacuucaugcucaaccgcauccucaaauccauggacaaaagcaucgacacccucuccgaaaucuccggcgcagccgaacucgaccgcaccgaagaauacgcccucggcgucguaggcguccucgaauccuacaucggcucaaucaacaacaucaccaaacaauccgccugcgucgccauguccaaacuccucaccgaacucaacuccgacgacaucaaaaaacuccgcgacaacgaagaacucaacucccccaaaauccgagucuacaacaccguaaucuccuacaucgaauccaaccgcaaaaacaacaaacaaaccauccaccuacuaaaacgacuccccgccgacguccucaaaaaaacaaucaaaaacacccucgacauccacaaauccaucaccaucaacaaccccaaagaaucaaccgucuccgacaccaacgaccacgccaaaaacaacgacaccaccugaggacuagucccuguucccagagcccacuuuuuuuucuuuuuuugaaauaaaauagccugucuuucagaucuaaaaaaaaaaaaaaaaaaaaaaaaaaaaaaaaaaaaaaaaaaaaaaaaaaaaaaaaaaaaaaaaugcaucccccccccccccccccccccccccccccccaaaggcucuuuucagagccaccagaauu

SEQ ID NO: 11232 - RNA, 1034 nt, Artificial Sequence
  mRNA product Design b-1 comprising derived and/or modified sequence from HRSV(A2)__P04545.1__M2-1 (wt)
gggagacggagacggccugcaggaccugcucucucagcccucagccgaggccuacgccgagccgagugcgcagccgacgaccgggaggagccgcagccuucaacucugagguacugugauccgcgcugcccgccgggccgccccaguccgcugcugcggcaccuccuucccucgcgcccucuucgcucgccagcgccuucccugugagccugcgucaccgcggccgccaagcuuaccaugucacgaaggaauccuugcaaauuugaaauucgaggucauugcuuaaaugguaagaggugucauuuuagucauaauuauuuugaauggccaccccaugcacugcuuguaagacaaaacuuuauguuaaacagaauacuuaagucuauggauaaaaguauagauaccuuaucagaaauaaguggagcugcagaguuggacagaacagaagaguaugcucuugguguaguuggagugcuagagaguuauauaggaucaauaaacaauauaacuaaacaaucagcauguguugccaugagcaaacuccucacugaacucaauagugaugauaucaaaaagcugagggacaaugaagagcuaaauucacccaagauaagaguguacaauacugucauaucauauauugaaagcaacaggaaaaacaauaaacaaacuauccaucuguuaaaaagauugccagcagacguauugaagaaaaccaucaaaaacacauuggauauccauaagagcauaaccaucaacaacccaaaagaaucaacuguuagugauacaaaugaccaugccaaaaauaaugauacuaccugaggacuaguguccaccugucccuccugggcugcuggauugucucguuuuccugccaaauaaacaggaucagcgcuuuacagaucuaaaaaaaaaaaaaaaaaaaaaaaaaaaaaaaaaaaaaaaaaaaaaaaaaaaaaaaaaaaaaaaaugcaucccccccccccccccccccccccccccccccaaaggcucuuuucagagccaccagaauu

SEQ ID NO: 11233 - RNA, 1034 nt, Artificial Sequence
  mRNA product Design b-1 comprising derived and/or modified sequence from HRSV(A2)__P04545.1__M2-1 (opt1)
gggagacggagacggccugcaggaccugcucucucagcccucagccgaggccuacgccgagccgagugcgcagccgacgaccgggaggagccgcagccuucaacucugagguacugugauccgcgcugcccgccgggccgccccaguccgcugcugcggcaccuccuucccucgcgcccucuucgcucgccagcgccuucccugugagccugcgucaccgcggccgccaagcuuaccaugagccgccggaaccccugcaaguucgagauccgcggccacugccugaacgggaagcggugccacuucucccacaacuacuucgaguggccgccccacgcccuccuggugcgccagaacuucaugcugaaccggauccucaagagcauggacaaguccaucgacacccugagcgagaucuccggcgccgcggagcuggaccgcaccgaggaguacgcccucggggucgugggcgugcuggagagcuacaucggguccaucaacaacaucacgaagcagagcgccugcgucgccauguccaagcugcucaccgagcugaacagcgacgacaucaagaagcugcgggacaacgaggagcucaacucccccaagauccgcguguacaacaccgugaucagcuacaucgaguccaaccggaagaacaacaagcagaccauccaccuccugaagcgccugcccgccgacguccugaagaagacgaucaagaacacccuggacauccacaagagcaucaccaucaacaacccgaaggaguccaccgugagcgacacgaacgaccacgcgaagaacaacgacaccaccugaggacuaguguccaccugucccuccugggcugcuggauugucucguuuuccugccaaauaaacaggaucagcgcuuuacagaucuaaaaaaaaaaaaaaaaaaaaaaaaaaaaaaaaaaaaaaaaaaaaaaaaaaaaaaaaaaaaaaaaugcaucccccccccccccccccccccccccccccccaaaggcucuuuucagagccaccagaauu

SEQ ID NO: 11234 - RNA, 1034 nt, Artificial Sequence
  mRNA product Design b-1 comprising derived and/or modified sequence from HRSV(A2)__P04545.1__M2-1 (opt2)
gggagacggagacggccugcaggaccugcucucucagcccucagccgaggccuacgccgagccgagugcgcagccgacgaccgggaggagccgcagccuucaacucugagguacugugauccgcgcugcccgccgggccgccccaguccgcugcugcggcaccuccuucccucgcgcccucuucgcucgccagcgccuucccugugagccugcgucaccgcggccgccaagcuuaccaugucccgccgcaaccccugcaaguucgagauccgcggccacugccucaacggcaagcgcugccacuucucccacaacuacuucgaguggcccccccacgcccuccucguccgccagaacuucaugcucaaccgcauccucaaguccauggacaaguccaucgacacccucuccgagaucuccggcgccgccgagcucgaccgcaccgaggaguacgcccucggcgucgucggcguccucgaguccuacaucggcuccaucaacaacaucaccaagcaguccgccugcgucgccauguccaagcuccucaccgagcucaacuccgacgacaucaagaagcuccgcgacaacgaggagcucaacucccccaagauccgcgucuacaacaccgucaucuccuacaucgaguccaaccgcaagaacaacaagcagaccauccaccuccucaagcgccuccccgccgacguccucaagaagaccaucaagaacacccucgacauccacaaguccaucaccaucaacaaccccaaggaguccaccgucuccgacaccaacgaccacgccaagaacaacgacaccaccugaggacuaguguccaccugucccuccugggcugcuggauugucucguuuuccugccaaauaaacaggaucagcgcuuuacagaucuaaaaaaaaaaaaaaaaaaaaaaaaaaaaaaaaaaaaaaaaaaaaaaaaaaaaaaaaaaaaaaaaugcaucccccccccccccccccccccccccccccccaaaggcucuuuucagagccaccagaauu

SEQ ID NO: 11235 - RNA, 1034 nt, Artificial Sequence
  mRNA product Design b-1 comprising derived and/or modified sequence from HRSV(A2)__P04545.1__M2-1 (opt3)
gggagacggagacggccugcaggaccugcucucucagcccucagccgaggccuacgccgagccgagugcgcagccgacgaccgggaggagccgcagccuucaacucugagguacugugauccgcgcugcccgccgggccgccccaguccgcugcugcggcaccuccuucccucgcgcccucuucgcucgccagcgccuucccugugagccugcgucaccgcggccgccaagcuuaccaugagcagaaggaaccccugcaaguucgagauccggggccacugucugaaugggaaacgcugccauuuuucccacaacuacuucgaauggccuccacaugcacuccuugugcgacagaauuuuaugcugaaccguauuuugaagucuauggacaaaucaauagauaccuuaagugagaucagcggagcugcagaacuggacagaacagaggaauaugcccuaggugucguuggcgugcucgaguccuacauugggucuaucaauaacauuacuaagcaaucggcguguguagcuaugucaaaacugcuuacggagcugaauagcgaugacaucaagaaguugagggauaacgaagaguuaaauaguccgaaaauacggguguauaacaccgucaucuccuacauugaaucuaaucgcaagaacaauaaacagacaauccaucugcugaagagacuccccgccgacgugcucaaaaagacuauuaagaacacccuggauauccacaaaagcauaacaauuaauaacccuaaggaguccaccguuucagacacuaacgaucacgccaaaaauaacgacacaaccugaggacuaguguccaccugucccuccugggcugcuggauugucucguuuuccugccaaauaaacaggaucagcgcuuuacagaucuaaaaaaaaaaaaaaaaaaaaaaaaaaaaaaaaaaaaaaaaaaaaaaaaaaaaaaaaaaaaaaaaugcaucccccccccccccccccccccccccccccccaaaggcucuuuucagagccaccagaauu

SEQ ID NO: 11236 - RNA, 1034 nt, Artificial Sequence
  mRNA product Design b-1 comprising derived and/or modified sequence from HRSV(A2)__P04545.1__M2-1 (opt4)
gggagacggagacggccugcaggaccugcucucucagcccucagccgaggccuacgccgagccgagugcgcagccgacgaccgggaggagccgcagccuucaacucugagguacugugauccgcgcugcccgccgggccgccccaguccgcugcugcggcaccuccuucccucgcgcccucuucgcucgccagcgccuucccugugagccugcgucaccgcggccgccaagcuuaccaugagcagaagaaaccccugcaaguucgagaucagaggccacugccugaacggcaagagaugccacuucagccacaacuacuucgaguggcccccccacgcccugcuggugagacagaacuucaugcugaacagaauccugaagagcauggacaagagcaucgacacccugagcgagaucagcggcgccgccgagcuggacagaaccgaggaguacgcccugggcguggugggcgugcuggagagcuacaucggcagcaucaacaacaucaccaagcagagcgccugcguggccaugagcaagcugcugaccgagcugaacagcgacgacaucaagaagcugagagacaacgaggagcugaacagccccaagaucagaguguacaacaccgugaucagcuacaucgagagcaacagaaagaacaacaagcagaccauccaccugcugaagagacugcccgccgacgugcugaagaagaccaucaagaacacccuggacauccacaagagcaucaccaucaacaaccccaaggagagcaccgugagcgacaccaacgaccacgccaagaacaacgacaccaccugaggacuaguguccaccugucccuccugggcugcuggauugucucguuuuccugccaaauaaacaggaucagcgcuuuacagaucuaaaaaaaaaaaaaaaaaaaaaaaaaaaaaaaaaaaaaaaaaaaaaaaaaaaaaaaaaaaaaaaaugcaucccccccccccccccccccccccccccccccaaaggcucuuuucagagccaccagaauu

SEQ ID NO: 11237 - RNA, 1034 nt, Artificial Sequence
  mRNA product Design b-1 comprising derived and/or modified sequence from HRSV(A2)__P04545.1__M2-1 (opt5)
gggagacggagacggccugcaggaccugcucucucagcccucagccgaggccuacgccgagccgagugcgcagccgacgaccgggaggagccgcagccuucaacucugagguacugugauccgcgcugcccgccgggccgccccaguccgcugcugcggcaccuccuucccucgcgcccucuucgcucgccagcgccuucccugugagccugcgucaccgcggccgccaagcuuaccaugagcagacggaaccccugcaaguucgagauccgcggccacugucugaaugggaaaagaugccauuuuucccacaacuacuucgaauggccuccgcaugcccuccuggugcggcagaauuuuaugcuuaaccgcauucugaagucuauggacaaaagcaucgauacccucuccgagauuucuggagcugccgaacuggacagaacagaggaauaugcgcuuggcgucguuggggugcuggagagcuacaucggauccauuaauaacaucacgaagcaaucugcuuguguggccaugagcaaacuccugaccgagcucaauuccgaugacaucaagaagcugcgggauaacgaggaacugaauagccccaaaauucgcgucuauaacacagugaucucuuacauugaauccaauagaaagaacaauaaacagaccauccaccuucugaagcggcucccugccgacguucugaaaaagacaauuaagaacacccuugauauccauaaaagcauuacaaucaauaaccccaaggagucuaccguguccgacacgaacgaucacgcuaaaaauaacgacaccacaugaggacuaguguccaccugucccuccugggcugcuggauugucucguuuuccugccaaauaaacaggaucagcgcuuuacagaucuaaaaaaaaaaaaaaaaaaaaaaaaaaaaaaaaaaaaaaaaaaaaaaaaaaaaaaaaaaaaaaaaugcaucccccccccccccccccccccccccccccccaaaggcucuuuucagagccaccagaauu

SEQ ID NO: 11238 - RNA, 1034 nt, Artificial Sequence
  mRNA product Design b-1 comprising derived and/or modified sequence from HRSV(A2)__P04545.1__M2-1 (opt6)
gggagacggagacggccugcaggaccugcucucucagcccucagccgaggccuacgccgagccgagugcgcagccgacgaccgggaggagccgcagccuucaacucugagguacugugauccgcgcugcccgccgggccgccccaguccgcugcugcggcaccuccuucccucgcgcccucuucgcucgccagcgccuucccugugagccugcgucaccgcggccgccaagcuuaccaugucaagaagaaacccaugcaaauucgaaauaagaggacacugccuaaacggaaaaagaugccacuucucacacaacuacuucgaauggccaccacacgcacuacuuguaagacaaaacuucaugcuaaacagaauacuaaaaucaauggacaaaucaauagacacauuaucagaaauaucaggagcagcagaacucgacagaacagaagaauacgcacuaggaguaguaggaguacuagaaucauacauaggaucaauaaacaacauaacaaaacaaucagcaugcguagccauguccaaacuacuaacagaacuaaacuccgacgacauaaaaaaacuaagagacaacgaagaacuaaacucaccaaaaauaagaguauacaacacaguaauaucauacauagaaucaaacagaaaaaacaauaaacaaacaauacaccuacuaaaaagacucccagcagacguacuaaaaaaaacaauaaaaaacacacuagacauccacaaaucaauaacaauaaacaacccaaaagaaucaacagucucagacaccaacgaccacgcaaaaaacaacgacacaacauaaggacuaguguccaccugucccuccugggcugcuggauugucucguuuuccugccaaauaaacaggaucagcgcuuuacagaucuaaaaaaaaaaaaaaaaaaaaaaaaaaaaaaaaaaaaaaaaaaaaaaaaaaaaaaaaaaaaaaaaugcaucccccccccccccccccccccccccccccccaaaggcucuuuucagagccaccagaauu

SEQ ID NO: 11239 - RNA, 1034 nt, Artificial Sequence
  mRNA product Design b-1 comprising derived and/or modified sequence from HRSV(A2)__P04545.1__M2-1 (opt11)
gggagacggagacggccugcaggaccugcucucucagcccucagccgaggccuacgccgagccgagugcgcagccgacgaccgggaggagccgcagccuucaacucugagguacugugauccgcgcugcccgccgggccgccccaguccgcugcugcggcaccuccuucccucgcgcccucuucgcucgccagcgccuucccugugagccugcgucaccgcggccgccaagcuuaccaugucacgacgcaaccccugcaaauucgaaauccgcggccacugccuaaacggcaaacgcugccacuucucccacaacuacuucgaauggcccccccacgcccuccuuguccgccaaaacuucaugcucaaccgcauccucaaauccauggacaaaagcaucgacacccucuccgaaaucuccggcgcagccgaacucgaccgcaccgaagaauacgcccucggcgucguaggcguccucgaauccuacaucggcucaaucaacaacaucaccaaacaauccgccugcgucgccauguccaaacuccucaccgaacucaacuccgacgacaucaaaaaacuccgcgacaacgaagaacucaacucccccaaaauccgagucuacaacaccguaaucuccuacaucgaauccaaccgcaaaaacaacaaacaaaccauccaccuacuaaaacgacuccccgccgacguccucaaaaaaacaaucaaaaacacccucgacauccacaaauccaucaccaucaacaaccccaaagaaucaaccgucuccgacaccaacgaccacgccaaaaacaacgacaccaccugaggacuaguguccaccugucccuccugggcugcuggauugucucguuuuccugccaaauaaacaggaucagcgcuuuacagaucuaaaaaaaaaaaaaaaaaaaaaaaaaaaaaaaaaaaaaaaaaaaaaaaaaaaaaaaaaaaaaaaaugcaucccccccccccccccccccccccccccccccaaaggcucuuuucagagccaccagaauu

SEQ ID NO: 11240 - RNA, 854 nt, Artificial Sequence
  mRNA product Design b-2 comprising derived and/or modified sequence from HRSV(A2)__P04545.1__M2-1 (wt)
gggagagccucugcuggaguccggggaguggcguuggcugcuagagcgaagcuuaccaugucacgaaggaauccuugcaaauuugaaauucgaggucauugcuuaaaugguaagaggugucauuuuagucauaauuauuuugaauggccaccccaugcacugcuuguaagacaaaacuuuauguuaaacagaauacuuaagucuauggauaaaaguauagauaccuuaucagaaauaaguggagcugcagaguuggacagaacagaagaguaugcucuugguguaguuggagugcuagagaguuauauaggaucaauaaacaauauaacuaaacaaucagcauguguugccaugagcaaacuccucacugaacucaauagugaugauaucaaaaagcugagggacaaugaagagcuaaauucacccaagauaagaguguacaauacugucauaucauauauugaaagcaacaggaaaaacaauaaacaaacuauccaucuguuaaaaagauugccagcagacguauugaagaaaaccaucaaaaacacauuggauauccauaagagcauaaccaucaacaacccaaaagaaucaacuguuagugauacaaaugaccaugccaaaaauaaugauacuaccugaggacuaguguccaccugucccuccugggcugcuggauugucucguuuuccugccaaauaaacaggaucagcgcuuuacagaucuaaaaaaaaaaaaaaaaaaaaaaaaaaaaaaaaaaaaaaaaaaaaaaaaaaaaaaaaaaaaaaaaugcaucccccccccccccccccccccccccccccccaaaggcucuuuucagagccaccagaauu

SEQ ID NO: 11241 - RNA, 854 nt, Artificial Sequence
  mRNA product Design b-2 comprising derived and/or modified sequence from HRSV(A2)__P04545.1__M2-1 (opt1)
gggagagccucugcuggaguccggggaguggcguuggcugcuagagcgaagcuuaccaugagccgccggaaccccugcaaguucgagauccgcggccacugccugaacgggaagcggugccacuucucccacaacuacuucgaguggccgccccacgcccuccuggugcgccagaacuucaugcugaaccggauccucaagagcauggacaaguccaucgacacccugagcgagaucuccggcgccgcggagcuggaccgcaccgaggaguacgcccucggggucgugggcgugcuggagagcuacaucggguccaucaacaacaucacgaagcagagcgccugcgucgccauguccaagcugcucaccgagcugaacagcgacgacaucaagaagcugcgggacaacgaggagcucaacucccccaagauccgcguguacaacaccgugaucagcuacaucgaguccaaccggaagaacaacaagcagaccauccaccuccugaagcgccugcccgccgacguccugaagaagacgaucaagaacacccuggacauccacaagagcaucaccaucaacaacccgaaggaguccaccgugagcgacacgaacgaccacgcgaagaacaacgacaccaccugaggacuaguguccaccugucccuccugggcugcuggauugucucguuuuccugccaaauaaacaggaucagcgcuuuacagaucuaaaaaaaaaaaaaaaaaaaaaaaaaaaaaaaaaaaaaaaaaaaaaaaaaaaaaaaaaaaaaaaaugcaucccccccccccccccccccccccccccccccaaaggcucuuuucagagccaccagaauu

SEQ ID NO: 11242 - RNA, 854 nt, Artificial Sequence
  mRNA product Design b-2 comprising derived and/or modified sequence from HRSV(A2)__P04545.1__M2-1 (opt2)
gggagagccucugcuggaguccggggaguggcguuggcugcuagagcgaagcuuaccaugucccgccgcaaccccugcaaguucgagauccgcggccacugccucaacggcaagcgcugccacuucucccacaacuacuucgaguggcccccccacgcccuccucguccgccagaacuucaugcucaaccgcauccucaaguccauggacaaguccaucgacacccucuccgagaucuccggcgccgccgagcucgaccgcaccgaggaguacgcccucggcgucgucggcguccucgaguccuacaucggcuccaucaacaacaucaccaagcaguccgccugcgucgccauguccaagcuccucaccgagcucaacuccgacgacaucaagaagcuccgcgacaacgaggagcucaacucccccaagauccgcgucuacaacaccgucaucuccuacaucgaguccaaccgcaagaacaacaagcagaccauccaccuccucaagcgccuccccgccgacguccucaagaagaccaucaagaacacccucgacauccacaaguccaucaccaucaacaaccccaaggaguccaccgucuccgacaccaacgaccacgccaagaacaacgacaccaccugaggacuaguguccaccugucccuccugggcugcuggauugucucguuuuccugccaaauaaacaggaucagcgcuuuacagaucuaaaaaaaaaaaaaaaaaaaaaaaaaaaaaaaaaaaaaaaaaaaaaaaaaaaaaaaaaaaaaaaaugcaucccccccccccccccccccccccccccccccaaaggcucuuuucagagccaccagaauu

SEQ ID NO: 11243 - RNA, 854 nt, Artificial Sequence
  mRNA product Design b-2 comprising derived and/or modified sequence from HRSV(A2)__P04545.1__M2-1 (opt3)
gggagagccucugcuggaguccggggaguggcguuggcugcuagagcgaagcuuaccaugagcagaaggaaccccugcaaguucgagauccggggccacugucugaaugggaaacgcugccauuuuucccacaacuacuucgaauggccuccacaugcacuccuugugcgacagaauuuuaugcugaaccguauuuugaagucuauggacaaaucaauagauaccuuaagugagaucagcggagcugcagaacuggacagaacagaggaauaugcccuaggugucguuggcgugcucgaguccuacauugggucuaucaauaacauuacuaagcaaucggcguguguagcuaugucaaaacugcuuacggagcugaauagcgaugacaucaagaaguugagggauaacgaagaguuaaauaguccgaaaauacggguguauaacaccgucaucuccuacauugaaucuaaucgcaagaacaauaaacagacaauccaucugcugaagagacuccccgccgacgugcucaaaaagacuauuaagaacacccuggauauccacaaaagcauaacaauuaauaacccuaaggaguccaccguuucagacacuaacgaucacgccaaaaauaacgacacaaccugaggacuaguguccaccugucccuccugggcugcuggauugucucguuuuccugccaaauaaacaggaucagcgcuuuacagaucuaaaaaaaaaaaaaaaaaaaaaaaaaaaaaaaaaaaaaaaaaaaaaaaaaaaaaaaaaaaaaaaaugcaucccccccccccccccccccccccccccccccaaaggcucuuuucagagccaccagaauu

SEQ ID NO: 11244 - RNA, 854 nt, Artificial Sequence
  mRNA product Design b-2 comprising derived and/or modified sequence from HRSV(A2)__P04545.1__M2-1 (opt4)
gggagagccucugcuggaguccggggaguggcguuggcugcuagagcgaagcuuaccaugagcagaagaaaccccugcaaguucgagaucagaggccacugccugaacggcaagagaugccacuucagccacaacuacuucgaguggcccccccacgcccugcuggugagacagaacuucaugcugaacagaauccugaagagcauggacaagagcaucgacacccugagcgagaucagcggcgccgccgagcuggacagaaccgaggaguacgcccugggcguggugggcgugcuggagagcuacaucggcagcaucaacaacaucaccaagcagagcgccugcguggccaugagcaagcugcugaccgagcugaacagcgacgacaucaagaagcugagagacaacgaggagcugaacagccccaagaucagaguguacaacaccgugaucagcuacaucgagagcaacagaaagaacaacaagcagaccauccaccugcugaagagacugcccgccgacgugcugaagaagaccaucaagaacacccuggacauccacaagagcaucaccaucaacaaccccaaggagagcaccgugagcgacaccaacgaccacgccaagaacaacgacaccaccugaggacuaguguccaccugucccuccugggcugcuggauugucucguuuuccugccaaauaaacaggaucagcgcuuuacagaucuaaaaaaaaaaaaaaaaaaaaaaaaaaaaaaaaaaaaaaaaaaaaaaaaaaaaaaaaaaaaaaaaugcaucccccccccccccccccccccccccccccccaaaggcucuuuucagagccaccagaauu

SEQ ID NO: 11245 - RNA, 854 nt, Artificial Sequence
  mRNA product Design b-2 comprising derived and/or modified sequence from HRSV(A2)__P04545.1__M2-1 (opt5)
gggagagccucugcuggaguccggggaguggcguuggcugcuagagcgaagcuuaccaugagcagacggaaccccugcaaguucgagauccgcggccacugucugaaugggaaaagaugccauuuuucccacaacuacuucgaauggccuccgcaugcccuccuggugcggcagaauuuuaugcuuaaccgcauucugaagucuauggacaaaagcaucgauacccucuccgagauuucuggagcugccgaacuggacagaacagaggaauaugcgcuuggcgucguuggggugcuggagagcuacaucggauccauuaauaacaucacgaagcaaucugcuuguguggccaugagcaaacuccugaccgagcucaauuccgaugacaucaagaagcugcgggauaacgaggaacugaauagccccaaaauucgcgucuauaacacagugaucucuuacauugaauccaauagaaagaacaauaaacagaccauccaccuucugaagcggcucccugccgacguucugaaaaagacaauuaagaacacccuugauauccauaaaagcauuacaaucaauaaccccaaggagucuaccguguccgacacgaacgaucacgcuaaaaauaacgacaccacaugaggacuaguguccaccugucccuccugggcugcuggauugucucguuuuccugccaaauaaacaggaucagcgcuuuacagaucuaaaaaaaaaaaaaaaaaaaaaaaaaaaaaaaaaaaaaaaaaaaaaaaaaaaaaaaaaaaaaaaaugcaucccccccccccccccccccccccccccccccaaaggcucuuuucagagccaccagaauu

SEQ ID NO: 11246 - RNA, 854 nt, Artificial Sequence
  mRNA product Design b-2 comprising derived and/or modified sequence from HRSV(A2)__P04545.1__M2-1 (opt6)
gggagagccucugcuggaguccggggaguggcguuggcugcuagagcgaagcuuaccaugucaagaagaaacccaugcaaauucgaaauaagaggacacugccuaaacggaaaaagaugccacuucucacacaacuacuucgaauggccaccacacgcacuacuuguaagacaaaacuucaugcuaaacagaauacuaaaaucaauggacaaaucaauagacacauuaucagaaauaucaggagcagcagaacucgacagaacagaagaauacgcacuaggaguaguaggaguacuagaaucauacauaggaucaauaaacaacauaacaaaacaaucagcaugcguagccauguccaaacuacuaacagaacuaaacuccgacgacauaaaaaaacuaagagacaacgaagaacuaaacucaccaaaaauaagaguauacaacacaguaauaucauacauagaaucaaacagaaaaaacaauaaacaaacaauacaccuacuaaaaagacucccagcagacguacuaaaaaaaacaauaaaaaacacacuagacauccacaaaucaauaacaauaaacaacccaaaagaaucaacagucucagacaccaacgaccacgcaaaaaacaacgacacaacauaaggacuaguguccaccugucccuccugggcugcuggauugucucguuuuccugccaaauaaacaggaucagcgcuuuacagaucuaaaaaaaaaaaaaaaaaaaaaaaaaaaaaaaaaaaaaaaaaaaaaaaaaaaaaaaaaaaaaaaaugcaucccccccccccccccccccccccccccccccaaaggcucuuuucagagccaccagaauu

SEQ ID NO: 11247 - RNA, 854 nt, Artificial Sequence
  mRNA product Design b-2 comprising derived and/or modified sequence from HRSV(A2)__P04545.1__M2-1 (opt11)
gggagagccucugcuggaguccggggaguggcguuggcugcuagagcgaagcuuaccaugucacgacgcaaccccugcaaauucgaaauccgcggccacugccuaaacggcaaacgcugccacuucucccacaacuacuucgaauggcccccccacgcccuccuuguccgccaaaacuucaugcucaaccgcauccucaaauccauggacaaaagcaucgacacccucuccgaaaucuccggcgcagccgaacucgaccgcaccgaagaauacgcccucggcgucguaggcguccucgaauccuacaucggcucaaucaacaacaucaccaaacaauccgccugcgucgccauguccaaacuccucaccgaacucaacuccgacgacaucaaaaaacuccgcgacaacgaagaacucaacucccccaaaauccgagucuacaacaccguaaucuccuacaucgaauccaaccgcaaaaacaacaaacaaaccauccaccuacuaaaacgacuccccgccgacguccucaaaaaaacaaucaaaaacacccucgacauccacaaauccaucaccaucaacaaccccaaagaaucaaccgucuccgacaccaacgaccacgccaaaaacaacgacaccaccugaggacuaguguccaccugucccuccugggcugcuggauugucucguuuuccugccaaauaaacaggaucagcgcuuuacagaucuaaaaaaaaaaaaaaaaaaaaaaaaaaaaaaaaaaaaaaaaaaaaaaaaaaaaaaaaaaaaaaaaugcaucccccccccccccccccccccccccccccccaaaggcucuuuucagagccaccagaauu

SEQ ID NO: 11248 - RNA, 874 nt, Artificial Sequence
  mRNA product Design b-3 comprising derived and/or modified sequence from HRSV(A2)__P04545.1__M2-1 (wt)
gggagagucccgcagucggcguccagcggcucugcuuguucgugugugugucguugcaggccuuauucaagcuuaccaugucacgaaggaauccuugcaaauuugaaauucgaggucauugcuuaaaugguaagaggugucauuuuagucauaauuauuuugaauggccaccccaugcacugcuuguaagacaaaacuuuauguuaaacagaauacuuaagucuauggauaaaaguauagauaccuuaucagaaauaaguggagcugcagaguuggacagaacagaagaguaugcucuugguguaguuggagugcuagagaguuauauaggaucaauaaacaauauaacuaaacaaucagcauguguugccaugagcaaacuccucacugaacucaauagugaugauaucaaaaagcugagggacaaugaagagcuaaauucacccaagauaagaguguacaauacugucauaucauauauugaaagcaacaggaaaaacaauaaacaaacuauccaucuguuaaaaagauugccagcagacguauugaagaaaaccaucaaaaacacauuggauauccauaagagcauaaccaucaacaacccaaaagaaucaacuguuagugauacaaaugaccaugccaaaaauaaugauacuaccugaggacuaguguccaccugucccuccugggcugcuggauugucucguuuuccugccaaauaaacaggaucagcgcuuuacagaucuaaaaaaaaaaaaaaaaaaaaaaaaaaaaaaaaaaaaaaaaaaaaaaaaaaaaaaaaaaaaaaaaugcaucccccccccccccccccccccccccccccccaaaggcucuuuucagagccaccagaauu

SEQ ID NO: 11249 - RNA, 874 nt, Artificial Sequence
  mRNA product Design b-3 comprising derived and/or modified sequence from HRSV(A2)__P04545.1__M2-1 (opt1)
gggagagucccgcagucggcguccagcggcucugcuuguucgugugugugucguugcaggccuuauucaagcuuaccaugagccgccggaaccccugcaaguucgagauccgcggccacugccugaacgggaagcggugccacuucucccacaacuacuucgaguggccgccccacgcccuccuggugcgccagaacuucaugcugaaccggauccucaagagcauggacaaguccaucgacacccugagcgagaucuccggcgccgcggagcuggaccgcaccgaggaguacgcccucggggucgugggcgugcuggagagcuacaucggguccaucaacaacaucacgaagcagagcgccugcgucgccauguccaagcugcucaccgagcugaacagcgacgacaucaagaagcugcgggacaacgaggagcucaacucccccaagauccgcguguacaacaccgugaucagcuacaucgaguccaaccggaagaacaacaagcagaccauccaccuccugaagcgccugcccgccgacguccugaagaagacgaucaagaacacccuggacauccacaagagcaucaccaucaacaacccgaaggaguccaccgugagcgacacgaacgaccacgcgaagaacaacgacaccaccugaggacuaguguccaccugucccuccugggcugcuggauugucucguuuuccugccaaauaaacaggaucagcgcuuuacagaucuaaaaaaaaaaaaaaaaaaaaaaaaaaaaaaaaaaaaaaaaaaaaaaaaaaaaaaaaaaaaaaaaugcaucccccccccccccccccccccccccccccccaaaggcucuuuucagagccaccagaauu

SEQ ID NO: 11250 - RNA, 874 nt, Artificial Sequence
  mRNA product Design b-3 comprising derived and/or modified sequence from HRSV(A2)__P04545.1__M2-1 (opt2)
gggagagucccgcagucggcguccagcggcucugcuuguucgugugugugucguugcaggccuuauucaagcuuaccaugucccgccgcaaccccugcaaguucgagauccgcggccacugccucaacggcaagcgcugccacuucucccacaacuacuucgaguggcccccccacgcccuccucguccgccagaacuucaugcucaaccgcauccucaaguccauggacaaguccaucgacacccucuccgagaucuccggcgccgccgagcucgaccgcaccgaggaguacgcccucggcgucgucggcguccucgaguccuacaucggcuccaucaacaacaucaccaagcaguccgccugcgucgccauguccaagcuccucaccgagcucaacuccgacgacaucaagaagcuccgcgacaacgaggagcucaacucccccaagauccgcgucuacaacaccgucaucuccuacaucgaguccaaccgcaagaacaacaagcagaccauccaccuccucaagcgccuccccgccgacguccucaagaagaccaucaagaacacccucgacauccacaaguccaucaccaucaacaaccccaaggaguccaccgucuccgacaccaacgaccacgccaagaacaacgacaccaccugaggacuaguguccaccugucccuccugggcugcuggauugucucguuuuccugccaaauaaacaggaucagcgcuuuacagaucuaaaaaaaaaaaaaaaaaaaaaaaaaaaaaaaaaaaaaaaaaaaaaaaaaaaaaaaaaaaaaaaaugcaucccccccccccccccccccccccccccccccaaaggcucuuuucagagccaccagaauu

SEQ ID NO: 11251 - RNA, 874 nt, Artificial Sequence
  mRNA product Design b-3 comprising derived and/or modified sequence from HRSV(A2)__P04545.1__M2-1 (opt3)
gggagagucccgcagucggcguccagcggcucugcuuguucgugugugugucguugcaggccuuauucaagcuuaccaugagcagaaggaaccccugcaaguucgagauccggggccacugucugaaugggaaacgcugccauuuuucccacaacuacuucgaauggccuccacaugcacuccuugugcgacagaauuuuaugcugaaccguauuuugaagucuauggacaaaucaauagauaccuuaagugagaucagcggagcugcagaacuggacagaacagaggaauaugcccuaggugucguuggcgugcucgaguccuacauugggucuaucaauaacauuacuaagcaaucggcguguguagcuaugucaaaacugcuuacggagcugaauagcgaugacaucaagaaguugagggauaacgaagaguuaaauaguccgaaaauacggguguauaacaccgucaucuccuacauugaaucuaaucgcaagaacaauaaacagacaauccaucugcugaagagacuccccgccgacgugcucaaaaagacuauuaagaacacccuggauauccacaaaagcauaacaauuaauaacccuaaggaguccaccguuucagacacuaacgaucacgccaaaaauaacgacacaaccugaggacuaguguccaccugucccuccugggcugcuggauugucucguuuuccugccaaauaaacaggaucagcgcuuuacagaucuaaaaaaaaaaaaaaaaaaaaaaaaaaaaaaaaaaaaaaaaaaaaaaaaaaaaaaaaaaaaaaaaugcaucccccccccccccccccccccccccccccccaaaggcucuuuucagagccaccagaauu

SEQ ID NO: 11252 - RNA, 874 nt, Artificial Sequence
  mRNA product Design b-3 comprising derived and/or modified sequence from HRSV(A2)__P04545.1__M2-1 (opt4)
gggagagucccgcagucggcguccagcggcucugcuuguucgugugugugucguugcaggccuuauucaagcuuaccaugagcagaagaaaccccugcaaguucgagaucagaggccacugccugaacggcaagagaugccacuucagccacaacuacuucgaguggcccccccacgcccugcuggugagacagaacuucaugcugaacagaauccugaagagcauggacaagagcaucgacacccugagcgagaucagcggcgccgccgagcuggacagaaccgaggaguacgcccugggcguggugggcgugcuggagagcuacaucggcagcaucaacaacaucaccaagcagagcgccugcguggccaugagcaagcugcugaccgagcugaacagcgacgacaucaagaagcugagagacaacgaggagcugaacagccccaagaucagaguguacaacaccgugaucagcuacaucgagagcaacagaaagaacaacaagcagaccauccaccugcugaagagacugcccgccgacgugcugaagaagaccaucaagaacacccuggacauccacaagagcaucaccaucaacaaccccaaggagagcaccgugagcgacaccaacgaccacgccaagaacaacgacaccaccugaggacuaguguccaccugucccuccugggcugcuggauugucucguuuuccugccaaauaaacaggaucagcgcuuuacagaucuaaaaaaaaaaaaaaaaaaaaaaaaaaaaaaaaaaaaaaaaaaaaaaaaaaaaaaaaaaaaaaaaugcaucccccccccccccccccccccccccccccccaaaggcucuuuucagagccaccagaauu

SEQ ID NO: 11253 - RNA, 874 nt, Artificial Sequence
  mRNA product Design b-3 comprising derived and/or modified sequence from HRSV(A2)__P04545.1__M2-1 (opt5)
gggagagucccgcagucggcguccagcggcucugcuuguucgugugugugucguugcaggccuuauucaagcuuaccaugagcagacggaaccccugcaaguucgagauccgcggccacugucugaaugggaaaagaugccauuuuucccacaacuacuucgaauggccuccgcaugcccuccuggugcggcagaauuuuaugcuuaaccgcauucugaagucuauggacaaaagcaucgauacccucuccgagauuucuggagcugccgaacuggacagaacagaggaauaugcgcuuggcgucguuggggugcuggagagcuacaucggauccauuaauaacaucacgaagcaaucugcuuguguggccaugagcaaacuccugaccgagcucaauuccgaugacaucaagaagcugcgggauaacgaggaacugaauagccccaaaauucgcgucuauaacacagugaucucuuacauugaauccaauagaaagaacaauaaacagaccauccaccuucugaagcggcucccugccgacguucugaaaaagacaauuaagaacacccuugauauccauaaaagcauuacaaucaauaaccccaaggagucuaccguguccgacacgaacgaucacgcuaaaaauaacgacaccacaugaggacuaguguccaccugucccuccugggcugcuggauugucucguuuuccugccaaauaaacaggaucagcgcuuuacagaucuaaaaaaaaaaaaaaaaaaaaaaaaaaaaaaaaaaaaaaaaaaaaaaaaaaaaaaaaaaaaaaaaugcaucccccccccccccccccccccccccccccccaaaggcucuuuucagagccaccagaauu

SEQ ID NO: 11254 - RNA, 874 nt, Artificial Sequence
  mRNA product Design b-3 comprising derived and/or modified sequence from HRSV(A2)__P04545.1__M2-1 (opt6)
gggagagucccgcagucggcguccagcggcucugcuuguucgugugugugucguugcaggccuuauucaagcuuaccaugucaagaagaaacccaugcaaauucgaaauaagaggacacugccuaaacggaaaaagaugccacuucucacacaacuacuucgaauggccaccacacgcacuacuuguaagacaaaacuucaugcuaaacagaauacuaaaaucaauggacaaaucaauagacacauuaucagaaauaucaggagcagcagaacucgacagaacagaagaauacgcacuaggaguaguaggaguacuagaaucauacauaggaucaauaaacaacauaacaaaacaaucagcaugcguagccauguccaaacuacuaacagaacuaaacuccgacgacauaaaaaaacuaagagacaacgaagaacuaaacucaccaaaaauaagaguauacaacacaguaauaucauacauagaaucaaacagaaaaaacaauaaacaaacaauacaccuacuaaaaagacucccagcagacguacuaaaaaaaacaauaaaaaacacacuagacauccacaaaucaauaacaauaaacaacccaaaagaaucaacagucucagacaccaacgaccacgcaaaaaacaacgacacaacauaaggacuaguguccaccugucccuccugggcugcuggauugucucguuuuccugccaaauaaacaggaucagcgcuuuacagaucuaaaaaaaaaaaaaaaaaaaaaaaaaaaaaaaaaaaaaaaaaaaaaaaaaaaaaaaaaaaaaaaaugcaucccccccccccccccccccccccccccccccaaaggcucuuuucagagccaccagaauu

SEQ ID NO: 11255 - RNA, 874 nt, Artificial Sequence
  mRNA product Design b-3 comprising derived and/or modified sequence from HRSV(A2)__P04545.1__M2-1 (opt11)
gggagagucccgcagucggcguccagcggcucugcuuguucgugugugugucguugcaggccuuauucaagcuuaccaugucacgacgcaaccccugcaaauucgaaauccgcggccacugccuaaacggcaaacgcugccacuucucccacaacuacuucgaauggcccccccacgcccuccuuguccgccaaaacuucaugcucaaccgcauccucaaauccauggacaaaagcaucgacacccucuccgaaaucuccggcgcagccgaacucgaccgcaccgaagaauacgcccucggcgucguaggcguccucgaauccuacaucggcucaaucaacaacaucaccaaacaauccgccugcgucgccauguccaaacuccucaccgaacucaacuccgacgacaucaaaaaacuccgcgacaacgaagaacucaacucccccaaaauccgagucuacaacaccguaaucuccuacaucgaauccaaccgcaaaaacaacaaacaaaccauccaccuacuaaaacgacuccccgccgacguccucaaaaaaacaaucaaaaacacccucgacauccacaaauccaucaccaucaacaaccccaaagaaucaaccgucuccgacaccaacgaccacgccaaaaacaacgacaccaccugaggacuaguguccaccugucccuccugggcugcuggauugucucguuuuccugccaaauaaacaggaucagcgcuuuacagaucuaaaaaaaaaaaaaaaaaaaaaaaaaaaaaaaaaaaaaaaaaaaaaaaaaaaaaaaaaaaaaaaaugcaucccccccccccccccccccccccccccccccaaaggcucuuuucagagccaccagaauu

SEQ ID NO: 11256 - RNA, 925 nt, Artificial Sequence
  mRNA product Design b-4 comprising derived and/or modified sequence from HRSV(A2)__P04545.1__M2-1 (wt)
gggagagucccgcagucggcguccagcggcucugcuuguucgugugugugucguugcaggccuuauucaagcuuaccaugucacgaaggaauccuugcaaauuugaaauucgaggucauugcuuaaaugguaagaggugucauuuuagucauaauuauuuugaauggccaccccaugcacugcuuguaagacaaaacuuuauguuaaacagaauacuuaagucuauggauaaaaguauagauaccuuaucagaaauaaguggagcugcagaguuggacagaacagaagaguaugcucuugguguaguuggagugcuagagaguuauauaggaucaauaaacaauauaacuaaacaaucagcauguguugccaugagcaaacuccucacugaacucaauagugaugauaucaaaaagcugagggacaaugaagagcuaaauucacccaagauaagaguguacaauacugucauaucauauauugaaagcaacaggaaaaacaauaaacaaacuauccaucuguuaaaaagauugccagcagacguauugaagaaaaccaucaaaaacacauuggauauccauaagagcauaaccaucaacaacccaaaagaaucaacuguuagugauacaaaugaccaugccaaaaauaaugauacuaccugaggacuaguaauaaggaaacuguaugaaugucugugggcaggaagugaagagauccuucuguaaagguuuuuggaauuaugucugcugaauaauaaacuuuuuugaaauaauaaaucugguagaaaaaugagaucuaaaaaaaaaaaaaaaaaaaaaaaaaaaaaaaaaaaaaaaaaaaaaaaaaaaaaaaaaaaaaaaaugcaucccccccccccccccccccccccccccccccaaaggcucuuuucagagccaccagaauu

SEQ ID NO: 11257 - RNA, 925 nt, Artificial Sequence
  mRNA product Design b-4 comprising derived and/or modified sequence from HRSV(A2)__P04545.1__M2-1 (opt1)
gggagagucccgcagucggcguccagcggcucugcuuguucgugugugugucguugcaggccuuauucaagcuuaccaugagccgccggaaccccugcaaguucgagauccgcggccacugccugaacgggaagcggugccacuucucccacaacuacuucgaguggccgccccacgcccuccuggugcgccagaacuucaugcugaaccggauccucaagagcauggacaaguccaucgacacccugagcgagaucuccggcgccgcggagcuggaccgcaccgaggaguacgcccucggggucgugggcgugcuggagagcuacaucggguccaucaacaacaucacgaagcagagcgccugcgucgccauguccaagcugcucaccgagcugaacagcgacgacaucaagaagcugcgggacaacgaggagcucaacucccccaagauccgcguguacaacaccgugaucagcuacaucgaguccaaccggaagaacaacaagcagaccauccaccuccugaagcgccugcccgccgacguccugaagaagacgaucaagaacacccuggacauccacaagagcaucaccaucaacaacccgaaggaguccaccgugagcgacacgaacgaccacgcgaagaacaacgacaccaccugaggacuaguaauaaggaaacuguaugaaugucugugggcaggaagugaagagauccuucuguaaagguuuuuggaauuaugucugcugaauaauaaacuuuuuugaaauaauaaaucugguagaaaaaugagaucuaaaaaaaaaaaaaaaaaaaaaaaaaaaaaaaaaaaaaaaaaaaaaaaaaaaaaaaaaaaaaaaaugcaucccccccccccccccccccccccccccccccaaaggcucuuuucagagccaccagaauu

SEQ ID NO: 11258 - RNA, 925 nt, Artificial Sequence
  mRNA product Design b-4 comprising derived and/or modified sequence from HRSV(A2)__P04545.1__M2-1 (opt2)
gggagagucccgcagucggcguccagcggcucugcuuguucgugugugugucguugcaggccuuauucaagcuuaccaugucccgccgcaaccccugcaaguucgagauccgcggccacugccucaacggcaagcgcugccacuucucccacaacuacuucgaguggcccccccacgcccuccucguccgccagaacuucaugcucaaccgcauccucaaguccauggacaaguccaucgacacccucuccgagaucuccggcgccgccgagcucgaccgcaccgaggaguacgcccucggcgucgucggcguccucgaguccuacaucggcuccaucaacaacaucaccaagcaguccgccugcgucgccauguccaagcuccucaccgagcucaacuccgacgacaucaagaagcuccgcgacaacgaggagcucaacucccccaagauccgcgucuacaacaccgucaucuccuacaucgaguccaaccgcaagaacaacaagcagaccauccaccuccucaagcgccuccccgccgacguccucaagaagaccaucaagaacacccucgacauccacaaguccaucaccaucaacaaccccaaggaguccaccgucuccgacaccaacgaccacgccaagaacaacgacaccaccugaggacuaguaauaaggaaacuguaugaaugucugugggcaggaagugaagagauccuucuguaaagguuuuuggaauuaugucugcugaauaauaaacuuuuuugaaauaauaaaucugguagaaaaaugagaucuaaaaaaaaaaaaaaaaaaaaaaaaaaaaaaaaaaaaaaaaaaaaaaaaaaaaaaaaaaaaaaaaugcaucccccccccccccccccccccccccccccccaaaggcucuuuucagagccaccagaauu

SEQ ID NO: 11259 - RNA, 925 nt, Artificial Sequence
  mRNA product Design b-4 comprising derived and/or modified sequence from HRSV(A2)__P04545.1__M2-1 (opt3)
gggagagucccgcagucggcguccagcggcucugcuuguucgugugugugucguugcaggccuuauucaagcuuaccaugagcagaaggaaccccugcaaguucgagauccggggccacugucugaaugggaaacgcugccauuuuucccacaacuacuucgaauggccuccacaugcacuccuugugcgacagaauuuuaugcugaaccguauuuugaagucuauggacaaaucaauagauaccuuaagugagaucagcggagcugcagaacuggacagaacagaggaauaugcccuaggugucguuggcgugcucgaguccuacauugggucuaucaauaacauuacuaagcaaucggcguguguagcuaugucaaaacugcuuacggagcugaauagcgaugacaucaagaaguugagggauaacgaagaguuaaauaguccgaaaauacggguguauaacaccgucaucuccuacauugaaucuaaucgcaagaacaauaaacagacaauccaucugcugaagagacuccccgccgacgugcucaaaaagacuauuaagaacacccuggauauccacaaaagcauaacaauuaauaacccuaaggaguccaccguuucagacacuaacgaucacgccaaaaauaacgacacaaccugaggacuaguaauaaggaaacuguaugaaugucugugggcaggaagugaagagauccuucuguaaagguuuuuggaauuaugucugcugaauaauaaacuuuuuugaaauaauaaaucugguagaaaaaugagaucuaaaaaaaaaaaaaaaaaaaaaaaaaaaaaaaaaaaaaaaaaaaaaaaaaaaaaaaaaaaaaaaaugcaucccccccccccccccccccccccccccccccaaaggcucuuuucagagccaccagaauu

SEQ ID NO: 11260 - RNA, 925 nt, Artificial Sequence
  mRNA product Design b-4 comprising derived and/or modified sequence from HRSV(A2)__P04545.1__M2-1 (opt4)
gggagagucccgcagucggcguccagcggcucugcuuguucgugugugugucguugcaggccuuauucaagcuuaccaugagcagaagaaaccccugcaaguucgagaucagaggccacugccugaacggcaagagaugccacuucagccacaacuacuucgaguggcccccccacgcccugcuggugagacagaacuucaugcugaacagaauccugaagagcauggacaagagcaucgacacccugagcgagaucagcggcgccgccgagcuggacagaaccgaggaguacgcccugggcguggugggcgugcuggagagcuacaucggcagcaucaacaacaucaccaagcagagcgccugcguggccaugagcaagcugcugaccgagcugaacagcgacgacaucaagaagcugagagacaacgaggagcugaacagccccaagaucagaguguacaacaccgugaucagcuacaucgagagcaacagaaagaacaacaagcagaccauccaccugcugaagagacugcccgccgacgugcugaagaagaccaucaagaacacccuggacauccacaagagcaucaccaucaacaaccccaaggagagcaccgugagcgacaccaacgaccacgccaagaacaacgacaccaccugaggacuaguaauaaggaaacuguaugaaugucugugggcaggaagugaagagauccuucuguaaagguuuuuggaauuaugucugcugaauaauaaacuuuuuugaaauaauaaaucugguagaaaaaugagaucuaaaaaaaaaaaaaaaaaaaaaaaaaaaaaaaaaaaaaaaaaaaaaaaaaaaaaaaaaaaaaaaaugcaucccccccccccccccccccccccccccccccaaaggcucuuuucagagccaccagaauu

SEQ ID NO: 11261 - RNA, 925 nt, Artificial Sequence
  mRNA product Design b-4 comprising derived and/or modified sequence from HRSV(A2)__P04545.1__M2-1 (opt5)
gggagagucccgcagucggcguccagcggcucugcuuguucgugugugugucguugcaggccuuauucaagcuuaccaugagcagacggaaccccugcaaguucgagauccgcggccacugucugaaugggaaaagaugccauuuuucccacaacuacuucgaauggccuccgcaugcccuccuggugcggcagaauuuuaugcuuaaccgcauucugaagucuauggacaaaagcaucgauacccucuccgagauuucuggagcugccgaacuggacagaacagaggaauaugcgcuuggcgucguuggggugcuggagagcuacaucggauccauuaauaacaucacgaagcaaucugcuuguguggccaugagcaaacuccugaccgagcucaauuccgaugacaucaagaagcugcgggauaacgaggaacugaauagccccaaaauucgcgucuauaacacagugaucucuuacauugaauccaauagaaagaacaauaaacagaccauccaccuucugaagcggcucccugccgacguucugaaaaagacaauuaagaacacccuugauauccauaaaagcauuacaaucaauaaccccaaggagucuaccguguccgacacgaacgaucacgcuaaaaauaacgacaccacaugaggacuaguaauaaggaaacuguaugaaugucugugggcaggaagugaagagauccuucuguaaagguuuuuggaauuaugucugcugaauaauaaacuuuuuugaaauaauaaaucugguagaaaaaugagaucuaaaaaaaaaaaaaaaaaaaaaaaaaaaaaaaaaaaaaaaaaaaaaaaaaaaaaaaaaaaaaaaaugcaucccccccccccccccccccccccccccccccaaaggcucuuuucagagccaccagaauu

SEQ ID NO: 11262 - RNA, 925 nt, Artificial Sequence
  mRNA product Design b-4 comprising derived and/or modified sequence from HRSV(A2)__P04545.1__M2-1 (opt6)
gggagagucccgcagucggcguccagcggcucugcuuguucgugugugugucguugcaggccuuauucaagcuuaccaugucaagaagaaacccaugcaaauucgaaauaagaggacacugccuaaacggaaaaagaugccacuucucacacaacuacuucgaauggccaccacacgcacuacuuguaagacaaaacuucaugcuaaacagaauacuaaaaucaauggacaaaucaauagacacauuaucagaaauaucaggagcagcagaacucgacagaacagaagaauacgcacuaggaguaguaggaguacuagaaucauacauaggaucaauaaacaacauaacaaaacaaucagcaugcguagccauguccaaacuacuaacagaacuaaacuccgacgacauaaaaaaacuaagagacaacgaagaacuaaacucaccaaaaauaagaguauacaacacaguaauaucauacauagaaucaaacagaaaaaacaauaaacaaacaauacaccuacuaaaaagacucccagcagacguacuaaaaaaaacaauaaaaaacacacuagacauccacaaaucaauaacaauaaacaacccaaaagaaucaacagucucagacaccaacgaccacgcaaaaaacaacgacacaacauaaggacuaguaauaaggaaacuguaugaaugucugugggcaggaagugaagagauccuucuguaaagguuuuuggaauuaugucugcugaauaauaaacuuuuuugaaauaauaaaucugguagaaaaaugagaucuaaaaaaaaaaaaaaaaaaaaaaaaaaaaaaaaaaaaaaaaaaaaaaaaaaaaaaaaaaaaaaaaugcaucccccccccccccccccccccccccccccccaaaggcucuuuucagagccaccagaauu

SEQ ID NO: 11263 - RNA, 925 nt, Artificial Sequence
  mRNA product Design b-4 comprising derived and/or modified sequence from HRSV(A2)__P04545.1__M2-1 (opt11)
gggagagucccgcagucggcguccagcggcucugcuuguucgugugugugucguugcaggccuuauucaagcuuaccaugucacgacgcaaccccugcaaauucgaaauccgcggccacugccuaaacggcaaacgcugccacuucucccacaacuacuucgaauggcccccccacgcccuccuuguccgccaaaacuucaugcucaaccgcauccucaaauccauggacaaaagcaucgacacccucuccgaaaucuccggcgcagccgaacucgaccgcaccgaagaauacgcccucggcgucguaggcguccucgaauccuacaucggcucaaucaacaacaucaccaaacaauccgccugcgucgccauguccaaacuccucaccgaacucaacuccgacgacaucaaaaaacuccgcgacaacgaagaacucaacucccccaaaauccgagucuacaacaccguaaucuccuacaucgaauccaaccgcaaaaacaacaaacaaaccauccaccuacuaaaacgacuccccgccgacguccucaaaaaaacaaucaaaaacacccucgacauccacaaauccaucaccaucaacaaccccaaagaaucaaccgucuccgacaccaacgaccacgccaaaaacaacgacaccaccugaggacuaguaauaaggaaacuguaugaaugucugugggcaggaagugaagagauccuucuguaaagguuuuuggaauuaugucugcugaauaauaaacuuuuuugaaauaauaaaucugguagaaaaaugagaucuaaaaaaaaaaaaaaaaaaaaaaaaaaaaaaaaaaaaaaaaaaaaaaaaaaaaaaaaaaaaaaaaugcaucccccccccccccccccccccccccccccccaaaggcucuuuucagagccaccagaauu

SEQ ID NO: 11264 - RNA, 987 nt, Artificial Sequence
  mRNA product Design b-5 comprising derived and/or modified sequence from HRSV(A2)__P04545.1__M2-1 (wt)
gggagacuccugucgggcggaaguaggaggaguagaguuuaaaaacaguacucuuuuuccgguucgggacguaguugaagcaacgacaagccggauaaccgcucuugagacaggaagcuuaccaugucacgaaggaauccuugcaaauuugaaauucgaggucauugcuuaaaugguaagaggugucauuuuagucauaauuauuuugaauggccaccccaugcacugcuuguaagacaaaacuuuauguuaaacagaauacuuaagucuauggauaaaaguauagauaccuuaucagaaauaaguggagcugcagaguuggacagaacagaagaguaugcucuugguguaguuggagugcuagagaguuauauaggaucaauaaacaauauaacuaaacaaucagcauguguugccaugagcaaacuccucacugaacucaauagugaugauaucaaaaagcugagggacaaugaagagcuaaauucacccaagauaagaguguacaauacugucauaucauauauugaaagcaacaggaaaaacaauaaacaaacuauccaucuguuaaaaagauugccagcagacguauugaagaaaaccaucaaaaacacauuggauauccauaagagcauaaccaucaacaacccaaaagaaucaacuguuagugauacaaaugaccaugccaaaaauaaugauacuaccugaggacuaguacuggcugcaucucccuuuccucuguccuccauccuucucccaggauggugaagggggaccugguacccagugauccccaccccaggauccuaaaucaugacuuaccugcuaauaaaaacucauuggaaaagugagaagaucuaaaaaaaaaaaaaaaaaaaaaaaaaaaaaaaaaaaaaaaaaaaaaaaaaaaaaaaaaaaaaaaaugcaucccccccccccccccccccccccccccccccaaaggcucuuuucagagccaccagaauu

SEQ ID NO: 11265 - RNA, 987 nt, Artificial Sequence
  mRNA product Design b-5 comprising derived and/or modified sequence from HRSV(A2)__P04545.1__M2-1 (opt1)
gggagacuccugucgggcggaaguaggaggaguagaguuuaaaaacaguacucuuuuuccgguucgggacguaguugaagcaacgacaagccggauaaccgcucuugagacaggaagcuuaccaugagccgccggaaccccugcaaguucgagauccgcggccacugccugaacgggaagcggugccacuucucccacaacuacuucgaguggccgccccacgcccuccuggugcgccagaacuucaugcugaaccggauccucaagagcauggacaaguccaucgacacccugagcgagaucuccggcgccgcggagcuggaccgcaccgaggaguacgcccucggggucgugggcgugcuggagagcuacaucggguccaucaacaacaucacgaagcagagcgccugcgucgccauguccaagcugcucaccgagcugaacagcgacgacaucaagaagcugcgggacaacgaggagcucaacucccccaagauccgcguguacaacaccgugaucagcuacaucgaguccaaccggaagaacaacaagcagaccauccaccuccugaagcgccugcccgccgacguccugaagaagacgaucaagaacacccuggacauccacaagagcaucaccaucaacaacccgaaggaguccaccgugagcgacacgaacgaccacgcgaagaacaacgacaccaccugaggacuaguacuggcugcaucucccuuuccucuguccuccauccuucucccaggauggugaagggggaccugguacccagugauccccaccccaggauccuaaaucaugacuuaccugcuaauaaaaacucauuggaaaagugagaagaucuaaaaaaaaaaaaaaaaaaaaaaaaaaaaaaaaaaaaaaaaaaaaaaaaaaaaaaaaaaaaaaaaugcaucccccccccccccccccccccccccccccccaaaggcucuuuucagagccaccagaauu

SEQ ID NO: 11266 - RNA, 987 nt, Artificial Sequence
  mRNA product Design b-5 comprising derived and/or modified sequence from HRSV(A2)__P04545.1__M2-1 (opt2)
gggagacuccugucgggcggaaguaggaggaguagaguuuaaaaacaguacucuuuuuccgguucgggacguaguugaagcaacgacaagccggauaaccgcucuugagacaggaagcuuaccaugucccgccgcaaccccugcaaguucgagauccgcggccacugccucaacggcaagcgcugccacuucucccacaacuacuucgaguggcccccccacgcccuccucguccgccagaacuucaugcucaaccgcauccucaaguccauggacaaguccaucgacacccucuccgagaucuccggcgccgccgagcucgaccgcaccgaggaguacgcccucggcgucgucggcguccucgaguccuacaucggcuccaucaacaacaucaccaagcaguccgccugcgucgccauguccaagcuccucaccgagcucaacuccgacgacaucaagaagcuccgcgacaacgaggagcucaacucccccaagauccgcgucuacaacaccgucaucuccuacaucgaguccaaccgcaagaacaacaagcagaccauccaccuccucaagcgccuccccgccgacguccucaagaagaccaucaagaacacccucgacauccacaaguccaucaccaucaacaaccccaaggaguccaccgucuccgacaccaacgaccacgccaagaacaacgacaccaccugaggacuaguacuggcugcaucucccuuuccucuguccuccauccuucucccaggauggugaagggggaccugguacccagugauccccaccccaggauccuaaaucaugacuuaccugcuaauaaaaacucauuggaaaagugagaagaucuaaaaaaaaaaaaaaaaaaaaaaaaaaaaaaaaaaaaaaaaaaaaaaaaaaaaaaaaaaaaaaaaugcaucccccccccccccccccccccccccccccccaaaggcucuuuucagagccaccagaauu

SEQ ID NO: 11267 - RNA, 987 nt, Artificial Sequence
  mRNA product Design b-5 comprising derived and/or modified sequence from HRSV(A2)__P04545.1__M2-1 (opt3)
gggagacuccugucgggcggaaguaggaggaguagaguuuaaaaacaguacucuuuuuccgguucgggacguaguugaagcaacgacaagccggauaaccgcucuugagacaggaagcuuaccaugagcagaaggaaccccugcaaguucgagauccggggccacugucugaaugggaaacgcugccauuuuucccacaacuacuucgaauggccuccacaugcacuccuugugcgacagaauuuuaugcugaaccguauuuugaagucuauggacaaaucaauagauaccuuaagugagaucagcggagcugcagaacuggacagaacagaggaauaugcccuaggugucguuggcgugcucgaguccuacauugggucuaucaauaacauuacuaagcaaucggcguguguagcuaugucaaaacugcuuacggagcugaauagcgaugacaucaagaaguugagggauaacgaagaguuaaauaguccgaaaauacggguguauaacaccgucaucuccuacauugaaucuaaucgcaagaacaauaaacagacaauccaucugcugaagagacuccccgccgacgugcucaaaaagacuauuaagaacacccuggauauccacaaaagcauaacaauuaauaacccuaaggaguccaccguuucagacacuaacgaucacgccaaaaauaacgacacaaccugaggacuaguacuggcugcaucucccuuuccucuguccuccauccuucucccaggauggugaagggggaccugguacccagugauccccaccccaggauccuaaaucaugacuuaccugcuaauaaaaacucauuggaaaagugagaagaucuaaaaaaaaaaaaaaaaaaaaaaaaaaaaaaaaaaaaaaaaaaaaaaaaaaaaaaaaaaaaaaaaugcaucccccccccccccccccccccccccccccccaaaggcucuuuucagagccaccagaauu

SEQ ID NO: 11268 - RNA, 987 nt, Artificial Sequence
  mRNA product Design b-5 comprising derived and/or modified sequence from HRSV(A2)__P04545.1__M2-1 (opt4)
gggagacuccugucgggcggaaguaggaggaguagaguuuaaaaacaguacucuuuuuccgguucgggacguaguugaagcaacgacaagccggauaaccgcucuugagacaggaagcuuaccaugagcagaagaaaccccugcaaguucgagaucagaggccacugccugaacggcaagagaugccacuucagccacaacuacuucgaguggcccccccacgcccugcuggugagacagaacuucaugcugaacagaauccugaagagcauggacaagagcaucgacacccugagcgagaucagcggcgccgccgagcuggacagaaccgaggaguacgcccugggcguggugggcgugcuggagagcuacaucggcagcaucaacaacaucaccaagcagagcgccugcguggccaugagcaagcugcugaccgagcugaacagcgacgacaucaagaagcugagagacaacgaggagcugaacagccccaagaucagaguguacaacaccgugaucagcuacaucgagagcaacagaaagaacaacaagcagaccauccaccugcugaagagacugcccgccgacgugcugaagaagaccaucaagaacacccuggacauccacaagagcaucaccaucaacaaccccaaggagagcaccgugagcgacaccaacgaccacgccaagaacaacgacaccaccugaggacuaguacuggcugcaucucccuuuccucuguccuccauccuucucccaggauggugaagggggaccugguacccagugauccccaccccaggauccuaaaucaugacuuaccugcuaauaaaaacucauuggaaaagugagaagaucuaaaaaaaaaaaaaaaaaaaaaaaaaaaaaaaaaaaaaaaaaaaaaaaaaaaaaaaaaaaaaaaaugcaucccccccccccccccccccccccccccccccaaaggcucuuuucagagccaccagaauu

SEQ ID NO: 11269 - RNA, 987 nt, Artificial Sequence
  mRNA product Design b-5 comprising derived and/or modified sequence from HRSV(A2)__P04545.1__M2-1 (opt5)
gggagacuccugucgggcggaaguaggaggaguagaguuuaaaaacaguacucuuuuuccgguucgggacguaguugaagcaacgacaagccggauaaccgcucuugagacaggaagcuuaccaugagcagacggaaccccugcaaguucgagauccgcggccacugucugaaugggaaaagaugccauuuuucccacaacuacuucgaauggccuccgcaugcccuccuggugcggcagaauuuuaugcuuaaccgcauucugaagucuauggacaaaagcaucgauacccucuccgagauuucuggagcugccgaacuggacagaacagaggaauaugcgcuuggcgucguuggggugcuggagagcuacaucggauccauuaauaacaucacgaagcaaucugcuuguguggccaugagcaaacuccugaccgagcucaauuccgaugacaucaagaagcugcgggauaacgaggaacugaauagccccaaaauucgcgucuauaacacagugaucucuuacauugaauccaauagaaagaacaauaaacagaccauccaccuucugaagcggcucccugccgacguucugaaaaagacaauuaagaacacccuugauauccauaaaagcauuacaaucaauaaccccaaggagucuaccguguccgacacgaacgaucacgcuaaaaauaacgacaccacaugaggacuaguacuggcugcaucucccuuuccucuguccuccauccuucucccaggauggugaagggggaccugguacccagugauccccaccccaggauccuaaaucaugacuuaccugcuaauaaaaacucauuggaaaagugagaagaucuaaaaaaaaaaaaaaaaaaaaaaaaaaaaaaaaaaaaaaaaaaaaaaaaaaaaaaaaaaaaaaaaugcaucccccccccccccccccccccccccccccccaaaggcucuuuucagagccaccagaauu

SEQ ID NO: 11270 - RNA, 987 nt, Artificial Sequence
  mRNA product Design b-5 comprising derived and/or modified sequence from HRSV(A2)__P04545.1__M2-1 (opt6)
gggagacuccugucgggcggaaguaggaggaguagaguuuaaaaacaguacucuuuuuccgguucgggacguaguugaagcaacgacaagccggauaaccgcucuugagacaggaagcuuaccaugucaagaagaaacccaugcaaauucgaaauaagaggacacugccuaaacggaaaaagaugccacuucucacacaacuacuucgaauggccaccacacgcacuacuuguaagacaaaacuucaugcuaaacagaauacuaaaaucaauggacaaaucaauagacacauuaucagaaauaucaggagcagcagaacucgacagaacagaagaauacgcacuaggaguaguaggaguacuagaaucauacauaggaucaauaaacaacauaacaaaacaaucagcaugcguagccauguccaaacuacuaacagaacuaaacuccgacgacauaaaaaaacuaagagacaacgaagaacuaaacucaccaaaaauaagaguauacaacacaguaauaucauacauagaaucaaacagaaaaaacaauaaacaaacaauacaccuacuaaaaagacucccagcagacguacuaaaaaaaacaauaaaaaacacacuagacauccacaaaucaauaacaauaaacaacccaaaagaaucaacagucucagacaccaacgaccacgcaaaaaacaacgacacaacauaaggacuaguacuggcugcaucucccuuuccucuguccuccauccuucucccaggauggugaagggggaccugguacccagugauccccaccccaggauccuaaaucaugacuuaccugcuaauaaaaacucauuggaaaagugagaagaucuaaaaaaaaaaaaaaaaaaaaaaaaaaaaaaaaaaaaaaaaaaaaaaaaaaaaaaaaaaaaaaaaugcaucccccccccccccccccccccccccccccccaaaggcucuuuucagagccaccagaauu

SEQ ID NO: 11271 - RNA, 987 nt, Artificial Sequence
  mRNA product Design b-5 comprising derived and/or modified sequence from HRSV(A2)__P04545.1__M2-1 (opt11)
gggagacuccugucgggcggaaguaggaggaguagaguuuaaaaacaguacucuuuuuccgguucgggacguaguugaagcaacgacaagccggauaaccgcucuugagacaggaagcuuaccaugucacgacgcaaccccugcaaauucgaaauccgcggccacugccuaaacggcaaacgcugccacuucucccacaacuacuucgaauggcccccccacgcccuccuuguccgccaaaacuucaugcucaaccgcauccucaaauccauggacaaaagcaucgacacccucuccgaaaucuccggcgcagccgaacucgaccgcaccgaagaauacgcccucggcgucguaggcguccucgaauccuacaucggcucaaucaacaacaucaccaaacaauccgccugcgucgccauguccaaacuccucaccgaacucaacuccgacgacaucaaaaaacuccgcgacaacgaagaacucaacucccccaaaauccgagucuacaacaccguaaucuccuacaucgaauccaaccgcaaaaacaacaaacaaaccauccaccuacuaaaacgacuccccgccgacguccucaaaaaaacaaucaaaaacacccucgacauccacaaauccaucaccaucaacaaccccaaagaaucaaccgucuccgacaccaacgaccacgccaaaaacaacgacaccaccugaggacuaguacuggcugcaucucccuuuccucuguccuccauccuucucccaggauggugaagggggaccugguacccagugauccccaccccaggauccuaaaucaugacuuaccugcuaauaaaaacucauuggaaaagugagaagaucuaaaaaaaaaaaaaaaaaaaaaaaaaaaaaaaaaaaaaaaaaaaaaaaaaaaaaaaaaaaaaaaaugcaucccccccccccccccccccccccccccccccaaaggcucuuuucagagccaccagaauu

SEQ ID NO: 11272 - RNA, 893 nt, Artificial Sequence
  mRNA product Design c-1 comprising derived and/or modified sequence from HRSV(A2)__P04545.1__M2-1 (wt)
gggagaguccgcucagccagguugcagaagcggcuuagcguguguccuaaucuucucucugcguguagguaggccugugccgcaaacaagcuuaccaugucacgaaggaauccuugcaaauuugaaauucgaggucauugcuuaaaugguaagaggugucauuuuagucauaauuauuuugaauggccaccccaugcacugcuuguaagacaaaacuuuauguuaaacagaauacuuaagucuauggauaaaaguauagauaccuuaucagaaauaaguggagcugcagaguuggacagaacagaagaguaugcucuugguguaguuggagugcuagagaguuauauaggaucaauaaacaauauaacuaaacaaucagcauguguugccaugagcaaacuccucacugaacucaauagugaugauaucaaaaagcugagggacaaugaagagcuaaauucacccaagauaagaguguacaauacugucauaucauauauugaaagcaacaggaaaaacaauaaacaaacuauccaucuguuaaaaagauugccagcagacguauugaagaaaaccaucaaaaacacauuggauauccauaagagcauaaccaucaacaacccaaaagaaucaacuguuagugauacaaaugaccaugccaaaaauaaugauacuaccugaggacuaguguccaccugucccuccugggcugcuggauugucucguuuuccugccaaauaaacaggaucagcgcuuuacagaucuaaaaaaaaaaaaaaaaaaaaaaaaaaaaaaaaaaaaaaaaaaaaaaaaaaaaaaaaaaaaaaaaugcaucccccccccccccccccccccccccccccccaaaggcucuuuucagagccaccagaauu

SEQ ID NO: 11273 - RNA, 893 nt, Artificial Sequence
  mRNA product Design c-1 comprising derived and/or modified sequence from HRSV(A2)__P04545.1__M2-1 (opt1)
gggagaguccgcucagccagguugcagaagcggcuuagcguguguccuaaucuucucucugcguguagguaggccugugccgcaaacaagcuuaccaugagccgccggaaccccugcaaguucgagauccgcggccacugccugaacgggaagcggugccacuucucccacaacuacuucgaguggccgccccacgcccuccuggugcgccagaacuucaugcugaaccggauccucaagagcauggacaaguccaucgacacccugagcgagaucuccggcgccgcggagcuggaccgcaccgaggaguacgcccucggggucgugggcgugcuggagagcuacaucggguccaucaacaacaucacgaagcagagcgccugcgucgccauguccaagcugcucaccgagcugaacagcgacgacaucaagaagcugcgggacaacgaggagcucaacucccccaagauccgcguguacaacaccgugaucagcuacaucgaguccaaccggaagaacaacaagcagaccauccaccuccugaagcgccugcccgccgacguccugaagaagacgaucaagaacacccuggacauccacaagagcaucaccaucaacaacccgaaggaguccaccgugagcgacacgaacgaccacgcgaagaacaacgacaccaccugaggacuaguguccaccugucccuccugggcugcuggauugucucguuuuccugccaaauaaacaggaucagcgcuuuacagaucuaaaaaaaaaaaaaaaaaaaaaaaaaaaaaaaaaaaaaaaaaaaaaaaaaaaaaaaaaaaaaaaaugcaucccccccccccccccccccccccccccccccaaaggcucuuuucagagccaccagaauu

SEQ ID NO: 11274 - RNA, 893 nt, Artificial Sequence
  mRNA product Design c-1 comprising derived and/or modified sequence from HRSV(A2)__P04545.1__M2-1 (opt2)
gggagaguccgcucagccagguugcagaagcggcuuagcguguguccuaaucuucucucugcguguagguaggccugugccgcaaacaagcuuaccaugucccgccgcaaccccugcaaguucgagauccgcggccacugccucaacggcaagcgcugccacuucucccacaacuacuucgaguggcccccccacgcccuccucguccgccagaacuucaugcucaaccgcauccucaaguccauggacaaguccaucgacacccucuccgagaucuccggcgccgccgagcucgaccgcaccgaggaguacgcccucggcgucgucggcguccucgaguccuacaucggcuccaucaacaacaucaccaagcaguccgccugcgucgccauguccaagcuccucaccgagcucaacuccgacgacaucaagaagcuccgcgacaacgaggagcucaacucccccaagauccgcgucuacaacaccgucaucuccuacaucgaguccaaccgcaagaacaacaagcagaccauccaccuccucaagcgccuccccgccgacguccucaagaagaccaucaagaacacccucgacauccacaaguccaucaccaucaacaaccccaaggaguccaccgucuccgacaccaacgaccacgccaagaacaacgacaccaccugaggacuaguguccaccugucccuccugggcugcuggauugucucguuuuccugccaaauaaacaggaucagcgcuuuacagaucuaaaaaaaaaaaaaaaaaaaaaaaaaaaaaaaaaaaaaaaaaaaaaaaaaaaaaaaaaaaaaaaaugcaucccccccccccccccccccccccccccccccaaaggcucuuuucagagccaccagaauu

SEQ ID NO: 11275 - RNA, 893 nt, Artificial Sequence
  mRNA product Design c-1 comprising derived and/or modified sequence from HRSV(A2)__P04545.1__M2-1 (opt3)
gggagaguccgcucagccagguugcagaagcggcuuagcguguguccuaaucuucucucugcguguagguaggccugugccgcaaacaagcuuaccaugagcagaaggaaccccugcaaguucgagauccggggccacugucugaaugggaaacgcugccauuuuucccacaacuacuucgaauggccuccacaugcacuccuugugcgacagaauuuuaugcugaaccguauuuugaagucuauggacaaaucaauagauaccuuaagugagaucagcggagcugcagaacuggacagaacagaggaauaugcccuaggugucguuggcgugcucgaguccuacauugggucuaucaauaacauuacuaagcaaucggcguguguagcuaugucaaaacugcuuacggagcugaauagcgaugacaucaagaaguugagggauaacgaagaguuaaauaguccgaaaauacggguguauaacaccgucaucuccuacauugaaucuaaucgcaagaacaauaaacagacaauccaucugcugaagagacuccccgccgacgugcucaaaaagacuauuaagaacacccuggauauccacaaaagcauaacaauuaauaacccuaaggaguccaccguuucagacacuaacgaucacgccaaaaauaacgacacaaccugaggacuaguguccaccugucccuccugggcugcuggauugucucguuuuccugccaaauaaacaggaucagcgcuuuacagaucuaaaaaaaaaaaaaaaaaaaaaaaaaaaaaaaaaaaaaaaaaaaaaaaaaaaaaaaaaaaaaaaaugcaucccccccccccccccccccccccccccccccaaaggcucuuuucagagccaccagaauu

SEQ ID NO: 11276 - RNA, 893 nt, Artificial Sequence
  mRNA product Design c-1 comprising derived and/or modified sequence from HRSV(A2)__P04545.1__M2-1 (opt4)
gggagaguccgcucagccagguugcagaagcggcuuagcguguguccuaaucuucucucugcguguagguaggccugugccgcaaacaagcuuaccaugagcagaagaaaccccugcaaguucgagaucagaggccacugccugaacggcaagagaugccacuucagccacaacuacuucgaguggcccccccacgcccugcuggugagacagaacuucaugcugaacagaauccugaagagcauggacaagagcaucgacacccugagcgagaucagcggcgccgccgagcuggacagaaccgaggaguacgcccugggcguggugggcgugcuggagagcuacaucggcagcaucaacaacaucaccaagcagagcgccugcguggccaugagcaagcugcugaccgagcugaacagcgacgacaucaagaagcugagagacaacgaggagcugaacagccccaagaucagaguguacaacaccgugaucagcuacaucgagagcaacagaaagaacaacaagcagaccauccaccugcugaagagacugcccgccgacgugcugaagaagaccaucaagaacacccuggacauccacaagagcaucaccaucaacaaccccaaggagagcaccgugagcgacaccaacgaccacgccaagaacaacgacaccaccugaggacuaguguccaccugucccuccugggcugcuggauugucucguuuuccugccaaauaaacaggaucagcgcuuuacagaucuaaaaaaaaaaaaaaaaaaaaaaaaaaaaaaaaaaaaaaaaaaaaaaaaaaaaaaaaaaaaaaaaugcaucccccccccccccccccccccccccccccccaaaggcucuuuucagagccaccagaauu

SEQ ID NO: 11277 - RNA, 893 nt, Artificial Sequence
  mRNA product Design c-1 comprising derived and/or modified sequence from HRSV(A2)__P04545.1__M2-1 (opt5)
gggagaguccgcucagccagguugcagaagcggcuuagcguguguccuaaucuucucucugcguguagguaggccugugccgcaaacaagcuuaccaugagcagacggaaccccugcaaguucgagauccgcggccacugucugaaugggaaaagaugccauuuuucccacaacuacuucgaauggccuccgcaugcccuccuggugcggcagaauuuuaugcuuaaccgcauucugaagucuauggacaaaagcaucgauacccucuccgagauuucuggagcugccgaacuggacagaacagaggaauaugcgcuuggcgucguuggggugcuggagagcuacaucggauccauuaauaacaucacgaagcaaucugcuuguguggccaugagcaaacuccugaccgagcucaauuccgaugacaucaagaagcugcgggauaacgaggaacugaauagccccaaaauucgcgucuauaacacagugaucucuuacauugaauccaauagaaagaacaauaaacagaccauccaccuucugaagcggcucccugccgacguucugaaaaagacaauuaagaacacccuugauauccauaaaagcauuacaaucaauaaccccaaggagucuaccguguccgacacgaacgaucacgcuaaaaauaacgacaccacaugaggacuaguguccaccugucccuccugggcugcuggauugucucguuuuccugccaaauaaacaggaucagcgcuuuacagaucuaaaaaaaaaaaaaaaaaaaaaaaaaaaaaaaaaaaaaaaaaaaaaaaaaaaaaaaaaaaaaaaaugcaucccccccccccccccccccccccccccccccaaaggcucuuuucagagccaccagaauu

SEQ ID NO: 11278 - RNA, 893 nt, Artificial Sequence
  mRNA product Design c-1 comprising derived and/or modified sequence from HRSV(A2)__P04545.1__M2-1 (opt6)
gggagaguccgcucagccagguugcagaagcggcuuagcguguguccuaaucuucucucugcguguagguaggccugugccgcaaacaagcuuaccaugucaagaagaaacccaugcaaauucgaaauaagaggacacugccuaaacggaaaaagaugccacuucucacacaacuacuucgaauggccaccacacgcacuacuuguaagacaaaacuucaugcuaaacagaauacuaaaaucaauggacaaaucaauagacacauuaucagaaauaucaggagcagcagaacucgacagaacagaagaauacgcacuaggaguaguaggaguacuagaaucauacauaggaucaauaaacaacauaacaaaacaaucagcaugcguagccauguccaaacuacuaacagaacuaaacuccgacgacauaaaaaaacuaagagacaacgaagaacuaaacucaccaaaaauaagaguauacaacacaguaauaucauacauagaaucaaacagaaaaaacaauaaacaaacaauacaccuacuaaaaagacucccagcagacguacuaaaaaaaacaauaaaaaacacacuagacauccacaaaucaauaacaauaaacaacccaaaagaaucaacagucucagacaccaacgaccacgcaaaaaacaacgacacaacauaaggacuaguguccaccugucccuccugggcugcuggauugucucguuuuccugccaaauaaacaggaucagcgcuuuacagaucuaaaaaaaaaaaaaaaaaaaaaaaaaaaaaaaaaaaaaaaaaaaaaaaaaaaaaaaaaaaaaaaaugcaucccccccccccccccccccccccccccccccaaaggcucuuuucagagccaccagaauu

SEQ ID NO: 11279 - RNA, 893 nt, Artificial Sequence
  mRNA product Design c-1 comprising derived and/or modified sequence from HRSV(A2)__P04545.1__M2-1 (opt11)
gggagaguccgcucagccagguugcagaagcggcuuagcguguguccuaaucuucucucugcguguagguaggccugugccgcaaacaagcuuaccaugucacgacgcaaccccugcaaauucgaaauccgcggccacugccuaaacggcaaacgcugccacuucucccacaacuacuucgaauggcccccccacgcccuccuuguccgccaaaacuucaugcucaaccgcauccucaaauccauggacaaaagcaucgacacccucuccgaaaucuccggcgcagccgaacucgaccgcaccgaagaauacgcccucggcgucguaggcguccucgaauccuacaucggcucaaucaacaacaucaccaaacaauccgccugcgucgccauguccaaacuccucaccgaacucaacuccgacgacaucaaaaaacuccgcgacaacgaagaacucaacucccccaaaauccgagucuacaacaccguaaucuccuacaucgaauccaaccgcaaaaacaacaaacaaaccauccaccuacuaaaacgacuccccgccgacguccucaaaaaaacaaucaaaaacacccucgacauccacaaauccaucaccaucaacaaccccaaagaaucaaccgucuccgacaccaacgaccacgccaaaaacaacgacaccaccugaggacuaguguccaccugucccuccugggcugcuggauugucucguuuuccugccaaauaaacaggaucagcgcuuuacagaucuaaaaaaaaaaaaaaaaaaaaaaaaaaaaaaaaaaaaaaaaaaaaaaaaaaaaaaaaaaaaaaaaugcaucccccccccccccccccccccccccccccccaaaggcucuuuucagagccaccagaauu

SEQ ID NO: 11280 - RNA, 983 nt, Artificial Sequence
  mRNA product Design c-2 comprising derived and/or modified sequence from HRSV(A2)__P04545.1__M2-1 (wt)
gggagacuccugucgggcggaaguaggaggaguagaguuuaaaaacaguacucuuuuuccgguucgggacguaguugaagcaacgacaagccggauaaccgcucuugagacaggaagcuuaccaugucacgaaggaauccuugcaaauuugaaauucgaggucauugcuuaaaugguaagaggugucauuuuagucauaauuauuuugaauggccaccccaugcacugcuuguaagacaaaacuuuauguuaaacagaauacuuaagucuauggauaaaaguauagauaccuuaucagaaauaaguggagcugcagaguuggacagaacagaagaguaugcucuugguguaguuggagugcuagagaguuauauaggaucaauaaacaauauaacuaaacaaucagcauguguugccaugagcaaacuccucacugaacucaauagugaugauaucaaaaagcugagggacaaugaagagcuaaauucacccaagauaagaguguacaauacugucauaucauauauugaaagcaacaggaaaaacaauaaacaaacuauccaucuguuaaaaagauugccagcagacguauugaagaaaaccaucaaaaacacauuggauauccauaagagcauaaccaucaacaacccaaaagaaucaacuguuagugauacaaaugaccaugccaaaaauaaugauacuaccugaggacuaguggaagcauuuuccuggcugauuaaaagaaauuacucagcuauggucaucuguuccuguuagaaggcuaugcagcauauuauauacuaugcgcauguuaugaaaugcauaauaaaaaauuuuaaaaaaucuaaaagaucuaaaaaaaaaaaaaaaaaaaaaaaaaaaaaaaaaaaaaaaaaaaaaaaaaaaaaaaaaaaaaaaaugcaucccccccccccccccccccccccccccccccaaaggcucuuuucagagccaccagaauu

SEQ ID NO: 11281 - RNA, 983 nt, Artificial Sequence
  mRNA product Design c-2 comprising derived and/or modified sequence from HRSV(A2)__P04545.1__M2-1 (opt1)
gggagacuccugucgggcggaaguaggaggaguagaguuuaaaaacaguacucuuuuuccgguucgggacguaguugaagcaacgacaagccggauaaccgcucuugagacaggaagcuuaccaugagccgccggaaccccugcaaguucgagauccgcggccacugccugaacgggaagcggugccacuucucccacaacuacuucgaguggccgccccacgcccuccuggugcgccagaacuucaugcugaaccggauccucaagagcauggacaaguccaucgacacccugagcgagaucuccggcgccgcggagcuggaccgcaccgaggaguacgcccucggggucgugggcgugcuggagagcuacaucggguccaucaacaacaucacgaagcagagcgccugcgucgccauguccaagcugcucaccgagcugaacagcgacgacaucaagaagcugcgggacaacgaggagcucaacucccccaagauccgcguguacaacaccgugaucagcuacaucgaguccaaccggaagaacaacaagcagaccauccaccuccugaagcgccugcccgccgacguccugaagaagacgaucaagaacacccuggacauccacaagagcaucaccaucaacaacccgaaggaguccaccgugagcgacacgaacgaccacgcgaagaacaacgacaccaccugaggacuaguggaagcauuuuccuggcugauuaaaagaaauuacucagcuauggucaucuguuccuguuagaaggcuaugcagcauauuauauacuaugcgcauguuaugaaaugcauaauaaaaaauuuuaaaaaaucuaaaagaucuaaaaaaaaaaaaaaaaaaaaaaaaaaaaaaaaaaaaaaaaaaaaaaaaaaaaaaaaaaaaaaaaugcaucccccccccccccccccccccccccccccccaaaggcucuuuucagagccaccagaauu

SEQ ID NO: 11282 - RNA, 983 nt, Artificial Sequence
  mRNA product Design c-2 comprising derived and/or modified sequence from HRSV(A2)__P04545.1__M2-1 (opt2)
gggagacuccugucgggcggaaguaggaggaguagaguuuaaaaacaguacucuuuuuccgguucgggacguaguugaagcaacgacaagccggauaaccgcucuugagacaggaagcuuaccaugucccgccgcaaccccugcaaguucgagauccgcggccacugccucaacggcaagcgcugccacuucucccacaacuacuucgaguggcccccccacgcccuccucguccgccagaacuucaugcucaaccgcauccucaaguccauggacaaguccaucgacacccucuccgagaucuccggcgccgccgagcucgaccgcaccgaggaguacgcccucggcgucgucggcguccucgaguccuacaucggcuccaucaacaacaucaccaagcaguccgccugcgucgccauguccaagcuccucaccgagcucaacuccgacgacaucaagaagcuccgcgacaacgaggagcucaacucccccaagauccgcgucuacaacaccgucaucuccuacaucgaguccaaccgcaagaacaacaagcagaccauccaccuccucaagcgccuccccgccgacguccucaagaagaccaucaagaacacccucgacauccacaaguccaucaccaucaacaaccccaaggaguccaccgucuccgacaccaacgaccacgccaagaacaacgacaccaccugaggacuaguggaagcauuuuccuggcugauuaaaagaaauuacucagcuauggucaucuguuccuguuagaaggcuaugcagcauauuauauacuaugcgcauguuaugaaaugcauaauaaaaaauuuuaaaaaaucuaaaagaucuaaaaaaaaaaaaaaaaaaaaaaaaaaaaaaaaaaaaaaaaaaaaaaaaaaaaaaaaaaaaaaaaugcaucccccccccccccccccccccccccccccccaaaggcucuuuucagagccaccagaauu

SEQ ID NO: 11283 - RNA, 983 nt, Artificial Sequence
  mRNA product Design c-2 comprising derived and/or modified sequence from HRSV(A2)__P04545.1__M2-1 (opt3)
gggagacuccugucgggcggaaguaggaggaguagaguuuaaaaacaguacucuuuuuccgguucgggacguaguugaagcaacgacaagccggauaaccgcucuugagacaggaagcuuaccaugagcagaaggaaccccugcaaguucgagauccggggccacugucugaaugggaaacgcugccauuuuucccacaacuacuucgaauggccuccacaugcacuccuugugcgacagaauuuuaugcugaaccguauuuugaagucuauggacaaaucaauagauaccuuaagugagaucagcggagcugcagaacuggacagaacagaggaauaugcccuaggugucguuggcgugcucgaguccuacauugggucuaucaauaacauuacuaagcaaucggcguguguagcuaugucaaaacugcuuacggagcugaauagcgaugacaucaagaaguugagggauaacgaagaguuaaauaguccgaaaauacggguguauaacaccgucaucuccuacauugaaucuaaucgcaagaacaauaaacagacaauccaucugcugaagagacuccccgccgacgugcucaaaaagacuauuaagaacacccuggauauccacaaaagcauaacaauuaauaacccuaaggaguccaccguuucagacacuaacgaucacgccaaaaauaacgacacaaccugaggacuaguggaagcauuuuccuggcugauuaaaagaaauuacucagcuauggucaucuguuccuguuagaaggcuaugcagcauauuauauacuaugcgcauguuaugaaaugcauaauaaaaaauuuuaaaaaaucuaaaagaucuaaaaaaaaaaaaaaaaaaaaaaaaaaaaaaaaaaaaaaaaaaaaaaaaaaaaaaaaaaaaaaaaugcaucccccccccccccccccccccccccccccccaaaggcucuuuucagagccaccagaauu

SEQ ID NO: 11284 - RNA, 983 nt, Artificial Sequence
  mRNA product Design c-2 comprising derived and/or modified sequence from HRSV(A2)__P04545.1__M2-1 (opt4)
gggagacuccugucgggcggaaguaggaggaguagaguuuaaaaacaguacucuuuuuccgguucgggacguaguugaagcaacgacaagccggauaaccgcucuugagacaggaagcuuaccaugagcagaagaaaccccugcaaguucgagaucagaggccacugccugaacggcaagagaugccacuucagccacaacuacuucgaguggcccccccacgcccugcuggugagacagaacuucaugcugaacagaauccugaagagcauggacaagagcaucgacacccugagcgagaucagcggcgccgccgagcuggacagaaccgaggaguacgcccugggcguggugggcgugcuggagagcuacaucggcagcaucaacaacaucaccaagcagagcgccugcguggccaugagcaagcugcugaccgagcugaacagcgacgacaucaagaagcugagagacaacgaggagcugaacagccccaagaucagaguguacaacaccgugaucagcuacaucgagagcaacagaaagaacaacaagcagaccauccaccugcugaagagacugcccgccgacgugcugaagaagaccaucaagaacacccuggacauccacaagagcaucaccaucaacaaccccaaggagagcaccgugagcgacaccaacgaccacgccaagaacaacgacaccaccugaggacuaguggaagcauuuuccuggcugauuaaaagaaauuacucagcuauggucaucuguuccuguuagaaggcuaugcagcauauuauauacuaugcgcauguuaugaaaugcauaauaaaaaauuuuaaaaaaucuaaaagaucuaaaaaaaaaaaaaaaaaaaaaaaaaaaaaaaaaaaaaaaaaaaaaaaaaaaaaaaaaaaaaaaaugcaucccccccccccccccccccccccccccccccaaaggcucuuuucagagccaccagaauu

SEQ ID NO: 11285 - RNA, 983 nt, Artificial Sequence
  mRNA product Design c-2 comprising derived and/or modified sequence from HRSV(A2)__P04545.1__M2-1 (opt5)
gggagacuccugucgggcggaaguaggaggaguagaguuuaaaaacaguacucuuuuuccgguucgggacguaguugaagcaacgacaagccggauaaccgcucuugagacaggaagcuuaccaugagcagacggaaccccugcaaguucgagauccgcggccacugucugaaugggaaaagaugccauuuuucccacaacuacuucgaauggccuccgcaugcccuccuggugcggcagaauuuuaugcuuaaccgcauucugaagucuauggacaaaagcaucgauacccucuccgagauuucuggagcugccgaacuggacagaacagaggaauaugcgcuuggcgucguuggggugcuggagagcuacaucggauccauuaauaacaucacgaagcaaucugcuuguguggccaugagcaaacuccugaccgagcucaauuccgaugacaucaagaagcugcgggauaacgaggaacugaauagccccaaaauucgcgucuauaacacagugaucucuuacauugaauccaauagaaagaacaauaaacagaccauccaccuucugaagcggcucccugccgacguucugaaaaagacaauuaagaacacccuugauauccauaaaagcauuacaaucaauaaccccaaggagucuaccguguccgacacgaacgaucacgcuaaaaauaacgacaccacaugaggacuaguggaagcauuuuccuggcugauuaaaagaaauuacucagcuauggucaucuguuccuguuagaaggcuaugcagcauauuauauacuaugcgcauguuaugaaaugcauaauaaaaaauuuuaaaaaaucuaaaagaucuaaaaaaaaaaaaaaaaaaaaaaaaaaaaaaaaaaaaaaaaaaaaaaaaaaaaaaaaaaaaaaaaugcaucccccccccccccccccccccccccccccccaaaggcucuuuucagagccaccagaauu

SEQ ID NO: 11286 - RNA, 983 nt, Artificial Sequence
  mRNA product Design c-2 comprising derived and/or modified sequence from HRSV(A2)__P04545.1__M2-1 (opt6)
gggagacuccugucgggcggaaguaggaggaguagaguuuaaaaacaguacucuuuuuccgguucgggacguaguugaagcaacgacaagccggauaaccgcucuugagacaggaagcuuaccaugucaagaagaaacccaugcaaauucgaaauaagaggacacugccuaaacggaaaaagaugccacuucucacacaacuacuucgaauggccaccacacgcacuacuuguaagacaaaacuucaugcuaaacagaauacuaaaaucaauggacaaaucaauagacacauuaucagaaauaucaggagcagcagaacucgacagaacagaagaauacgcacuaggaguaguaggaguacuagaaucauacauaggaucaauaaacaacauaacaaaacaaucagcaugcguagccauguccaaacuacuaacagaacuaaacuccgacgacauaaaaaaacuaagagacaacgaagaacuaaacucaccaaaaauaagaguauacaacacaguaauaucauacauagaaucaaacagaaaaaacaauaaacaaacaauacaccuacuaaaaagacucccagcagacguacuaaaaaaaacaauaaaaaacacacuagacauccacaaaucaauaacaauaaacaacccaaaagaaucaacagucucagacaccaacgaccacgcaaaaaacaacgacacaacauaaggacuaguggaagcauuuuccuggcugauuaaaagaaauuacucagcuauggucaucuguuccuguuagaaggcuaugcagcauauuauauacuaugcgcauguuaugaaaugcauaauaaaaaauuuuaaaaaaucuaaaagaucuaaaaaaaaaaaaaaaaaaaaaaaaaaaaaaaaaaaaaaaaaaaaaaaaaaaaaaaaaaaaaaaaugcaucccccccccccccccccccccccccccccccaaaggcucuuuucagagccaccagaauu

SEQ ID NO: 11287 - RNA, 983 nt, Artificial Sequence
  mRNA product Design c-2 comprising derived and/or modified sequence from HRSV(A2)__P04545.1__M2-1 (opt11)
gggagacuccugucgggcggaaguaggaggaguagaguuuaaaaacaguacucuuuuuccgguucgggacguaguugaagcaacgacaagccggauaaccgcucuugagacaggaagcuuaccaugucacgacgcaaccccugcaaauucgaaauccgcggccacugccuaaacggcaaacgcugccacuucucccacaacuacuucgaauggcccccccacgcccuccuuguccgccaaaacuucaugcucaaccgcauccucaaauccauggacaaaagcaucgacacccucuccgaaaucuccggcgcagccgaacucgaccgcaccgaagaauacgcccucggcgucguaggcguccucgaauccuacaucggcucaaucaacaacaucaccaaacaauccgccugcgucgccauguccaaacuccucaccgaacucaacuccgacgacaucaaaaaacuccgcgacaacgaagaacucaacucccccaaaauccgagucuacaacaccguaaucuccuacaucgaauccaaccgcaaaaacaacaaacaaaccauccaccuacuaaaacgacuccccgccgacguccucaaaaaaacaaucaaaaacacccucgacauccacaaauccaucaccaucaacaaccccaaagaaucaaccgucuccgacaccaacgaccacgccaaaaacaacgacaccaccugaggacuaguggaagcauuuuccuggcugauuaaaagaaauuacucagcuauggucaucuguuccuguuagaaggcuaugcagcauauuauauacuaugcgcauguuaugaaaugcauaauaaaaaauuuuaaaaaaucuaaaagaucuaaaaaaaaaaaaaaaaaaaaaaaaaaaaaaaaaaaaaaaaaaaaaaaaaaaaaaaaaaaaaaaaugcaucccccccccccccccccccccccccccccccaaaggcucuuuucagagccaccagaauu

SEQ ID NO: 11288 - RNA, 960 nt, Artificial Sequence
  mRNA product Design c-3 comprising derived and/or modified sequence from HRSV(A2)__P04545.1__M2-1 (wt)
gggagaguccgcucagccagguugcagaagcggcuuagcguguguccuaaucuucucucugcguguagguaggccugugccgcaaacaagcuuaccaugucacgaaggaauccuugcaaauuugaaauucgaggucauugcuuaaaugguaagaggugucauuuuagucauaauuauuuugaauggccaccccaugcacugcuuguaagacaaaacuuuauguuaaacagaauacuuaagucuauggauaaaaguauagauaccuuaucagaaauaaguggagcugcagaguuggacagaacagaagaguaugcucuugguguaguuggagugcuagagaguuauauaggaucaauaaacaauauaacuaaacaaucagcauguguugccaugagcaaacuccucacugaacucaauagugaugauaucaaaaagcugagggacaaugaagagcuaaauucacccaagauaagaguguacaauacugucauaucauauauugaaagcaacaggaaaaacaauaaacaaacuauccaucuguuaaaaagauugccagcagacguauugaagaaaaccaucaaaaacacauuggauauccauaagagcauaaccaucaacaacccaaaagaaucaacuguuagugauacaaaugaccaugccaaaaauaaugauacuaccugaggacuaguacuggcugcaucucccuuuccucuguccuccauccuucucccaggauggugaagggggaccugguacccagugauccccaccccaggauccuaaaucaugacuuaccugcuaauaaaaacucauuggaaaagugagaagaucuaaaaaaaaaaaaaaaaaaaaaaaaaaaaaaaaaaaaaaaaaaaaaaaaaaaaaaaaaaaaaaaaugcaucccccccccccccccccccccccccccccccaaaggcucuuuucagagccaccagaauu

SEQ ID NO: 11289 - RNA, 960 nt, Artificial Sequence
  mRNA product Design c-3 comprising derived and/or modified sequence from HRSV(A2)__P04545.1__M2-1 (opt1)
gggagaguccgcucagccagguugcagaagcggcuuagcguguguccuaaucuucucucugcguguagguaggccugugccgcaaacaagcuuaccaugagccgccggaaccccugcaaguucgagauccgcggccacugccugaacgggaagcggugccacuucucccacaacuacuucgaguggccgccccacgcccuccuggugcgccagaacuucaugcugaaccggauccucaagagcauggacaaguccaucgacacccugagcgagaucuccggcgccgcggagcuggaccgcaccgaggaguacgcccucggggucgugggcgugcuggagagcuacaucggguccaucaacaacaucacgaagcagagcgccugcgucgccauguccaagcugcucaccgagcugaacagcgacgacaucaagaagcugcgggacaacgaggagcucaacucccccaagauccgcguguacaacaccgugaucagcuacaucgaguccaaccggaagaacaacaagcagaccauccaccuccugaagcgccugcccgccgacguccugaagaagacgaucaagaacacccuggacauccacaagagcaucaccaucaacaacccgaaggaguccaccgugagcgacacgaacgaccacgcgaagaacaacgacaccaccugaggacuaguacuggcugcaucucccuuuccucuguccuccauccuucucccaggauggugaagggggaccugguacccagugauccccaccccaggauccuaaaucaugacuuaccugcuaauaaaaacucauuggaaaagugagaagaucuaaaaaaaaaaaaaaaaaaaaaaaaaaaaaaaaaaaaaaaaaaaaaaaaaaaaaaaaaaaaaaaaugcaucccccccccccccccccccccccccccccccaaaggcucuuuucagagccaccagaauu

SEQ ID NO: 11290 - RNA, 960 nt, Artificial Sequence
  mRNA product Design c-3 comprising derived and/or modified sequence from HRSV(A2)__P04545.1__M2-1 (opt2)
gggagaguccgcucagccagguugcagaagcggcuuagcguguguccuaaucuucucucugcguguagguaggccugugccgcaaacaagcuuaccaugucccgccgcaaccccugcaaguucgagauccgcggccacugccucaacggcaagcgcugccacuucucccacaacuacuucgaguggcccccccacgcccuccucguccgccagaacuucaugcucaaccgcauccucaaguccauggacaaguccaucgacacccucuccgagaucuccggcgccgccgagcucgaccgcaccgaggaguacgcccucggcgucgucggcguccucgaguccuacaucggcuccaucaacaacaucaccaagcaguccgccugcgucgccauguccaagcuccucaccgagcucaacuccgacgacaucaagaagcuccgcgacaacgaggagcucaacucccccaagauccgcgucuacaacaccgucaucuccuacaucgaguccaaccgcaagaacaacaagcagaccauccaccuccucaagcgccuccccgccgacguccucaagaagaccaucaagaacacccucgacauccacaaguccaucaccaucaacaaccccaaggaguccaccgucuccgacaccaacgaccacgccaagaacaacgacaccaccugaggacuaguacuggcugcaucucccuuuccucuguccuccauccuucucccaggauggugaagggggaccugguacccagugauccccaccccaggauccuaaaucaugacuuaccugcuaauaaaaacucauuggaaaagugagaagaucuaaaaaaaaaaaaaaaaaaaaaaaaaaaaaaaaaaaaaaaaaaaaaaaaaaaaaaaaaaaaaaaaugcaucccccccccccccccccccccccccccccccaaaggcucuuuucagagccaccagaauu

SEQ ID NO: 11291 - RNA, 960 nt, Artificial Sequence
  mRNA product Design c-3 comprising derived and/or modified sequence from HRSV(A2)__P04545.1__M2-1 (opt3)
gggagaguccgcucagccagguugcagaagcggcuuagcguguguccuaaucuucucucugcguguagguaggccugugccgcaaacaagcuuaccaugagcagaaggaaccccugcaaguucgagauccggggccacugucugaaugggaaacgcugccauuuuucccacaacuacuucgaauggccuccacaugcacuccuugugcgacagaauuuuaugcugaaccguauuuugaagucuauggacaaaucaauagauaccuuaagugagaucagcggagcugcagaacuggacagaacagaggaauaugcccuaggugucguuggcgugcucgaguccuacauugggucuaucaauaacauuacuaagcaaucggcguguguagcuaugucaaaacugcuuacggagcugaauagcgaugacaucaagaaguugagggauaacgaagaguuaaauaguccgaaaauacggguguauaacaccgucaucuccuacauugaaucuaaucgcaagaacaauaaacagacaauccaucugcugaagagacuccccgccgacgugcucaaaaagacuauuaagaacacccuggauauccacaaaagcauaacaauuaauaacccuaaggaguccaccguuucagacacuaacgaucacgccaaaaauaacgacacaaccugaggacuaguacuggcugcaucucccuuuccucuguccuccauccuucucccaggauggugaagggggaccugguacccagugauccccaccccaggauccuaaaucaugacuuaccugcuaauaaaaacucauuggaaaagugagaagaucuaaaaaaaaaaaaaaaaaaaaaaaaaaaaaaaaaaaaaaaaaaaaaaaaaaaaaaaaaaaaaaaaugcaucccccccccccccccccccccccccccccccaaaggcucuuuucagagccaccagaauu

SEQ ID NO: 11292 - RNA, 960 nt, Artificial Sequence
  mRNA product Design c-3 comprising derived and/or modified sequence from HRSV(A2)__P04545.1__M2-1 (opt4)
gggagaguccgcucagccagguugcagaagcggcuuagcguguguccuaaucuucucucugcguguagguaggccugugccgcaaacaagcuuaccaugagcagaagaaaccccugcaaguucgagaucagaggccacugccugaacggcaagagaugccacuucagccacaacuacuucgaguggcccccccacgcccugcuggugagacagaacuucaugcugaacagaauccugaagagcauggacaagagcaucgacacccugagcgagaucagcggcgccgccgagcuggacagaaccgaggaguacgcccugggcguggugggcgugcuggagagcuacaucggcagcaucaacaacaucaccaagcagagcgccugcguggccaugagcaagcugcugaccgagcugaacagcgacgacaucaagaagcugagagacaacgaggagcugaacagccccaagaucagaguguacaacaccgugaucagcuacaucgagagcaacagaaagaacaacaagcagaccauccaccugcugaagagacugcccgccgacgugcugaagaagaccaucaagaacacccuggacauccacaagagcaucaccaucaacaaccccaaggagagcaccgugagcgacaccaacgaccacgccaagaacaacgacaccaccugaggacuaguacuggcugcaucucccuuuccucuguccuccauccuucucccaggauggugaagggggaccugguacccagugauccccaccccaggauccuaaaucaugacuuaccugcuaauaaaaacucauuggaaaagugagaagaucuaaaaaaaaaaaaaaaaaaaaaaaaaaaaaaaaaaaaaaaaaaaaaaaaaaaaaaaaaaaaaaaaugcaucccccccccccccccccccccccccccccccaaaggcucuuuucagagccaccagaauu

SEQ ID NO: 11293 - RNA, 960 nt, Artificial Sequence
  mRNA product Design c-3 comprising derived and/or modified sequence from HRSV(A2)__P04545.1__M2-1 (opt5)
gggagaguccgcucagccagguugcagaagcggcuuagcguguguccuaaucuucucucugcguguagguaggccugugccgcaaacaagcuuaccaugagcagacggaaccccugcaaguucgagauccgcggccacugucugaaugggaaaagaugccauuuuucccacaacuacuucgaauggccuccgcaugcccuccuggugcggcagaauuuuaugcuuaaccgcauucugaagucuauggacaaaagcaucgauacccucuccgagauuucuggagcugccgaacuggacagaacagaggaauaugcgcuuggcgucguuggggugcuggagagcuacaucggauccauuaauaacaucacgaagcaaucugcuuguguggccaugagcaaacuccugaccgagcucaauuccgaugacaucaagaagcugcgggauaacgaggaacugaauagccccaaaauucgcgucuauaacacagugaucucuuacauugaauccaauagaaagaacaauaaacagaccauccaccuucugaagcggcucccugccgacguucugaaaaagacaauuaagaacacccuugauauccauaaaagcauuacaaucaauaaccccaaggagucuaccguguccgacacgaacgaucacgcuaaaaauaacgacaccacaugaggacuaguacuggcugcaucucccuuuccucuguccuccauccuucucccaggauggugaagggggaccugguacccagugauccccaccccaggauccuaaaucaugacuuaccugcuaauaaaaacucauuggaaaagugagaagaucuaaaaaaaaaaaaaaaaaaaaaaaaaaaaaaaaaaaaaaaaaaaaaaaaaaaaaaaaaaaaaaaaugcaucccccccccccccccccccccccccccccccaaaggcucuuuucagagccaccagaauu

SEQ ID NO: 11294 - RNA, 960 nt, Artificial Sequence
  mRNA product Design c-3 comprising derived and/or modified sequence from HRSV(A2)__P04545.1__M2-1 (opt6)
gggagaguccgcucagccagguugcagaagcggcuuagcguguguccuaaucuucucucugcguguagguaggccugugccgcaaacaagcuuaccaugucaagaagaaacccaugcaaauucgaaauaagaggacacugccuaaacggaaaaagaugccacuucucacacaacuacuucgaauggccaccacacgcacuacuuguaagacaaaacuucaugcuaaacagaauacuaaaaucaauggacaaaucaauagacacauuaucagaaauaucaggagcagcagaacucgacagaacagaagaauacgcacuaggaguaguaggaguacuagaaucauacauaggaucaauaaacaacauaacaaaacaaucagcaugcguagccauguccaaacuacuaacagaacuaaacuccgacgacauaaaaaaacuaagagacaacgaagaacuaaacucaccaaaaauaagaguauacaacacaguaauaucauacauagaaucaaacagaaaaaacaauaaacaaacaauacaccuacuaaaaagacucccagcagacguacuaaaaaaaacaauaaaaaacacacuagacauccacaaaucaauaacaauaaacaacccaaaagaaucaacagucucagacaccaacgaccacgcaaaaaacaacgacacaacauaaggacuaguacuggcugcaucucccuuuccucuguccuccauccuucucccaggauggugaagggggaccugguacccagugauccccaccccaggauccuaaaucaugacuuaccugcuaauaaaaacucauuggaaaagugagaagaucuaaaaaaaaaaaaaaaaaaaaaaaaaaaaaaaaaaaaaaaaaaaaaaaaaaaaaaaaaaaaaaaaugcaucccccccccccccccccccccccccccccccaaaggcucuuuucagagccaccagaauu

SEQ ID NO: 11295 - RNA, 960 nt, Artificial Sequence
  mRNA product Design c-3 comprising derived and/or modified sequence from HRSV(A2)__P04545.1__M2-1 (opt11)
gggagaguccgcucagccagguugcagaagcggcuuagcguguguccuaaucuucucucugcguguagguaggccugugccgcaaacaagcuuaccaugucacgacgcaaccccugcaaauucgaaauccgcggccacugccuaaacggcaaacgcugccacuucucccacaacuacuucgaauggcccccccacgcccuccuuguccgccaaaacuucaugcucaaccgcauccucaaauccauggacaaaagcaucgacacccucuccgaaaucuccggcgcagccgaacucgaccgcaccgaagaauacgcccucggcgucguaggcguccucgaauccuacaucggcucaaucaacaacaucaccaaacaauccgccugcgucgccauguccaaacuccucaccgaacucaacuccgacgacaucaaaaaacuccgcgacaacgaagaacucaacucccccaaaauccgagucuacaacaccguaaucuccuacaucgaauccaaccgcaaaaacaacaaacaaaccauccaccuacuaaaacgacuccccgccgacguccucaaaaaaacaaucaaaaacacccucgacauccacaaauccaucaccaucaacaaccccaaagaaucaaccgucuccgacaccaacgaccacgccaaaaacaacgacaccaccugaggacuaguacuggcugcaucucccuuuccucuguccuccauccuucucccaggauggugaagggggaccugguacccagugauccccaccccaggauccuaaaucaugacuuaccugcuaauaaaaacucauuggaaaagugagaagaucuaaaaaaaaaaaaaaaaaaaaaaaaaaaaaaaaaaaaaaaaaaaaaaaaaaaaaaaaaaaaaaaaugcaucccccccccccccccccccccccccccccccaaaggcucuuuucagagccaccagaauu

SEQ ID NO: 11296 - RNA, 956 nt, Artificial Sequence
  mRNA product Design c-4 comprising derived and/or modified sequence from HRSV(A2)__P04545.1__M2-1 (wt)
gggagaguccgcucagccagguugcagaagcggcuuagcguguguccuaaucuucucucugcguguagguaggccugugccgcaaacaagcuuaccaugucacgaaggaauccuugcaaauuugaaauucgaggucauugcuuaaaugguaagaggugucauuuuagucauaauuauuuugaauggccaccccaugcacugcuuguaagacaaaacuuuauguuaaacagaauacuuaagucuauggauaaaaguauagauaccuuaucagaaauaaguggagcugcagaguuggacagaacagaagaguaugcucuugguguaguuggagugcuagagaguuauauaggaucaauaaacaauauaacuaaacaaucagcauguguugccaugagcaaacuccucacugaacucaauagugaugauaucaaaaagcugagggacaaugaagagcuaaauucacccaagauaagaguguacaauacugucauaucauauauugaaagcaacaggaaaaacaauaaacaaacuauccaucuguuaaaaagauugccagcagacguauugaagaaaaccaucaaaaacacauuggauauccauaagagcauaaccaucaacaacccaaaagaaucaacuguuagugauacaaaugaccaugccaaaaauaaugauacuaccugaggacuaguggaagcauuuuccuggcugauuaaaagaaauuacucagcuauggucaucuguuccuguuagaaggcuaugcagcauauuauauacuaugcgcauguuaugaaaugcauaauaaaaaauuuuaaaaaaucuaaaagaucuaaaaaaaaaaaaaaaaaaaaaaaaaaaaaaaaaaaaaaaaaaaaaaaaaaaaaaaaaaaaaaaaugcaucccccccccccccccccccccccccccccccaaaggcucuuuucagagccaccagaauu

SEQ ID NO: 11297 - RNA, 956 nt, Artificial Sequence
  mRNA product Design c-4 comprising derived and/or modified sequence from HRSV(A2)__P04545.1__M2-1 (opt1)
gggagaguccgcucagccagguugcagaagcggcuuagcguguguccuaaucuucucucugcguguagguaggccugugccgcaaacaagcuuaccaugagccgccggaaccccugcaaguucgagauccgcggccacugccugaacgggaagcggugccacuucucccacaacuacuucgaguggccgccccacgcccuccuggugcgccagaacuucaugcugaaccggauccucaagagcauggacaaguccaucgacacccugagcgagaucuccggcgccgcggagcuggaccgcaccgaggaguacgcccucggggucgugggcgugcuggagagcuacaucggguccaucaacaacaucacgaagcagagcgccugcgucgccauguccaagcugcucaccgagcugaacagcgacgacaucaagaagcugcgggacaacgaggagcucaacucccccaagauccgcguguacaacaccgugaucagcuacaucgaguccaaccggaagaacaacaagcagaccauccaccuccugaagcgccugcccgccgacguccugaagaagacgaucaagaacacccuggacauccacaagagcaucaccaucaacaacccgaaggaguccaccgugagcgacacgaacgaccacgcgaagaacaacgacaccaccugaggacuaguggaagcauuuuccuggcugauuaaaagaaauuacucagcuauggucaucuguuccuguuagaaggcuaugcagcauauuauauacuaugcgcauguuaugaaaugcauaauaaaaaauuuuaaaaaaucuaaaagaucuaaaaaaaaaaaaaaaaaaaaaaaaaaaaaaaaaaaaaaaaaaaaaaaaaaaaaaaaaaaaaaaaugcaucccccccccccccccccccccccccccccccaaaggcucuuuucagagccaccagaauu

SEQ ID NO: 11298 - RNA, 956 nt, Artificial Sequence
  mRNA product Design c-4 comprising derived and/or modified sequence from HRSV(A2)__P04545.1__M2-1 (opt2)
gggagaguccgcucagccagguugcagaagcggcuuagcguguguccuaaucuucucucugcguguagguaggccugugccgcaaacaagcuuaccaugucccgccgcaaccccugcaaguucgagauccgcggccacugccucaacggcaagcgcugccacuucucccacaacuacuucgaguggcccccccacgcccuccucguccgccagaacuucaugcucaaccgcauccucaaguccauggacaaguccaucgacacccucuccgagaucuccggcgccgccgagcucgaccgcaccgaggaguacgcccucggcgucgucggcguccucgaguccuacaucggcuccaucaacaacaucaccaagcaguccgccugcgucgccauguccaagcuccucaccgagcucaacuccgacgacaucaagaagcuccgcgacaacgaggagcucaacucccccaagauccgcgucuacaacaccgucaucuccuacaucgaguccaaccgcaagaacaacaagcagaccauccaccuccucaagcgccuccccgccgacguccucaagaagaccaucaagaacacccucgacauccacaaguccaucaccaucaacaaccccaaggaguccaccgucuccgacaccaacgaccacgccaagaacaacgacaccaccugaggacuaguggaagcauuuuccuggcugauuaaaagaaauuacucagcuauggucaucuguuccuguuagaaggcuaugcagcauauuauauacuaugcgcauguuaugaaaugcauaauaaaaaauuuuaaaaaaucuaaaagaucuaaaaaaaaaaaaaaaaaaaaaaaaaaaaaaaaaaaaaaaaaaaaaaaaaaaaaaaaaaaaaaaaugcaucccccccccccccccccccccccccccccccaaaggcucuuuucagagccaccagaauu

SEQ ID NO: 11299 - RNA, 956 nt, Artificial Sequence
  mRNA product Design c-4 comprising derived and/or modified sequence from HRSV(A2)__P04545.1__M2-1 (opt3)
gggagaguccgcucagccagguugcagaagcggcuuagcguguguccuaaucuucucucugcguguagguaggccugugccgcaaacaagcuuaccaugagcagaaggaaccccugcaaguucgagauccggggccacugucugaaugggaaacgcugccauuuuucccacaacuacuucgaauggccuccacaugcacuccuugugcgacagaauuuuaugcugaaccguauuuugaagucuauggacaaaucaauagauaccuuaagugagaucagcggagcugcagaacuggacagaacagaggaauaugcccuaggugucguuggcgugcucgaguccuacauugggucuaucaauaacauuacuaagcaaucggcguguguagcuaugucaaaacugcuuacggagcugaauagcgaugacaucaagaaguugagggauaacgaagaguuaaauaguccgaaaauacggguguauaacaccgucaucuccuacauugaaucuaaucgcaagaacaauaaacagacaauccaucugcugaagagacuccccgccgacgugcucaaaaagacuauuaagaacacccuggauauccacaaaagcauaacaauuaauaacccuaaggaguccaccguuucagacacuaacgaucacgccaaaaauaacgacacaaccugaggacuaguggaagcauuuuccuggcugauuaaaagaaauuacucagcuauggucaucuguuccuguuagaaggcuaugcagcauauuauauacuaugcgcauguuaugaaaugcauaauaaaaaauuuuaaaaaaucuaaaagaucuaaaaaaaaaaaaaaaaaaaaaaaaaaaaaaaaaaaaaaaaaaaaaaaaaaaaaaaaaaaaaaaaugcaucccccccccccccccccccccccccccccccaaaggcucuuuucagagccaccagaauu

SEQ ID NO: 11300 - RNA, 956 nt, Artificial Sequence
  mRNA product Design c-4 comprising derived and/or modified sequence from HRSV(A2)__P04545.1__M2-1 (opt4)
gggagaguccgcucagccagguugcagaagcggcuuagcguguguccuaaucuucucucugcguguagguaggccugugccgcaaacaagcuuaccaugagcagaagaaaccccugcaaguucgagaucagaggccacugccugaacggcaagagaugccacuucagccacaacuacuucgaguggcccccccacgcccugcuggugagacagaacuucaugcugaacagaauccugaagagcauggacaagagcaucgacacccugagcgagaucagcggcgccgccgagcuggacagaaccgaggaguacgcccugggcguggugggcgugcuggagagcuacaucggcagcaucaacaacaucaccaagcagagcgccugcguggccaugagcaagcugcugaccgagcugaacagcgacgacaucaagaagcugagagacaacgaggagcugaacagccccaagaucagaguguacaacaccgugaucagcuacaucgagagcaacagaaagaacaacaagcagaccauccaccugcugaagagacugcccgccgacgugcugaagaagaccaucaagaacacccuggacauccacaagagcaucaccaucaacaaccccaaggagagcaccgugagcgacaccaacgaccacgccaagaacaacgacaccaccugaggacuaguggaagcauuuuccuggcugauuaaaagaaauuacucagcuauggucaucuguuccuguuagaaggcuaugcagcauauuauauacuaugcgcauguuaugaaaugcauaauaaaaaauuuuaaaaaaucuaaaagaucuaaaaaaaaaaaaaaaaaaaaaaaaaaaaaaaaaaaaaaaaaaaaaaaaaaaaaaaaaaaaaaaaugcaucccccccccccccccccccccccccccccccaaaggcucuuuucagagccaccagaauu

SEQ ID NO: 11301 - RNA, 956 nt, Artificial Sequence
  mRNA product Design c-4 comprising derived and/or modified sequence from HRSV(A2)__P04545.1__M2-1 (opt5)
gggagaguccgcucagccagguugcagaagcggcuuagcguguguccuaaucuucucucugcguguagguaggccugugccgcaaacaagcuuaccaugagcagacggaaccccugcaaguucgagauccgcggccacugucugaaugggaaaagaugccauuuuucccacaacuacuucgaauggccuccgcaugcccuccuggugcggcagaauuuuaugcuuaaccgcauucugaagucuauggacaaaagcaucgauacccucuccgagauuucuggagcugccgaacuggacagaacagaggaauaugcgcuuggcgucguuggggugcuggagagcuacaucggauccauuaauaacaucacgaagcaaucugcuuguguggccaugagcaaacuccugaccgagcucaauuccgaugacaucaagaagcugcgggauaacgaggaacugaauagccccaaaauucgcgucuauaacacagugaucucuuacauugaauccaauagaaagaacaauaaacagaccauccaccuucugaagcggcucccugccgacguucugaaaaagacaauuaagaacacccuugauauccauaaaagcauuacaaucaauaaccccaaggagucuaccguguccgacacgaacgaucacgcuaaaaauaacgacaccacaugaggacuaguggaagcauuuuccuggcugauuaaaagaaauuacucagcuauggucaucuguuccuguuagaaggcuaugcagcauauuauauacuaugcgcauguuaugaaaugcauaauaaaaaauuuuaaaaaaucuaaaagaucuaaaaaaaaaaaaaaaaaaaaaaaaaaaaaaaaaaaaaaaaaaaaaaaaaaaaaaaaaaaaaaaaugcaucccccccccccccccccccccccccccccccaaaggcucuuuucagagccaccagaauu

SEQ ID NO: 11302 - RNA, 956 nt, Artificial Sequence
  mRNA product Design c-4 comprising derived and/or modified sequence from HRSV(A2)__P04545.1__M2-1 (opt6)
gggagaguccgcucagccagguugcagaagcggcuuagcguguguccuaaucuucucucugcguguagguaggccugugccgcaaacaagcuuaccaugucaagaagaaacccaugcaaauucgaaauaagaggacacugccuaaacggaaaaagaugccacuucucacacaacuacuucgaauggccaccacacgcacuacuuguaagacaaaacuucaugcuaaacagaauacuaaaaucaauggacaaaucaauagacacauuaucagaaauaucaggagcagcagaacucgacagaacagaagaauacgcacuaggaguaguaggaguacuagaaucauacauaggaucaauaaacaacauaacaaaacaaucagcaugcguagccauguccaaacuacuaacagaacuaaacuccgacgacauaaaaaaacuaagagacaacgaagaacuaaacucaccaaaaauaagaguauacaacacaguaauaucauacauagaaucaaacagaaaaaacaauaaacaaacaauacaccuacuaaaaagacucccagcagacguacuaaaaaaaacaauaaaaaacacacuagacauccacaaaucaauaacaauaaacaacccaaaagaaucaacagucucagacaccaacgaccacgcaaaaaacaacgacacaacauaaggacuaguggaagcauuuuccuggcugauuaaaagaaauuacucagcuauggucaucuguuccuguuagaaggcuaugcagcauauuauauacuaugcgcauguuaugaaaugcauaauaaaaaauuuuaaaaaaucuaaaagaucuaaaaaaaaaaaaaaaaaaaaaaaaaaaaaaaaaaaaaaaaaaaaaaaaaaaaaaaaaaaaaaaaugcaucccccccccccccccccccccccccccccccaaaggcucuuuucagagccaccagaauu

SEQ ID NO: 11303 - RNA, 956 nt, Artificial Sequence
  mRNA product Design c-4 comprising derived and/or modified sequence from HRSV(A2)__P04545.1__M2-1 (opt11)
gggagaguccgcucagccagguugcagaagcggcuuagcguguguccuaaucuucucucugcguguagguaggccugugccgcaaacaagcuuaccaugucacgacgcaaccccugcaaauucgaaauccgcggccacugccuaaacggcaaacgcugccacuucucccacaacuacuucgaauggcccccccacgcccuccuuguccgccaaaacuucaugcucaaccgcauccucaaauccauggacaaaagcaucgacacccucuccgaaaucuccggcgcagccgaacucgaccgcaccgaagaauacgcccucggcgucguaggcguccucgaauccuacaucggcucaaucaacaacaucaccaaacaauccgccugcgucgccauguccaaacuccucaccgaacucaacuccgacgacaucaaaaaacuccgcgacaacgaagaacucaacucccccaaaauccgagucuacaacaccguaaucuccuacaucgaauccaaccgcaaaaacaacaaacaaaccauccaccuacuaaaacgacuccccgccgacguccucaaaaaaacaaucaaaaacacccucgacauccacaaauccaucaccaucaacaaccccaaagaaucaaccgucuccgacaccaacgaccacgccaaaaacaacgacaccaccugaggacuaguggaagcauuuuccuggcugauuaaaagaaauuacucagcuauggucaucuguuccuguuagaaggcuaugcagcauauuauauacuaugcgcauguuaugaaaugcauaauaaaaaauuuuaaaaaaucuaaaagaucuaaaaaaaaaaaaaaaaaaaaaaaaaaaaaaaaaaaaaaaaaaaaaaaaaaaaaaaaaaaaaaaaugcaucccccccccccccccccccccccccccccccaaaggcucuuuucagagccaccagaauu

SEQ ID NO: 11304 - RNA, 874 nt, Artificial Sequence
  mRNA product Design c-5 comprising derived and/or modified sequence from HRSV(A2)__P04545.1__M2-1 (wt)
gggagagcggcucggccauuuugucccagucaguccggaggcugcggcugcagaaguaccgccugcggaguaacugcaaagaagcuuaccaugucacgaaggaauccuugcaaauuugaaauucgaggucauugcuuaaaugguaagaggugucauuuuagucauaauuauuuugaauggccaccccaugcacugcuuguaagacaaaacuuuauguuaaacagaauacuuaagucuauggauaaaaguauagauaccuuaucagaaauaaguggagcugcagaguuggacagaacagaagaguaugcucuugguguaguuggagugcuagagaguuauauaggaucaauaaacaauauaacuaaacaaucagcauguguugccaugagcaaacuccucacugaacucaauagugaugauaucaaaaagcugagggacaaugaagagcuaaauucacccaagauaagaguguacaauacugucauaucauauauugaaagcaacaggaaaaacaauaaacaaacuauccaucuguuaaaaagauugccagcagacguauugaagaaaaccaucaaaaacacauuggauauccauaagagcauaaccaucaacaacccaaaagaaucaacuguuagugauacaaaugaccaugccaaaaauaaugauacuaccugaggacuagucccuguucccagagcccacuuuuuuuucuuuuuuugaaauaaaauagccugucuuucagaucuaaaaaaaaaaaaaaaaaaaaaaaaaaaaaaaaaaaaaaaaaaaaaaaaaaaaaaaaaaaaaaaaugcaucccccccccccccccccccccccccccccccaaaggcucuuuucagagccaccagaauu

SEQ ID NO: 11305 - RNA, 874 nt, Artificial Sequence
  mRNA product Design c-5 comprising derived and/or modified sequence from HRSV(A2)__P04545.1__M2-1 (opt1)
gggagagcggcucggccauuuugucccagucaguccggaggcugcggcugcagaaguaccgccugcggaguaacugcaaagaagcuuaccaugagccgccggaaccccugcaaguucgagauccgcggccacugccugaacgggaagcggugccacuucucccacaacuacuucgaguggccgccccacgcccuccuggugcgccagaacuucaugcugaaccggauccucaagagcauggacaaguccaucgacacccugagcgagaucuccggcgccgcggagcuggaccgcaccgaggaguacgcccucggggucgugggcgugcuggagagcuacaucggguccaucaacaacaucacgaagcagagcgccugcgucgccauguccaagcugcucaccgagcugaacagcgacgacaucaagaagcugcgggacaacgaggagcucaacucccccaagauccgcguguacaacaccgugaucagcuacaucgaguccaaccggaagaacaacaagcagaccauccaccuccugaagcgccugcccgccgacguccugaagaagacgaucaagaacacccuggacauccacaagagcaucaccaucaacaacccgaaggaguccaccgugagcgacacgaacgaccacgcgaagaacaacgacaccaccugaggacuagucccuguucccagagcccacuuuuuuuucuuuuuuugaaauaaaauagccugucuuucagaucuaaaaaaaaaaaaaaaaaaaaaaaaaaaaaaaaaaaaaaaaaaaaaaaaaaaaaaaaaaaaaaaaugcaucccccccccccccccccccccccccccccccaaaggcucuuuucagagccaccagaauu

SEQ ID NO: 11306 - RNA, 874 nt, Artificial Sequence
  mRNA product Design c-5 comprising derived and/or modified sequence from HRSV(A2)__P04545.1__M2-1 (opt2)
gggagagcggcucggccauuuugucccagucaguccggaggcugcggcugcagaaguaccgccugcggaguaacugcaaagaagcuuaccaugucccgccgcaaccccugcaaguucgagauccgcggccacugccucaacggcaagcgcugccacuucucccacaacuacuucgaguggcccccccacgcccuccucguccgccagaacuucaugcucaaccgcauccucaaguccauggacaaguccaucgacacccucuccgagaucuccggcgccgccgagcucgaccgcaccgaggaguacgcccucggcgucgucggcguccucgaguccuacaucggcuccaucaacaacaucaccaagcaguccgccugcgucgccauguccaagcuccucaccgagcucaacuccgacgacaucaagaagcuccgcgacaacgaggagcucaacucccccaagauccgcgucuacaacaccgucaucuccuacaucgaguccaaccgcaagaacaacaagcagaccauccaccuccucaagcgccuccccgccgacguccucaagaagaccaucaagaacacccucgacauccacaaguccaucaccaucaacaaccccaaggaguccaccgucuccgacaccaacgaccacgccaagaacaacgacaccaccugaggacuagucccuguucccagagcccacuuuuuuuucuuuuuuugaaauaaaauagccugucuuucagaucuaaaaaaaaaaaaaaaaaaaaaaaaaaaaaaaaaaaaaaaaaaaaaaaaaaaaaaaaaaaaaaaaugcaucccccccccccccccccccccccccccccccaaaggcucuuuucagagccaccagaauu

SEQ ID NO: 11307 - RNA, 874 nt, Artificial Sequence
  mRNA product Design c-5 comprising derived and/or modified sequence from HRSV(A2)__P04545.1__M2-1 (opt3)
gggagagcggcucggccauuuugucccagucaguccggaggcugcggcugcagaaguaccgccugcggaguaacugcaaagaagcuuaccaugagcagaaggaaccccugcaaguucgagauccggggccacugucugaaugggaaacgcugccauuuuucccacaacuacuucgaauggccuccacaugcacuccuugugcgacagaauuuuaugcugaaccguauuuugaagucuauggacaaaucaauagauaccuuaagugagaucagcggagcugcagaacuggacagaacagaggaauaugcccuaggugucguuggcgugcucgaguccuacauugggucuaucaauaacauuacuaagcaaucggcguguguagcuaugucaaaacugcuuacggagcugaauagcgaugacaucaagaaguugagggauaacgaagaguuaaauaguccgaaaauacggguguauaacaccgucaucuccuacauugaaucuaaucgcaagaacaauaaacagacaauccaucugcugaagagacuccccgccgacgugcucaaaaagacuauuaagaacacccuggauauccacaaaagcauaacaauuaauaacccuaaggaguccaccguuucagacacuaacgaucacgccaaaaauaacgacacaaccugaggacuagucccuguucccagagcccacuuuuuuuucuuuuuuugaaauaaaauagccugucuuucagaucuaaaaaaaaaaaaaaaaaaaaaaaaaaaaaaaaaaaaaaaaaaaaaaaaaaaaaaaaaaaaaaaaugcaucccccccccccccccccccccccccccccccaaaggcucuuuucagagccaccagaauu

SEQ ID NO: 11308 - RNA, 874 nt, Artificial Sequence
  mRNA product Design c-5 comprising derived and/or modified sequence from HRSV(A2)__P04545.1__M2-1 (opt4)
gggagagcggcucggccauuuugucccagucaguccggaggcugcggcugcagaaguaccgccugcggaguaacugcaaagaagcuuaccaugagcagaagaaaccccugcaaguucgagaucagaggccacugccugaacggcaagagaugccacuucagccacaacuacuucgaguggcccccccacgcccugcuggugagacagaacuucaugcugaacagaauccugaagagcauggacaagagcaucgacacccugagcgagaucagcggcgccgccgagcuggacagaaccgaggaguacgcccugggcguggugggcgugcuggagagcuacaucggcagcaucaacaacaucaccaagcagagcgccugcguggccaugagcaagcugcugaccgagcugaacagcgacgacaucaagaagcugagagacaacgaggagcugaacagccccaagaucagaguguacaacaccgugaucagcuacaucgagagcaacagaaagaacaacaagcagaccauccaccugcugaagagacugcccgccgacgugcugaagaagaccaucaagaacacccuggacauccacaagagcaucaccaucaacaaccccaaggagagcaccgugagcgacaccaacgaccacgccaagaacaacgacaccaccugaggacuagucccuguucccagagcccacuuuuuuuucuuuuuuugaaauaaaauagccugucuuucagaucuaaaaaaaaaaaaaaaaaaaaaaaaaaaaaaaaaaaaaaaaaaaaaaaaaaaaaaaaaaaaaaaaugcaucccccccccccccccccccccccccccccccaaaggcucuuuucagagccaccagaauu

SEQ ID NO: 11309 - RNA, 874 nt, Artificial Sequence
  mRNA product Design c-5 comprising derived and/or modified sequence from HRSV(A2)__P04545.1__M2-1 (opt5)
gggagagcggcucggccauuuugucccagucaguccggaggcugcggcugcagaaguaccgccugcggaguaacugcaaagaagcuuaccaugagcagacggaaccccugcaaguucgagauccgcggccacugucugaaugggaaaagaugccauuuuucccacaacuacuucgaauggccuccgcaugcccuccuggugcggcagaauuuuaugcuuaaccgcauucugaagucuauggacaaaagcaucgauacccucuccgagauuucuggagcugccgaacuggacagaacagaggaauaugcgcuuggcgucguuggggugcuggagagcuacaucggauccauuaauaacaucacgaagcaaucugcuuguguggccaugagcaaacuccugaccgagcucaauuccgaugacaucaagaagcugcgggauaacgaggaacugaauagccccaaaauucgcgucuauaacacagugaucucuuacauugaauccaauagaaagaacaauaaacagaccauccaccuucugaagcggcucccugccgacguucugaaaaagacaauuaagaacacccuugauauccauaaaagcauuacaaucaauaaccccaaggagucuaccguguccgacacgaacgaucacgcuaaaaauaacgacaccacaugaggacuagucccuguucccagagcccacuuuuuuuucuuuuuuugaaauaaaauagccugucuuucagaucuaaaaaaaaaaaaaaaaaaaaaaaaaaaaaaaaaaaaaaaaaaaaaaaaaaaaaaaaaaaaaaaaugcaucccccccccccccccccccccccccccccccaaaggcucuuuucagagccaccagaauu

SEQ ID NO: 11310 - RNA, 874 nt, Artificial Sequence
  mRNA product Design c-5 comprising derived and/or modified sequence from HRSV(A2)__P04545.1__M2-1 (opt6)
gggagagcggcucggccauuuugucccagucaguccggaggcugcggcugcagaaguaccgccugcggaguaacugcaaagaagcuuaccaugucaagaagaaacccaugcaaauucgaaauaagaggacacugccuaaacggaaaaagaugccacuucucacacaacuacuucgaauggccaccacacgcacuacuuguaagacaaaacuucaugcuaaacagaauacuaaaaucaauggacaaaucaauagacacauuaucagaaauaucaggagcagcagaacucgacagaacagaagaauacgcacuaggaguaguaggaguacuagaaucauacauaggaucaauaaacaacauaacaaaacaaucagcaugcguagccauguccaaacuacuaacagaacuaaacuccgacgacauaaaaaaacuaagagacaacgaagaacuaaacucaccaaaaauaagaguauacaacacaguaauaucauacauagaaucaaacagaaaaaacaauaaacaaacaauacaccuacuaaaaagacucccagcagacguacuaaaaaaaacaauaaaaaacacacuagacauccacaaaucaauaacaauaaacaacccaaaagaaucaacagucucagacaccaacgaccacgcaaaaaacaacgacacaacauaaggacuagucccuguucccagagcccacuuuuuuuucuuuuuuugaaauaaaauagccugucuuucagaucuaaaaaaaaaaaaaaaaaaaaaaaaaaaaaaaaaaaaaaaaaaaaaaaaaaaaaaaaaaaaaaaaugcaucccccccccccccccccccccccccccccccaaaggcucuuuucagagccaccagaauu

SEQ ID NO: 11311 - RNA, 874 nt, Artificial Sequence
  mRNA product Design c-5 comprising derived and/or modified sequence from HRSV(A2)__P04545.1__M2-1 (opt11)
gggagagcggcucggccauuuugucccagucaguccggaggcugcggcugcagaaguaccgccugcggaguaacugcaaagaagcuuaccaugucacgacgcaaccccugcaaauucgaaauccgcggccacugccuaaacggcaaacgcugccacuucucccacaacuacuucgaauggcccccccacgcccuccuuguccgccaaaacuucaugcucaaccgcauccucaaauccauggacaaaagcaucgacacccucuccgaaaucuccggcgcagccgaacucgaccgcaccgaagaauacgcccucggcgucguaggcguccucgaauccuacaucggcucaaucaacaacaucaccaaacaauccgccugcgucgccauguccaaacuccucaccgaacucaacuccgacgacaucaaaaaacuccgcgacaacgaagaacucaacucccccaaaauccgagucuacaacaccguaaucuccuacaucgaauccaaccgcaaaaacaacaaacaaaccauccaccuacuaaaacgacuccccgccgacguccucaaaaaaacaaucaaaaacacccucgacauccacaaauccaucaccaucaacaaccccaaagaaucaaccgucuccgacaccaacgaccacgccaaaaacaacgacaccaccugaggacuagucccuguucccagagcccacuuuuuuuucuuuuuuugaaauaaaauagccugucuuucagaucuaaaaaaaaaaaaaaaaaaaaaaaaaaaaaaaaaaaaaaaaaaaaaaaaaaaaaaaaaaaaaaaaugcaucccccccccccccccccccccccccccccccaaaggcucuuuucagagccaccagaauu

SEQ ID NO: 11312 - RNA, 883 nt, Artificial Sequence
  mRNA product Design d-1 comprising derived and/or modified sequence from HRSV(A2)__P04545.1__M2-1 (wt)
gggagacccgugacccggaaguuguacggcuacgcgacuuucccucccacaaacccucgcgcccuuccuuuccuacuugggcccggcagaaagcuuaccaugucacgaaggaauccuugcaaauuugaaauucgaggucauugcuuaaaugguaagaggugucauuuuagucauaauuauuuugaauggccaccccaugcacugcuuguaagacaaaacuuuauguuaaacagaauacuuaagucuauggauaaaaguauagauaccuuaucagaaauaaguggagcugcagaguuggacagaacagaagaguaugcucuugguguaguuggagugcuagagaguuauauaggaucaauaaacaauauaacuaaacaaucagcauguguugccaugagcaaacuccucacugaacucaauagugaugauaucaaaaagcugagggacaaugaagagcuaaauucacccaagauaagaguguacaauacugucauaucauauauugaaagcaacaggaaaaacaauaaacaaacuauccaucuguuaaaaagauugccagcagacguauugaagaaaaccaucaaaaacacauuggauauccauaagagcauaaccaucaacaacccaaaagaaucaacuguuagugauacaaaugaccaugccaaaaauaaugauacuaccugaggacuagucccuguucccagagcccacuuuuuuuucuuuuuuugaaauaaaauagccugucuuucagaucuaaaaaaaaaaaaaaaaaaaaaaaaaaaaaaaaaaaaaaaaaaaaaaaaaaaaaaaaaaaaaaaaugcaucccccccccccccccccccccccccccccccaaaggcucuuuucagagccaccagaauu

SEQ ID NO: 11313 - RNA, 883 nt, Artificial Sequence
  mRNA product Design d-1 comprising derived and/or modified sequence from HRSV(A2)__P04545.1__M2-1 (opt1)
gggagacccgugacccggaaguuguacggcuacgcgacuuucccucccacaaacccucgcgcccuuccuuuccuacuugggcccggcagaaagcuuaccaugagccgccggaaccccugcaaguucgagauccgcggccacugccugaacgggaagcggugccacuucucccacaacuacuucgaguggccgccccacgcccuccuggugcgccagaacuucaugcugaaccggauccucaagagcauggacaaguccaucgacacccugagcgagaucuccggcgccgcggagcuggaccgcaccgaggaguacgcccucggggucgugggcgugcuggagagcuacaucggguccaucaacaacaucacgaagcagagcgccugcgucgccauguccaagcugcucaccgagcugaacagcgacgacaucaagaagcugcgggacaacgaggagcucaacucccccaagauccgcguguacaacaccgugaucagcuacaucgaguccaaccggaagaacaacaagcagaccauccaccuccugaagcgccugcccgccgacguccugaagaagacgaucaagaacacccuggacauccacaagagcaucaccaucaacaacccgaaggaguccaccgugagcgacacgaacgaccacgcgaagaacaacgacaccaccugaggacuagucccuguucccagagcccacuuuuuuuucuuuuuuugaaauaaaauagccugucuuucagaucuaaaaaaaaaaaaaaaaaaaaaaaaaaaaaaaaaaaaaaaaaaaaaaaaaaaaaaaaaaaaaaaaugcaucccccccccccccccccccccccccccccccaaaggcucuuuucagagccaccagaauu

SEQ ID NO: 11314 - RNA, 883 nt, Artificial Sequence
  mRNA product Design d-1 comprising derived and/or modified sequence from HRSV(A2)__P04545.1__M2-1 (opt2)
gggagacccgugacccggaaguuguacggcuacgcgacuuucccucccacaaacccucgcgcccuuccuuuccuacuugggcccggcagaaagcuuaccaugucccgccgcaaccccugcaaguucgagauccgcggccacugccucaacggcaagcgcugccacuucucccacaacuacuucgaguggcccccccacgcccuccucguccgccagaacuucaugcucaaccgcauccucaaguccauggacaaguccaucgacacccucuccgagaucuccggcgccgccgagcucgaccgcaccgaggaguacgcccucggcgucgucggcguccucgaguccuacaucggcuccaucaacaacaucaccaagcaguccgccugcgucgccauguccaagcuccucaccgagcucaacuccgacgacaucaagaagcuccgcgacaacgaggagcucaacucccccaagauccgcgucuacaacaccgucaucuccuacaucgaguccaaccgcaagaacaacaagcagaccauccaccuccucaagcgccuccccgccgacguccucaagaagaccaucaagaacacccucgacauccacaaguccaucaccaucaacaaccccaaggaguccaccgucuccgacaccaacgaccacgccaagaacaacgacaccaccugaggacuagucccuguucccagagcccacuuuuuuuucuuuuuuugaaauaaaauagccugucuuucagaucuaaaaaaaaaaaaaaaaaaaaaaaaaaaaaaaaaaaaaaaaaaaaaaaaaaaaaaaaaaaaaaaaugcaucccccccccccccccccccccccccccccccaaaggcucuuuucagagccaccagaauu

SEQ ID NO: 11315 - RNA, 883 nt, Artificial Sequence
  mRNA product Design d-1 comprising derived and/or modified sequence from HRSV(A2)__P04545.1__M2-1 (opt3)
gggagacccgugacccggaaguuguacggcuacgcgacuuucccucccacaaacccucgcgcccuuccuuuccuacuugggcccggcagaaagcuuaccaugagcagaaggaaccccugcaaguucgagauccggggccacugucugaaugggaaacgcugccauuuuucccacaacuacuucgaauggccuccacaugcacuccuugugcgacagaauuuuaugcugaaccguauuuugaagucuauggacaaaucaauagauaccuuaagugagaucagcggagcugcagaacuggacagaacagaggaauaugcccuaggugucguuggcgugcucgaguccuacauugggucuaucaauaacauuacuaagcaaucggcguguguagcuaugucaaaacugcuuacggagcugaauagcgaugacaucaagaaguugagggauaacgaagaguuaaauaguccgaaaauacggguguauaacaccgucaucuccuacauugaaucuaaucgcaagaacaauaaacagacaauccaucugcugaagagacuccccgccgacgugcucaaaaagacuauuaagaacacccuggauauccacaaaagcauaacaauuaauaacccuaaggaguccaccguuucagacacuaacgaucacgccaaaaauaacgacacaaccugaggacuagucccuguucccagagcccacuuuuuuuucuuuuuuugaaauaaaauagccugucuuucagaucuaaaaaaaaaaaaaaaaaaaaaaaaaaaaaaaaaaaaaaaaaaaaaaaaaaaaaaaaaaaaaaaaugcaucccccccccccccccccccccccccccccccaaaggcucuuuucagagccaccagaauu

SEQ ID NO: 11316 - RNA, 883 nt, Artificial Sequence
  mRNA product Design d-1 comprising derived and/or modified sequence from HRSV(A2)__P04545.1__M2-1 (opt4)
gggagacccgugacccggaaguuguacggcuacgcgacuuucccucccacaaacccucgcgcccuuccuuuccuacuugggcccggcagaaagcuuaccaugagcagaagaaaccccugcaaguucgagaucagaggccacugccugaacggcaagagaugccacuucagccacaacuacuucgaguggcccccccacgcccugcuggugagacagaacuucaugcugaacagaauccugaagagcauggacaagagcaucgacacccugagcgagaucagcggcgccgccgagcuggacagaaccgaggaguacgcccugggcguggugggcgugcuggagagcuacaucggcagcaucaacaacaucaccaagcagagcgccugcguggccaugagcaagcugcugaccgagcugaacagcgacgacaucaagaagcugagagacaacgaggagcugaacagccccaagaucagaguguacaacaccgugaucagcuacaucgagagcaacagaaagaacaacaagcagaccauccaccugcugaagagacugcccgccgacgugcugaagaagaccaucaagaacacccuggacauccacaagagcaucaccaucaacaaccccaaggagagcaccgugagcgacaccaacgaccacgccaagaacaacgacaccaccugaggacuagucccuguucccagagcccacuuuuuuuucuuuuuuugaaauaaaauagccugucuuucagaucuaaaaaaaaaaaaaaaaaaaaaaaaaaaaaaaaaaaaaaaaaaaaaaaaaaaaaaaaaaaaaaaaugcaucccccccccccccccccccccccccccccccaaaggcucuuuucagagccaccagaauu

SEQ ID NO: 11317 - RNA, 883 nt, Artificial Sequence
  mRNA product Design d-1 comprising derived and/or modified sequence from HRSV(A2)__P04545.1__M2-1 (opt5)
gggagacccgugacccggaaguuguacggcuacgcgacuuucccucccacaaacccucgcgcccuuccuuuccuacuugggcccggcagaaagcuuaccaugagcagacggaaccccugcaaguucgagauccgcggccacugucugaaugggaaaagaugccauuuuucccacaacuacuucgaauggccuccgcaugcccuccuggugcggcagaauuuuaugcuuaaccgcauucugaagucuauggacaaaagcaucgauacccucuccgagauuucuggagcugccgaacuggacagaacagaggaauaugcgcuuggcgucguuggggugcuggagagcuacaucggauccauuaauaacaucacgaagcaaucugcuuguguggccaugagcaaacuccugaccgagcucaauuccgaugacaucaagaagcugcgggauaacgaggaacugaauagccccaaaauucgcgucuauaacacagugaucucuuacauugaauccaauagaaagaacaauaaacagaccauccaccuucugaagcggcucccugccgacguucugaaaaagacaauuaagaacacccuugauauccauaaaagcauuacaaucaauaaccccaaggagucuaccguguccgacacgaacgaucacgcuaaaaauaacgacaccacaugaggacuagucccuguucccagagcccacuuuuuuuucuuuuuuugaaauaaaauagccugucuuucagaucuaaaaaaaaaaaaaaaaaaaaaaaaaaaaaaaaaaaaaaaaaaaaaaaaaaaaaaaaaaaaaaaaugcaucccccccccccccccccccccccccccccccaaaggcucuuuucagagccaccagaauu

SEQ ID NO: 11318 - RNA, 883 nt, Artificial Sequence
  mRNA product Design d-1 comprising derived and/or modified sequence from HRSV(A2)__P04545.1__M2-1 (opt6)
gggagacccgugacccggaaguuguacggcuacgcgacuuucccucccacaaacccucgcgcccuuccuuuccuacuugggcccggcagaaagcuuaccaugucaagaagaaacccaugcaaauucgaaauaagaggacacugccuaaacggaaaaagaugccacuucucacacaacuacuucgaauggccaccacacgcacuacuuguaagacaaaacuucaugcuaaacagaauacuaaaaucaauggacaaaucaauagacacauuaucagaaauaucaggagcagcagaacucgacagaacagaagaauacgcacuaggaguaguaggaguacuagaaucauacauaggaucaauaaacaacauaacaaaacaaucagcaugcguagccauguccaaacuacuaacagaacuaaacuccgacgacauaaaaaaacuaagagacaacgaagaacuaaacucaccaaaaauaagaguauacaacacaguaauaucauacauagaaucaaacagaaaaaacaauaaacaaacaauacaccuacuaaaaagacucccagcagacguacuaaaaaaaacaauaaaaaacacacuagacauccacaaaucaauaacaauaaacaacccaaaagaaucaacagucucagacaccaacgaccacgcaaaaaacaacgacacaacauaaggacuagucccuguucccagagcccacuuuuuuuucuuuuuuugaaauaaaauagccugucuuucagaucuaaaaaaaaaaaaaaaaaaaaaaaaaaaaaaaaaaaaaaaaaaaaaaaaaaaaaaaaaaaaaaaaugcaucccccccccccccccccccccccccccccccaaaggcucuuuucagagccaccagaauu

SEQ ID NO: 11319 - RNA, 883 nt, Artificial Sequence
  mRNA product Design d-1 comprising derived and/or modified sequence from HRSV(A2)__P04545.1__M2-1 (opt11)
gggagacccgugacccggaaguuguacggcuacgcgacuuucccucccacaaacccucgcgcccuuccuuuccuacuugggcccggcagaaagcuuaccaugucacgacgcaaccccugcaaauucgaaauccgcggccacugccuaaacggcaaacgcugccacuucucccacaacuacuucgaauggcccccccacgcccuccuuguccgccaaaacuucaugcucaaccgcauccucaaauccauggacaaaagcaucgacacccucuccgaaaucuccggcgcagccgaacucgaccgcaccgaagaauacgcccucggcgucguaggcguccucgaauccuacaucggcucaaucaacaacaucaccaaacaauccgccugcgucgccauguccaaacuccucaccgaacucaacuccgacgacaucaaaaaacuccgcgacaacgaagaacucaacucccccaaaauccgagucuacaacaccguaaucuccuacaucgaauccaaccgcaaaaacaacaaacaaaccauccaccuacuaaaacgacuccccgccgacguccucaaaaaaacaaucaaaaacacccucgacauccacaaauccaucaccaucaacaaccccaaagaaucaaccgucuccgacaccaacgaccacgccaaaaacaacgacaccaccugaggacuagucccuguucccagagcccacuuuuuuuucuuuuuuugaaauaaaauagccugucuuucagaucuaaaaaaaaaaaaaaaaaaaaaaaaaaaaaaaaaaaaaaaaaaaaaaaaaaaaaaaaaaaaaaaaugcaucccccccccccccccccccccccccccccccaaaggcucuuuucagagccaccagaauu

SEQ ID NO: 11320 - RNA, 938 nt, Artificial Sequence
  mRNA product Design d-2 comprising derived and/or modified sequence from HRSV(A2)__P04545.1__M2-1 (wt)
gggagagcggcucggccauuuugucccagucaguccggaggcugcggcugcagaaguaccgccugcggaguaacugcaaagaagcuuaccaugucacgaaggaauccuugcaaauuugaaauucgaggucauugcuuaaaugguaagaggugucauuuuagucauaauuauuuugaauggccaccccaugcacugcuuguaagacaaaacuuuauguuaaacagaauacuuaagucuauggauaaaaguauagauaccuuaucagaaauaaguggagcugcagaguuggacagaacagaagaguaugcucuugguguaguuggagugcuagagaguuauauaggaucaauaaacaauauaacuaaacaaucagcauguguugccaugagcaaacuccucacugaacucaauagugaugauaucaaaaagcugagggacaaugaagagcuaaauucacccaagauaagaguguacaauacugucauaucauauauugaaagcaacaggaaaaacaauaaacaaacuauccaucuguuaaaaagauugccagcagacguauugaagaaaaccaucaaaaacacauuggauauccauaagagcauaaccaucaacaacccaaaagaaucaacuguuagugauacaaaugaccaugccaaaaauaaugauacuaccugaggacuaguaauaaggaaacuguaugaaugucugugggcaggaagugaagagauccuucuguaaagguuuuuggaauuaugucugcugaauaauaaacuuuuuugaaauaauaaaucugguagaaaaaugagaucuaaaaaaaaaaaaaaaaaaaaaaaaaaaaaaaaaaaaaaaaaaaaaaaaaaaaaaaaaaaaaaaaugcaucccccccccccccccccccccccccccccccaaaggcucuuuucagagccaccagaauu

SEQ ID NO: 11321 - RNA, 938 nt, Artificial Sequence
  mRNA product Design d-2 comprising derived and/or modified sequence from HRSV(A2)__P04545.1__M2-1 (opt1)
gggagagcggcucggccauuuugucccagucaguccggaggcugcggcugcagaaguaccgccugcggaguaacugcaaagaagcuuaccaugagccgccggaaccccugcaaguucgagauccgcggccacugccugaacgggaagcggugccacuucucccacaacuacuucgaguggccgccccacgcccuccuggugcgccagaacuucaugcugaaccggauccucaagagcauggacaaguccaucgacacccugagcgagaucuccggcgccgcggagcuggaccgcaccgaggaguacgcccucggggucgugggcgugcuggagagcuacaucggguccaucaacaacaucacgaagcagagcgccugcgucgccauguccaagcugcucaccgagcugaacagcgacgacaucaagaagcugcgggacaacgaggagcucaacucccccaagauccgcguguacaacaccgugaucagcuacaucgaguccaaccggaagaacaacaagcagaccauccaccuccugaagcgccugcccgccgacguccugaagaagacgaucaagaacacccuggacauccacaagagcaucaccaucaacaacccgaaggaguccaccgugagcgacacgaacgaccacgcgaagaacaacgacaccaccugaggacuaguaauaaggaaacuguaugaaugucugugggcaggaagugaagagauccuucuguaaagguuuuuggaauuaugucugcugaauaauaaacuuuuuugaaauaauaaaucugguagaaaaaugagaucuaaaaaaaaaaaaaaaaaaaaaaaaaaaaaaaaaaaaaaaaaaaaaaaaaaaaaaaaaaaaaaaaugcaucccccccccccccccccccccccccccccccaaaggcucuuuucagagccaccagaauu

SEQ ID NO: 11322 - RNA, 938 nt, Artificial Sequence
  mRNA product Design d-2 comprising derived and/or modified sequence from HRSV(A2)__P04545.1__M2-1 (opt2)
gggagagcggcucggccauuuugucccagucaguccggaggcugcggcugcagaaguaccgccugcggaguaacugcaaagaagcuuaccaugucccgccgcaaccccugcaaguucgagauccgcggccacugccucaacggcaagcgcugccacuucucccacaacuacuucgaguggcccccccacgcccuccucguccgccagaacuucaugcucaaccgcauccucaaguccauggacaaguccaucgacacccucuccgagaucuccggcgccgccgagcucgaccgcaccgaggaguacgcccucggcgucgucggcguccucgaguccuacaucggcuccaucaacaacaucaccaagcaguccgccugcgucgccauguccaagcuccucaccgagcucaacuccgacgacaucaagaagcuccgcgacaacgaggagcucaacucccccaagauccgcgucuacaacaccgucaucuccuacaucgaguccaaccgcaagaacaacaagcagaccauccaccuccucaagcgccuccccgccgacguccucaagaagaccaucaagaacacccucgacauccacaaguccaucaccaucaacaaccccaaggaguccaccgucuccgacaccaacgaccacgccaagaacaacgacaccaccugaggacuaguaauaaggaaacuguaugaaugucugugggcaggaagugaagagauccuucuguaaagguuuuuggaauuaugucugcugaauaauaaacuuuuuugaaauaauaaaucugguagaaaaaugagaucuaaaaaaaaaaaaaaaaaaaaaaaaaaaaaaaaaaaaaaaaaaaaaaaaaaaaaaaaaaaaaaaaugcaucccccccccccccccccccccccccccccccaaaggcucuuuucagagccaccagaauu

SEQ ID NO: 11323 - RNA, 938 nt, Artificial Sequence
  mRNA product Design d-2 comprising derived and/or modified sequence from HRSV(A2)__P04545.1__M2-1 (opt3)
gggagagcggcucggccauuuugucccagucaguccggaggcugcggcugcagaaguaccgccugcggaguaacugcaaagaagcuuaccaugagcagaaggaaccccugcaaguucgagauccggggccacugucugaaugggaaacgcugccauuuuucccacaacuacuucgaauggccuccacaugcacuccuugugcgacagaauuuuaugcugaaccguauuuugaagucuauggacaaaucaauagauaccuuaagugagaucagcggagcugcagaacuggacagaacagaggaauaugcccuaggugucguuggcgugcucgaguccuacauugggucuaucaauaacauuacuaagcaaucggcguguguagcuaugucaaaacugcuuacggagcugaauagcgaugacaucaagaaguugagggauaacgaagaguuaaauaguccgaaaauacggguguauaacaccgucaucuccuacauugaaucuaaucgcaagaacaauaaacagacaauccaucugcugaagagacuccccgccgacgugcucaaaaagacuauuaagaacacccuggauauccacaaaagcauaacaauuaauaacccuaaggaguccaccguuucagacacuaacgaucacgccaaaaauaacgacacaaccugaggacuaguaauaaggaaacuguaugaaugucugugggcaggaagugaagagauccuucuguaaagguuuuuggaauuaugucugcugaauaauaaacuuuuuugaaauaauaaaucugguagaaaaaugagaucuaaaaaaaaaaaaaaaaaaaaaaaaaaaaaaaaaaaaaaaaaaaaaaaaaaaaaaaaaaaaaaaaugcaucccccccccccccccccccccccccccccccaaaggcucuuuucagagccaccagaauu

SEQ ID NO: 11324 - RNA, 938 nt, Artificial Sequence
  mRNA product Design d-2 comprising derived and/or modified sequence from HRSV(A2)__P04545.1__M2-1 (opt4)
gggagagcggcucggccauuuugucccagucaguccggaggcugcggcugcagaaguaccgccugcggaguaacugcaaagaagcuuaccaugagcagaagaaaccccugcaaguucgagaucagaggccacugccugaacggcaagagaugccacuucagccacaacuacuucgaguggcccccccacgcccugcuggugagacagaacuucaugcugaacagaauccugaagagcauggacaagagcaucgacacccugagcgagaucagcggcgccgccgagcuggacagaaccgaggaguacgcccugggcguggugggcgugcuggagagcuacaucggcagcaucaacaacaucaccaagcagagcgccugcguggccaugagcaagcugcugaccgagcugaacagcgacgacaucaagaagcugagagacaacgaggagcugaacagccccaagaucagaguguacaacaccgugaucagcuacaucgagagcaacagaaagaacaacaagcagaccauccaccugcugaagagacugcccgccgacgugcugaagaagaccaucaagaacacccuggacauccacaagagcaucaccaucaacaaccccaaggagagcaccgugagcgacaccaacgaccacgccaagaacaacgacaccaccugaggacuaguaauaaggaaacuguaugaaugucugugggcaggaagugaagagauccuucuguaaagguuuuuggaauuaugucugcugaauaauaaacuuuuuugaaauaauaaaucugguagaaaaaugagaucuaaaaaaaaaaaaaaaaaaaaaaaaaaaaaaaaaaaaaaaaaaaaaaaaaaaaaaaaaaaaaaaaugcaucccccccccccccccccccccccccccccccaaaggcucuuuucagagccaccagaauu

SEQ ID NO: 11325 - RNA, 938 nt, Artificial Sequence
  mRNA product Design d-2 comprising derived and/or modified sequence from HRSV(A2)__P04545.1__M2-1 (opt5)
gggagagcggcucggccauuuugucccagucaguccggaggcugcggcugcagaaguaccgccugcggaguaacugcaaagaagcuuaccaugagcagacggaaccccugcaaguucgagauccgcggccacugucugaaugggaaaagaugccauuuuucccacaacuacuucgaauggccuccgcaugcccuccuggugcggcagaauuuuaugcuuaaccgcauucugaagucuauggacaaaagcaucgauacccucuccgagauuucuggagcugccgaacuggacagaacagaggaauaugcgcuuggcgucguuggggugcuggagagcuacaucggauccauuaauaacaucacgaagcaaucugcuuguguggccaugagcaaacuccugaccgagcucaauuccgaugacaucaagaagcugcgggauaacgaggaacugaauagccccaaaauucgcgucuauaacacagugaucucuuacauugaauccaauagaaagaacaauaaacagaccauccaccuucugaagcggcucccugccgacguucugaaaaagacaauuaagaacacccuugauauccauaaaagcauuacaaucaauaaccccaaggagucuaccguguccgacacgaacgaucacgcuaaaaauaacgacaccacaugaggacuaguaauaaggaaacuguaugaaugucugugggcaggaagugaagagauccuucuguaaagguuuuuggaauuaugucugcugaauaauaaacuuuuuugaaauaauaaaucugguagaaaaaugagaucuaaaaaaaaaaaaaaaaaaaaaaaaaaaaaaaaaaaaaaaaaaaaaaaaaaaaaaaaaaaaaaaaugcaucccccccccccccccccccccccccccccccaaaggcucuuuucagagccaccagaauu

SEQ ID NO: 11326 - RNA, 938 nt, Artificial Sequence
  mRNA product Design d-2 comprising derived and/or modified sequence from HRSV(A2)__P04545.1__M2-1 (opt6)
gggagagcggcucggccauuuugucccagucaguccggaggcugcggcugcagaaguaccgccugcggaguaacugcaaagaagcuuaccaugucaagaagaaacccaugcaaauucgaaauaagaggacacugccuaaacggaaaaagaugccacuucucacacaacuacuucgaauggccaccacacgcacuacuuguaagacaaaacuucaugcuaaacagaauacuaaaaucaauggacaaaucaauagacacauuaucagaaauaucaggagcagcagaacucgacagaacagaagaauacgcacuaggaguaguaggaguacuagaaucauacauaggaucaauaaacaacauaacaaaacaaucagcaugcguagccauguccaaacuacuaacagaacuaaacuccgacgacauaaaaaaacuaagagacaacgaagaacuaaacucaccaaaaauaagaguauacaacacaguaauaucauacauagaaucaaacagaaaaaacaauaaacaaacaauacaccuacuaaaaagacucccagcagacguacuaaaaaaaacaauaaaaaacacacuagacauccacaaaucaauaacaauaaacaacccaaaagaaucaacagucucagacaccaacgaccacgcaaaaaacaacgacacaacauaaggacuaguaauaaggaaacuguaugaaugucugugggcaggaagugaagagauccuucuguaaagguuuuuggaauuaugucugcugaauaauaaacuuuuuugaaauaauaaaucugguagaaaaaugagaucuaaaaaaaaaaaaaaaaaaaaaaaaaaaaaaaaaaaaaaaaaaaaaaaaaaaaaaaaaaaaaaaaugcaucccccccccccccccccccccccccccccccaaaggcucuuuucagagccaccagaauu

SEQ ID NO: 11327 - RNA, 938 nt, Artificial Sequence
  mRNA product Design d-2 comprising derived and/or modified sequence from HRSV(A2)__P04545.1__M2-1 (opt11)
gggagagcggcucggccauuuugucccagucaguccggaggcugcggcugcagaaguaccgccugcggaguaacugcaaagaagcuuaccaugucacgacgcaaccccugcaaauucgaaauccgcggccacugccuaaacggcaaacgcugccacuucucccacaacuacuucgaauggcccccccacgcccuccuuguccgccaaaacuucaugcucaaccgcauccucaaauccauggacaaaagcaucgacacccucuccgaaaucuccggcgcagccgaacucgaccgcaccgaagaauacgcccucggcgucguaggcguccucgaauccuacaucggcucaaucaacaacaucaccaaacaauccgccugcgucgccauguccaaacuccucaccgaacucaacuccgacgacaucaaaaaacuccgcgacaacgaagaacucaacucccccaaaauccgagucuacaacaccguaaucuccuacaucgaauccaaccgcaaaaacaacaaacaaaccauccaccuacuaaaacgacuccccgccgacguccucaaaaaaacaaucaaaaacacccucgacauccacaaauccaucaccaucaacaaccccaaagaaucaaccgucuccgacaccaacgaccacgccaaaaacaacgacaccaccugaggacuaguaauaaggaaacuguaugaaugucugugggcaggaagugaagagauccuucuguaaagguuuuuggaauuaugucugcugaauaauaaacuuuuuugaaauaauaaaucugguagaaaaaugagaucuaaaaaaaaaaaaaaaaaaaaaaaaaaaaaaaaaaaaaaaaaaaaaaaaaaaaaaaaaaaaaaaaugcaucccccccccccccccccccccccccccccccaaaggcucuuuucagagccaccagaauu

SEQ ID NO: 11328 - RNA, 1254 nt, Artificial Sequence
  mRNA product Design d-3 comprising derived and/or modified sequence from HRSV(A2)__P04545.1__M2-1 (wt)
gggagagggcgcuuggcuugcaaggacccugagcugcggcauugaagcacacccaacccaacucgacugaagucagccucacugaaccggaucugagaaucuucucucucugggcuugccagggcucuccgaaccuagcuagcauccucuucaauuccaacuagaaagcuuaccaugucacgaaggaauccuugcaaauuugaaauucgaggucauugcuuaaaugguaagaggugucauuuuagucauaauuauuuugaauggccaccccaugcacugcuuguaagacaaaacuuuauguuaaacagaauacuuaagucuauggauaaaaguauagauaccuuaucagaaauaaguggagcugcagaguuggacagaacagaagaguaugcucuugguguaguuggagugcuagagaguuauauaggaucaauaaacaauauaacuaaacaaucagcauguguugccaugagcaaacuccucacugaacucaauagugaugauaucaaaaagcugagggacaaugaagagcuaaauucacccaagauaagaguguacaauacugucauaucauauauugaaagcaacaggaaaaacaauaaacaaacuauccaucuguuaaaaagauugccagcagacguauugaagaaaaccaucaaaaacacauuggauauccauaagagcauaaccaucaacaacccaaaagaaucaacuguuagugauacaaaugaccaugccaaaaauaaugauacuaccugaggacuagugaagggaacacccaaauuuaauucagccuuaagcacaauuaauuaagagugaaacguaauuguacaagcaguuggucacccaccauagggcaugaucaacaccgcaaccuuuccuuuuucccccagugauucugaaaaaccccucuucccuucagcuugcuuagauguuccaaauuuaguaagcuuaaggcggccuacagaagaaaaagaaaaaaaaggccacaaaaguucccucucacuuucaguaaauaaaauaaaagcagcaacagaaauaaagaaauaaaugaaauucaaaaugaaauaaauauuguguugugcagcauuaaaaaaucaauaaaaauuaaaaaugagcaagaucuaaaaaaaaaaaaaaaaaaaaaaaaaaaaaaaaaaaaaaaaaaaaaaaaaaaaaaaaaaaaaaaaugcaucccccccccccccccccccccccccccccccaaaggcucuuuucagagccaccagaauu

SEQ ID NO: 11329 - RNA, 1254 nt, Artificial Sequence
  mRNA product Design d-3 comprising derived and/or modified sequence from HRSV(A2)__P04545.1__M2-1 (opt1)
gggagagggcgcuuggcuugcaaggacccugagcugcggcauugaagcacacccaacccaacucgacugaagucagccucacugaaccggaucugagaaucuucucucucugggcuugccagggcucuccgaaccuagcuagcauccucuucaauuccaacuagaaagcuuaccaugagccgccggaaccccugcaaguucgagauccgcggccacugccugaacgggaagcggugccacuucucccacaacuacuucgaguggccgccccacgcccuccuggugcgccagaacuucaugcugaaccggauccucaagagcauggacaaguccaucgacacccugagcgagaucuccggcgccgcggagcuggaccgcaccgaggaguacgcccucggggucgugggcgugcuggagagcuacaucggguccaucaacaacaucacgaagcagagcgccugcgucgccauguccaagcugcucaccgagcugaacagcgacgacaucaagaagcugcgggacaacgaggagcucaacucccccaagauccgcguguacaacaccgugaucagcuacaucgaguccaaccggaagaacaacaagcagaccauccaccuccugaagcgccugcccgccgacguccugaagaagacgaucaagaacacccuggacauccacaagagcaucaccaucaacaacccgaaggaguccaccgugagcgacacgaacgaccacgcgaagaacaacgacaccaccugaggacuagugaagggaacacccaaauuuaauucagccuuaagcacaauuaauuaagagugaaacguaauuguacaagcaguuggucacccaccauagggcaugaucaacaccgcaaccuuuccuuuuucccccagugauucugaaaaaccccucuucccuucagcuugcuuagauguuccaaauuuaguaagcuuaaggcggccuacagaagaaaaagaaaaaaaaggccacaaaaguucccucucacuuucaguaaauaaaauaaaagcagcaacagaaauaaagaaauaaaugaaauucaaaaugaaauaaauauuguguugugcagcauuaaaaaaucaauaaaaauuaaaaaugagcaagaucuaaaaaaaaaaaaaaaaaaaaaaaaaaaaaaaaaaaaaaaaaaaaaaaaaaaaaaaaaaaaaaaaugcaucccccccccccccccccccccccccccccccaaaggcucuuuucagagccaccagaauu

SEQ ID NO: 11330 - RNA, 1254 nt, Artificial Sequence
  mRNA product Design d-3 comprising derived and/or modified sequence from HRSV(A2)__P04545.1__M2-1 (opt2)
gggagagggcgcuuggcuugcaaggacccugagcugcggcauugaagcacacccaacccaacucgacugaagucagccucacugaaccggaucugagaaucuucucucucugggcuugccagggcucuccgaaccuagcuagcauccucuucaauuccaacuagaaagcuuaccaugucccgccgcaaccccugcaaguucgagauccgcggccacugccucaacggcaagcgcugccacuucucccacaacuacuucgaguggcccccccacgcccuccucguccgccagaacuucaugcucaaccgcauccucaaguccauggacaaguccaucgacacccucuccgagaucuccggcgccgccgagcucgaccgcaccgaggaguacgcccucggcgucgucggcguccucgaguccuacaucggcuccaucaacaacaucaccaagcaguccgccugcgucgccauguccaagcuccucaccgagcucaacuccgacgacaucaagaagcuccgcgacaacgaggagcucaacucccccaagauccgcgucuacaacaccgucaucuccuacaucgaguccaaccgcaagaacaacaagcagaccauccaccuccucaagcgccuccccgccgacguccucaagaagaccaucaagaacacccucgacauccacaaguccaucaccaucaacaaccccaaggaguccaccgucuccgacaccaacgaccacgccaagaacaacgacaccaccugaggacuagugaagggaacacccaaauuuaauucagccuuaagcacaauuaauuaagagugaaacguaauuguacaagcaguuggucacccaccauagggcaugaucaacaccgcaaccuuuccuuuuucccccagugauucugaaaaaccccucuucccuucagcuugcuuagauguuccaaauuuaguaagcuuaaggcggccuacagaagaaaaagaaaaaaaaggccacaaaaguucccucucacuuucaguaaauaaaauaaaagcagcaacagaaauaaagaaauaaaugaaauucaaaaugaaauaaauauuguguugugcagcauuaaaaaaucaauaaaaauuaaaaaugagcaagaucuaaaaaaaaaaaaaaaaaaaaaaaaaaaaaaaaaaaaaaaaaaaaaaaaaaaaaaaaaaaaaaaaugcaucccccccccccccccccccccccccccccccaaaggcucuuuucagagccaccagaauu

SEQ ID NO: 11331 - RNA, 1254 nt, Artificial Sequence
  mRNA product Design d-3 comprising derived and/or modified sequence from HRSV(A2)__P04545.1__M2-1 (opt3)
gggagagggcgcuuggcuugcaaggacccugagcugcggcauugaagcacacccaacccaacucgacugaagucagccucacugaaccggaucugagaaucuucucucucugggcuugccagggcucuccgaaccuagcuagcauccucuucaauuccaacuagaaagcuuaccaugagcagaaggaaccccugcaaguucgagauccggggccacugucugaaugggaaacgcugccauuuuucccacaacuacuucgaauggccuccacaugcacuccuugugcgacagaauuuuaugcugaaccguauuuugaagucuauggacaaaucaauagauaccuuaagugagaucagcggagcugcagaacuggacagaacagaggaauaugcccuaggugucguuggcgugcucgaguccuacauugggucuaucaauaacauuacuaagcaaucggcguguguagcuaugucaaaacugcuuacggagcugaauagcgaugacaucaagaaguugagggauaacgaagaguuaaauaguccgaaaauacggguguauaacaccgucaucuccuacauugaaucuaaucgcaagaacaauaaacagacaauccaucugcugaagagacuccccgccgacgugcucaaaaagacuauuaagaacacccuggauauccacaaaagcauaacaauuaauaacccuaaggaguccaccguuucagacacuaacgaucacgccaaaaauaacgacacaaccugaggacuagugaagggaacacccaaauuuaauucagccuuaagcacaauuaauuaagagugaaacguaauuguacaagcaguuggucacccaccauagggcaugaucaacaccgcaaccuuuccuuuuucccccagugauucugaaaaaccccucuucccuucagcuugcuuagauguuccaaauuuaguaagcuuaaggcggccuacagaagaaaaagaaaaaaaaggccacaaaaguucccucucacuuucaguaaauaaaauaaaagcagcaacagaaauaaagaaauaaaugaaauucaaaaugaaauaaauauuguguugugcagcauuaaaaaaucaauaaaaauuaaaaaugagcaagaucuaaaaaaaaaaaaaaaaaaaaaaaaaaaaaaaaaaaaaaaaaaaaaaaaaaaaaaaaaaaaaaaaugcaucccccccccccccccccccccccccccccccaaaggcucuuuucagagccaccagaauu

SEQ ID NO: 11332 - RNA, 1254 nt, Artificial Sequence
  mRNA product Design d-3 comprising derived and/or modified sequence from HRSV(A2)__P04545.1__M2-1 (opt4)
gggagagggcgcuuggcuugcaaggacccugagcugcggcauugaagcacacccaacccaacucgacugaagucagccucacugaaccggaucugagaaucuucucucucugggcuugccagggcucuccgaaccuagcuagcauccucuucaauuccaacuagaaagcuuaccaugagcagaagaaaccccugcaaguucgagaucagaggccacugccugaacggcaagagaugccacuucagccacaacuacuucgaguggcccccccacgcccugcuggugagacagaacuucaugcugaacagaauccugaagagcauggacaagagcaucgacacccugagcgagaucagcggcgccgccgagcuggacagaaccgaggaguacgcccugggcguggugggcgugcuggagagcuacaucggcagcaucaacaacaucaccaagcagagcgccugcguggccaugagcaagcugcugaccgagcugaacagcgacgacaucaagaagcugagagacaacgaggagcugaacagccccaagaucagaguguacaacaccgugaucagcuacaucgagagcaacagaaagaacaacaagcagaccauccaccugcugaagagacugcccgccgacgugcugaagaagaccaucaagaacacccuggacauccacaagagcaucaccaucaacaaccccaaggagagcaccgugagcgacaccaacgaccacgccaagaacaacgacaccaccugaggacuagugaagggaacacccaaauuuaauucagccuuaagcacaauuaauuaagagugaaacguaauuguacaagcaguuggucacccaccauagggcaugaucaacaccgcaaccuuuccuuuuucccccagugauucugaaaaaccccucuucccuucagcuugcuuagauguuccaaauuuaguaagcuuaaggcggccuacagaagaaaaagaaaaaaaaggccacaaaaguucccucucacuuucaguaaauaaaauaaaagcagcaacagaaauaaagaaauaaaugaaauucaaaaugaaauaaauauuguguugugcagcauuaaaaaaucaauaaaaauuaaaaaugagcaagaucuaaaaaaaaaaaaaaaaaaaaaaaaaaaaaaaaaaaaaaaaaaaaaaaaaaaaaaaaaaaaaaaaugcaucccccccccccccccccccccccccccccccaaaggcucuuuucagagccaccagaauu

SEQ ID NO: 11333 - RNA, 1254 nt, Artificial Sequence
  mRNA product Design d-3 comprising derived and/or modified sequence from HRSV(A2)__P04545.1__M2-1 (opt5)
gggagagggcgcuuggcuugcaaggacccugagcugcggcauugaagcacacccaacccaacucgacugaagucagccucacugaaccggaucugagaaucuucucucucugggcuugccagggcucuccgaaccuagcuagcauccucuucaauuccaacuagaaagcuuaccaugagcagacggaaccccugcaaguucgagauccgcggccacugucugaaugggaaaagaugccauuuuucccacaacuacuucgaauggccuccgcaugcccuccuggugcggcagaauuuuaugcuuaaccgcauucugaagucuauggacaaaagcaucgauacccucuccgagauuucuggagcugccgaacuggacagaacagaggaauaugcgcuuggcgucguuggggugcuggagagcuacaucggauccauuaauaacaucacgaagcaaucugcuuguguggccaugagcaaacuccugaccgagcucaauuccgaugacaucaagaagcugcgggauaacgaggaacugaauagccccaaaauucgcgucuauaacacagugaucucuuacauugaauccaauagaaagaacaauaaacagaccauccaccuucugaagcggcucccugccgacguucugaaaaagacaauuaagaacacccuugauauccauaaaagcauuacaaucaauaaccccaaggagucuaccguguccgacacgaacgaucacgcuaaaaauaacgacaccacaugaggacuagugaagggaacacccaaauuuaauucagccuuaagcacaauuaauuaagagugaaacguaauuguacaagcaguuggucacccaccauagggcaugaucaacaccgcaaccuuuccuuuuucccccagugauucugaaaaaccccucuucccuucagcuugcuuagauguuccaaauuuaguaagcuuaaggcggccuacagaagaaaaagaaaaaaaaggccacaaaaguucccucucacuuucaguaaauaaaauaaaagcagcaacagaaauaaagaaauaaaugaaauucaaaaugaaauaaauauuguguugugcagcauuaaaaaaucaauaaaaauuaaaaaugagcaagaucuaaaaaaaaaaaaaaaaaaaaaaaaaaaaaaaaaaaaaaaaaaaaaaaaaaaaaaaaaaaaaaaaugcaucccccccccccccccccccccccccccccccaaaggcucuuuucagagccaccagaauu

SEQ ID NO: 11334 - RNA, 1254 nt, Artificial Sequence
  mRNA product Design d-3 comprising derived and/or modified sequence from HRSV(A2)__P04545.1__M2-1 (opt6)
gggagagggcgcuuggcuugcaaggacccugagcugcggcauugaagcacacccaacccaacucgacugaagucagccucacugaaccggaucugagaaucuucucucucugggcuugccagggcucuccgaaccuagcuagcauccucuucaauuccaacuagaaagcuuaccaugucaagaagaaacccaugcaaauucgaaauaagaggacacugccuaaacggaaaaagaugccacuucucacacaacuacuucgaauggccaccacacgcacuacuuguaagacaaaacuucaugcuaaacagaauacuaaaaucaauggacaaaucaauagacacauuaucagaaauaucaggagcagcagaacucgacagaacagaagaauacgcacuaggaguaguaggaguacuagaaucauacauaggaucaauaaacaacauaacaaaacaaucagcaugcguagccauguccaaacuacuaacagaacuaaacuccgacgacauaaaaaaacuaagagacaacgaagaacuaaacucaccaaaaauaagaguauacaacacaguaauaucauacauagaaucaaacagaaaaaacaauaaacaaacaauacaccuacuaaaaagacucccagcagacguacuaaaaaaaacaauaaaaaacacacuagacauccacaaaucaauaacaauaaacaacccaaaagaaucaacagucucagacaccaacgaccacgcaaaaaacaacgacacaacauaaggacuagugaagggaacacccaaauuuaauucagccuuaagcacaauuaauuaagagugaaacguaauuguacaagcaguuggucacccaccauagggcaugaucaacaccgcaaccuuuccuuuuucccccagugauucugaaaaaccccucuucccuucagcuugcuuagauguuccaaauuuaguaagcuuaaggcggccuacagaagaaaaagaaaaaaaaggccacaaaaguucccucucacuuucaguaaauaaaauaaaagcagcaacagaaauaaagaaauaaaugaaauucaaaaugaaauaaauauuguguugugcagcauuaaaaaaucaauaaaaauuaaaaaugagcaagaucuaaaaaaaaaaaaaaaaaaaaaaaaaaaaaaaaaaaaaaaaaaaaaaaaaaaaaaaaaaaaaaaaugcaucccccccccccccccccccccccccccccccaaaggcucuuuucagagccaccagaauu

SEQ ID NO: 11335 - RNA, 1254 nt, Artificial Sequence
  mRNA product Design d-3 comprising derived and/or modified sequence from HRSV(A2)__P04545.1__M2-1 (opt11)
gggagagggcgcuuggcuugcaaggacccugagcugcggcauugaagcacacccaacccaacucgacugaagucagccucacugaaccggaucugagaaucuucucucucugggcuugccagggcucuccgaaccuagcuagcauccucuucaauuccaacuagaaagcuuaccaugucacgacgcaaccccugcaaauucgaaauccgcggccacugccuaaacggcaaacgcugccacuucucccacaacuacuucgaauggcccccccacgcccuccuuguccgccaaaacuucaugcucaaccgcauccucaaauccauggacaaaagcaucgacacccucuccgaaaucuccggcgcagccgaacucgaccgcaccgaagaauacgcccucggcgucguaggcguccucgaauccuacaucggcucaaucaacaacaucaccaaacaauccgccugcgucgccauguccaaacuccucaccgaacucaacuccgacgacaucaaaaaacuccgcgacaacgaagaacucaacucccccaaaauccgagucuacaacaccguaaucuccuacaucgaauccaaccgcaaaaacaacaaacaaaccauccaccuacuaaaacgacuccccgccgacguccucaaaaaaacaaucaaaaacacccucgacauccacaaauccaucaccaucaacaaccccaaagaaucaaccgucuccgacaccaacgaccacgccaaaaacaacgacaccaccugaggacuagugaagggaacacccaaauuuaauucagccuuaagcacaauuaauuaagagugaaacguaauuguacaagcaguuggucacccaccauagggcaugaucaacaccgcaaccuuuccuuuuucccccagugauucugaaaaaccccucuucccuucagcuugcuuagauguuccaaauuuaguaagcuuaaggcggccuacagaagaaaaagaaaaaaaaggccacaaaaguucccucucacuuucaguaaauaaaauaaaagcagcaacagaaauaaagaaauaaaugaaauucaaaaugaaauaaauauuguguugugcagcauuaaaaaaucaauaaaaauuaaaaaugagcaagaucuaaaaaaaaaaaaaaaaaaaaaaaaaaaaaaaaaaaaaaaaaaaaaaaaaaaaaaaaaaaaaaaaugcaucccccccccccccccccccccccccccccccaaaggcucuuuucagagccaccagaauu

SEQ ID NO: 11336 - RNA, 937 nt, Artificial Sequence
  mRNA product Design d-4 comprising derived and/or modified sequence from HRSV(A2)__P04545.1__M2-1 (wt)
gggagagucccgcagucggcguccagcggcucugcuuguucgugugugugucguugcaggccuuauucaagcuuaccaugucacgaaggaauccuugcaaauuugaaauucgaggucauugcuuaaaugguaagaggugucauuuuagucauaauuauuuugaauggccaccccaugcacugcuuguaagacaaaacuuuauguuaaacagaauacuuaagucuauggauaaaaguauagauaccuuaucagaaauaaguggagcugcagaguuggacagaacagaagaguaugcucuugguguaguuggagugcuagagaguuauauaggaucaauaaacaauauaacuaaacaaucagcauguguugccaugagcaaacuccucacugaacucaauagugaugauaucaaaaagcugagggacaaugaagagcuaaauucacccaagauaagaguguacaauacugucauaucauauauugaaagcaacaggaaaaacaauaaacaaacuauccaucuguuaaaaagauugccagcagacguauugaagaaaaccaucaaaaacacauuggauauccauaagagcauaaccaucaacaacccaaaagaaucaacuguuagugauacaaaugaccaugccaaaaauaaugauacuaccugaggacuaguggaagcauuuuccuggcugauuaaaagaaauuacucagcuauggucaucuguuccuguuagaaggcuaugcagcauauuauauacuaugcgcauguuaugaaaugcauaauaaaaaauuuuaaaaaaucuaaaagaucuaaaaaaaaaaaaaaaaaaaaaaaaaaaaaaaaaaaaaaaaaaaaaaaaaaaaaaaaaaaaaaaaugcaucccccccccccccccccccccccccccccccaaaggcucuuuucagagccaccagaauu

SEQ ID NO: 11337 - RNA, 937 nt, Artificial Sequence
  mRNA product Design d-4 comprising derived and/or modified sequence from HRSV(A2)__P04545.1__M2-1 (opt1)
gggagagucccgcagucggcguccagcggcucugcuuguucgugugugugucguugcaggccuuauucaagcuuaccaugagccgccggaaccccugcaaguucgagauccgcggccacugccugaacgggaagcggugccacuucucccacaacuacuucgaguggccgccccacgcccuccuggugcgccagaacuucaugcugaaccggauccucaagagcauggacaaguccaucgacacccugagcgagaucuccggcgccgcggagcuggaccgcaccgaggaguacgcccucggggucgugggcgugcuggagagcuacaucggguccaucaacaacaucacgaagcagagcgccugcgucgccauguccaagcugcucaccgagcugaacagcgacgacaucaagaagcugcgggacaacgaggagcucaacucccccaagauccgcguguacaacaccgugaucagcuacaucgaguccaaccggaagaacaacaagcagaccauccaccuccugaagcgccugcccgccgacguccugaagaagacgaucaagaacacccuggacauccacaagagcaucaccaucaacaacccgaaggaguccaccgugagcgacacgaacgaccacgcgaagaacaacgacaccaccugaggacuaguggaagcauuuuccuggcugauuaaaagaaauuacucagcuauggucaucuguuccuguuagaaggcuaugcagcauauuauauacuaugcgcauguuaugaaaugcauaauaaaaaauuuuaaaaaaucuaaaagaucuaaaaaaaaaaaaaaaaaaaaaaaaaaaaaaaaaaaaaaaaaaaaaaaaaaaaaaaaaaaaaaaaugcaucccccccccccccccccccccccccccccccaaaggcucuuuucagagccaccagaauu

SEQ ID NO: 11338 - RNA, 937 nt, Artificial Sequence
  mRNA product Design d-4 comprising derived and/or modified sequence from HRSV(A2)__P04545.1__M2-1 (opt2)
gggagagucccgcagucggcguccagcggcucugcuuguucgugugugugucguugcaggccuuauucaagcuuaccaugucccgccgcaaccccugcaaguucgagauccgcggccacugccucaacggcaagcgcugccacuucucccacaacuacuucgaguggcccccccacgcccuccucguccgccagaacuucaugcucaaccgcauccucaaguccauggacaaguccaucgacacccucuccgagaucuccggcgccgccgagcucgaccgcaccgaggaguacgcccucggcgucgucggcguccucgaguccuacaucggcuccaucaacaacaucaccaagcaguccgccugcgucgccauguccaagcuccucaccgagcucaacuccgacgacaucaagaagcuccgcgacaacgaggagcucaacucccccaagauccgcgucuacaacaccgucaucuccuacaucgaguccaaccgcaagaacaacaagcagaccauccaccuccucaagcgccuccccgccgacguccucaagaagaccaucaagaacacccucgacauccacaaguccaucaccaucaacaaccccaaggaguccaccgucuccgacaccaacgaccacgccaagaacaacgacaccaccugaggacuaguggaagcauuuuccuggcugauuaaaagaaauuacucagcuauggucaucuguuccuguuagaaggcuaugcagcauauuauauacuaugcgcauguuaugaaaugcauaauaaaaaauuuuaaaaaaucuaaaagaucuaaaaaaaaaaaaaaaaaaaaaaaaaaaaaaaaaaaaaaaaaaaaaaaaaaaaaaaaaaaaaaaaugcaucccccccccccccccccccccccccccccccaaaggcucuuuucagagccaccagaauu

SEQ ID NO: 11339 - RNA, 937 nt, Artificial Sequence
  mRNA product Design d-4 comprising derived and/or modified sequence from HRSV(A2)__P04545.1__M2-1 (opt3)
gggagagucccgcagucggcguccagcggcucugcuuguucgugugugugucguugcaggccuuauucaagcuuaccaugagcagaaggaaccccugcaaguucgagauccggggccacugucugaaugggaaacgcugccauuuuucccacaacuacuucgaauggccuccacaugcacuccuugugcgacagaauuuuaugcugaaccguauuuugaagucuauggacaaaucaauagauaccuuaagugagaucagcggagcugcagaacuggacagaacagaggaauaugcccuaggugucguuggcgugcucgaguccuacauugggucuaucaauaacauuacuaagcaaucggcguguguagcuaugucaaaacugcuuacggagcugaauagcgaugacaucaagaaguugagggauaacgaagaguuaaauaguccgaaaauacggguguauaacaccgucaucuccuacauugaaucuaaucgcaagaacaauaaacagacaauccaucugcugaagagacuccccgccgacgugcucaaaaagacuauuaagaacacccuggauauccacaaaagcauaacaauuaauaacccuaaggaguccaccguuucagacacuaacgaucacgccaaaaauaacgacacaaccugaggacuaguggaagcauuuuccuggcugauuaaaagaaauuacucagcuauggucaucuguuccuguuagaaggcuaugcagcauauuauauacuaugcgcauguuaugaaaugcauaauaaaaaauuuuaaaaaaucuaaaagaucuaaaaaaaaaaaaaaaaaaaaaaaaaaaaaaaaaaaaaaaaaaaaaaaaaaaaaaaaaaaaaaaaugcaucccccccccccccccccccccccccccccccaaaggcucuuuucagagccaccagaauu

SEQ ID NO: 11340 - RNA, 937 nt, Artificial Sequence
  mRNA product Design d-4 comprising derived and/or modified sequence from HRSV(A2)__P04545.1__M2-1 (opt4)
gggagagucccgcagucggcguccagcggcucugcuuguucgugugugugucguugcaggccuuauucaagcuuaccaugagcagaagaaaccccugcaaguucgagaucagaggccacugccugaacggcaagagaugccacuucagccacaacuacuucgaguggcccccccacgcccugcuggugagacagaacuucaugcugaacagaauccugaagagcauggacaagagcaucgacacccugagcgagaucagcggcgccgccgagcuggacagaaccgaggaguacgcccugggcguggugggcgugcuggagagcuacaucggcagcaucaacaacaucaccaagcagagcgccugcguggccaugagcaagcugcugaccgagcugaacagcgacgacaucaagaagcugagagacaacgaggagcugaacagccccaagaucagaguguacaacaccgugaucagcuacaucgagagcaacagaaagaacaacaagcagaccauccaccugcugaagagacugcccgccgacgugcugaagaagaccaucaagaacacccuggacauccacaagagcaucaccaucaacaaccccaaggagagcaccgugagcgacaccaacgaccacgccaagaacaacgacaccaccugaggacuaguggaagcauuuuccuggcugauuaaaagaaauuacucagcuauggucaucuguuccuguuagaaggcuaugcagcauauuauauacuaugcgcauguuaugaaaugcauaauaaaaaauuuuaaaaaaucuaaaagaucuaaaaaaaaaaaaaaaaaaaaaaaaaaaaaaaaaaaaaaaaaaaaaaaaaaaaaaaaaaaaaaaaugcaucccccccccccccccccccccccccccccccaaaggcucuuuucagagccaccagaauu

SEQ ID NO: 11341 - RNA, 937 nt, Artificial Sequence
  mRNA product Design d-4 comprising derived and/or modified sequence from HRSV(A2)__P04545.1__M2-1 (opt5)
gggagagucccgcagucggcguccagcggcucugcuuguucgugugugugucguugcaggccuuauucaagcuuaccaugagcagacggaaccccugcaaguucgagauccgcggccacugucugaaugggaaaagaugccauuuuucccacaacuacuucgaauggccuccgcaugcccuccuggugcggcagaauuuuaugcuuaaccgcauucugaagucuauggacaaaagcaucgauacccucuccgagauuucuggagcugccgaacuggacagaacagaggaauaugcgcuuggcgucguuggggugcuggagagcuacaucggauccauuaauaacaucacgaagcaaucugcuuguguggccaugagcaaacuccugaccgagcucaauuccgaugacaucaagaagcugcgggauaacgaggaacugaauagccccaaaauucgcgucuauaacacagugaucucuuacauugaauccaauagaaagaacaauaaacagaccauccaccuucugaagcggcucccugccgacguucugaaaaagacaauuaagaacacccuugauauccauaaaagcauuacaaucaauaaccccaaggagucuaccguguccgacacgaacgaucacgcuaaaaauaacgacaccacaugaggacuaguggaagcauuuuccuggcugauuaaaagaaauuacucagcuauggucaucuguuccuguuagaaggcuaugcagcauauuauauacuaugcgcauguuaugaaaugcauaauaaaaaauuuuaaaaaaucuaaaagaucuaaaaaaaaaaaaaaaaaaaaaaaaaaaaaaaaaaaaaaaaaaaaaaaaaaaaaaaaaaaaaaaaugcaucccccccccccccccccccccccccccccccaaaggcucuuuucagagccaccagaauu

SEQ ID NO: 11342 - RNA, 937 nt, Artificial Sequence
  mRNA product Design d-4 comprising derived and/or modified sequence from HRSV(A2)__P04545.1__M2-1 (opt6)
gggagagucccgcagucggcguccagcggcucugcuuguucgugugugugucguugcaggccuuauucaagcuuaccaugucaagaagaaacccaugcaaauucgaaauaagaggacacugccuaaacggaaaaagaugccacuucucacacaacuacuucgaauggccaccacacgcacuacuuguaagacaaaacuucaugcuaaacagaauacuaaaaucaauggacaaaucaauagacacauuaucagaaauaucaggagcagcagaacucgacagaacagaagaauacgcacuaggaguaguaggaguacuagaaucauacauaggaucaauaaacaacauaacaaaacaaucagcaugcguagccauguccaaacuacuaacagaacuaaacuccgacgacauaaaaaaacuaagagacaacgaagaacuaaacucaccaaaaauaagaguauacaacacaguaauaucauacauagaaucaaacagaaaaaacaauaaacaaacaauacaccuacuaaaaagacucccagcagacguacuaaaaaaaacaauaaaaaacacacuagacauccacaaaucaauaacaauaaacaacccaaaagaaucaacagucucagacaccaacgaccacgcaaaaaacaacgacacaacauaaggacuaguggaagcauuuuccuggcugauuaaaagaaauuacucagcuauggucaucuguuccuguuagaaggcuaugcagcauauuauauacuaugcgcauguuaugaaaugcauaauaaaaaauuuuaaaaaaucuaaaagaucuaaaaaaaaaaaaaaaaaaaaaaaaaaaaaaaaaaaaaaaaaaaaaaaaaaaaaaaaaaaaaaaaugcaucccccccccccccccccccccccccccccccaaaggcucuuuucagagccaccagaauu

SEQ ID NO: 11343 - RNA, 937 nt, Artificial Sequence
  mRNA product Design d-4 comprising derived and/or modified sequence from HRSV(A2)__P04545.1__M2-1 (opt11)
gggagagucccgcagucggcguccagcggcucugcuuguucgugugugugucguugcaggccuuauucaagcuuaccaugucacgacgcaaccccugcaaauucgaaauccgcggccacugccuaaacggcaaacgcugccacuucucccacaacuacuucgaauggcccccccacgcccuccuuguccgccaaaacuucaugcucaaccgcauccucaaauccauggacaaaagcaucgacacccucuccgaaaucuccggcgcagccgaacucgaccgcaccgaagaauacgcccucggcgucguaggcguccucgaauccuacaucggcucaaucaacaacaucaccaaacaauccgccugcgucgccauguccaaacuccucaccgaacucaacuccgacgacaucaaaaaacuccgcgacaacgaagaacucaacucccccaaaauccgagucuacaacaccguaaucuccuacaucgaauccaaccgcaaaaacaacaaacaaaccauccaccuacuaaaacgacuccccgccgacguccucaaaaaaacaaucaaaaacacccucgacauccacaaauccaucaccaucaacaaccccaaagaaucaaccgucuccgacaccaacgaccacgccaaaaacaacgacaccaccugaggacuaguggaagcauuuuccuggcugauuaaaagaaauuacucagcuauggucaucuguuccuguuagaaggcuaugcagcauauuauauacuaugcgcauguuaugaaaugcauaauaaaaaauuuuaaaaaaucuaaaagaucuaaaaaaaaaaaaaaaaaaaaaaaaaaaaaaaaaaaaaaaaaaaaaaaaaaaaaaaaaaaaaaaaugcaucccccccccccccccccccccccccccccccaaaggcucuuuucagagccaccagaauu

SEQ ID NO: 11344 - RNA, 1034 nt, Artificial Sequence
  mRNA product Design d-5 comprising derived and/or modified sequence from HRSV(A2)__P04545.1__M2-1 (wt)
gggagagggcgcuuggcuugcaaggacccugagcugcggcauugaagcacacccaacccaacucgacugaagucagccucacugaaccggaucugagaaucuucucucucugggcuugccagggcucuccgaaccuagcuagcauccucuucaauuccaacuagaaagcuuaccaugucacgaaggaauccuugcaaauuugaaauucgaggucauugcuuaaaugguaagaggugucauuuuagucauaauuauuuugaauggccaccccaugcacugcuuguaagacaaaacuuuauguuaaacagaauacuuaagucuauggauaaaaguauagauaccuuaucagaaauaaguggagcugcagaguuggacagaacagaagaguaugcucuugguguaguuggagugcuagagaguuauauaggaucaauaaacaauauaacuaaacaaucagcauguguugccaugagcaaacuccucacugaacucaauagugaugauaucaaaaagcugagggacaaugaagagcuaaauucacccaagauaagaguguacaauacugucauaucauauauugaaagcaacaggaaaaacaauaaacaaacuauccaucuguuaaaaagauugccagcagacguauugaagaaaaccaucaaaaacacauuggauauccauaagagcauaaccaucaacaacccaaaagaaucaacuguuagugauacaaaugaccaugccaaaaauaaugauacuaccugaggacuaguggaagcauuuuccuggcugauuaaaagaaauuacucagcuauggucaucuguuccuguuagaaggcuaugcagcauauuauauacuaugcgcauguuaugaaaugcauaauaaaaaauuuuaaaaaaucuaaaagaucuaaaaaaaaaaaaaaaaaaaaaaaaaaaaaaaaaaaaaaaaaaaaaaaaaaaaaaaaaaaaaaaaugcaucccccccccccccccccccccccccccccccaaaggcucuuuucagagccaccagaauu

SEQ ID NO: 11345 - RNA, 1034 nt, Artificial Sequence
  mRNA product Design d-5 comprising derived and/or modified sequence from HRSV(A2)__P04545.1__M2-1 (opt1)
gggagagggcgcuuggcuugcaaggacccugagcugcggcauugaagcacacccaacccaacucgacugaagucagccucacugaaccggaucugagaaucuucucucucugggcuugccagggcucuccgaaccuagcuagcauccucuucaauuccaacuagaaagcuuaccaugagccgccggaaccccugcaaguucgagauccgcggccacugccugaacgggaagcggugccacuucucccacaacuacuucgaguggccgccccacgcccuccuggugcgccagaacuucaugcugaaccggauccucaagagcauggacaaguccaucgacacccugagcgagaucuccggcgccgcggagcuggaccgcaccgaggaguacgcccucggggucgugggcgugcuggagagcuacaucggguccaucaacaacaucacgaagcagagcgccugcgucgccauguccaagcugcucaccgagcugaacagcgacgacaucaagaagcugcgggacaacgaggagcucaacucccccaagauccgcguguacaacaccgugaucagcuacaucgaguccaaccggaagaacaacaagcagaccauccaccuccugaagcgccugcccgccgacguccugaagaagacgaucaagaacacccuggacauccacaagagcaucaccaucaacaacccgaaggaguccaccgugagcgacacgaacgaccacgcgaagaacaacgacaccaccugaggacuaguggaagcauuuuccuggcugauuaaaagaaauuacucagcuauggucaucuguuccuguuagaaggcuaugcagcauauuauauacuaugcgcauguuaugaaaugcauaauaaaaaauuuuaaaaaaucuaaaagaucuaaaaaaaaaaaaaaaaaaaaaaaaaaaaaaaaaaaaaaaaaaaaaaaaaaaaaaaaaaaaaaaaugcaucccccccccccccccccccccccccccccccaaaggcucuuuucagagccaccagaauu

SEQ ID NO: 11346 - RNA, 1034 nt, Artificial Sequence
  mRNA product Design d-5 comprising derived and/or modified sequence from HRSV(A2)__P04545.1__M2-1 (opt2)
gggagagggcgcuuggcuugcaaggacccugagcugcggcauugaagcacacccaacccaacucgacugaagucagccucacugaaccggaucugagaaucuucucucucugggcuugccagggcucuccgaaccuagcuagcauccucuucaauuccaacuagaaagcuuaccaugucccgccgcaaccccugcaaguucgagauccgcggccacugccucaacggcaagcgcugccacuucucccacaacuacuucgaguggcccccccacgcccuccucguccgccagaacuucaugcucaaccgcauccucaaguccauggacaaguccaucgacacccucuccgagaucuccggcgccgccgagcucgaccgcaccgaggaguacgcccucggcgucgucggcguccucgaguccuacaucggcuccaucaacaacaucaccaagcaguccgccugcgucgccauguccaagcuccucaccgagcucaacuccgacgacaucaagaagcuccgcgacaacgaggagcucaacucccccaagauccgcgucuacaacaccgucaucuccuacaucgaguccaaccgcaagaacaacaagcagaccauccaccuccucaagcgccuccccgccgacguccucaagaagaccaucaagaacacccucgacauccacaaguccaucaccaucaacaaccccaaggaguccaccgucuccgacaccaacgaccacgccaagaacaacgacaccaccugaggacuaguggaagcauuuuccuggcugauuaaaagaaauuacucagcuauggucaucuguuccuguuagaaggcuaugcagcauauuauauacuaugcgcauguuaugaaaugcauaauaaaaaauuuuaaaaaaucuaaaagaucuaaaaaaaaaaaaaaaaaaaaaaaaaaaaaaaaaaaaaaaaaaaaaaaaaaaaaaaaaaaaaaaaugcaucccccccccccccccccccccccccccccccaaaggcucuuuucagagccaccagaauu

SEQ ID NO: 11347 - RNA, 1034 nt, Artificial Sequence
  mRNA product Design d-5 comprising derived and/or modified sequence from HRSV(A2)__P04545.1__M2-1 (opt3)
gggagagggcgcuuggcuugcaaggacccugagcugcggcauugaagcacacccaacccaacucgacugaagucagccucacugaaccggaucugagaaucuucucucucugggcuugccagggcucuccgaaccuagcuagcauccucuucaauuccaacuagaaagcuuaccaugagcagaaggaaccccugcaaguucgagauccggggccacugucugaaugggaaacgcugccauuuuucccacaacuacuucgaauggccuccacaugcacuccuugugcgacagaauuuuaugcugaaccguauuuugaagucuauggacaaaucaauagauaccuuaagugagaucagcggagcugcagaacuggacagaacagaggaauaugcccuaggugucguuggcgugcucgaguccuacauugggucuaucaauaacauuacuaagcaaucggcguguguagcuaugucaaaacugcuuacggagcugaauagcgaugacaucaagaaguugagggauaacgaagaguuaaauaguccgaaaauacggguguauaacaccgucaucuccuacauugaaucuaaucgcaagaacaauaaacagacaauccaucugcugaagagacuccccgccgacgugcucaaaaagacuauuaagaacacccuggauauccacaaaagcauaacaauuaauaacccuaaggaguccaccguuucagacacuaacgaucacgccaaaaauaacgacacaaccugaggacuaguggaagcauuuuccuggcugauuaaaagaaauuacucagcuauggucaucuguuccuguuagaaggcuaugcagcauauuauauacuaugcgcauguuaugaaaugcauaauaaaaaauuuuaaaaaaucuaaaagaucuaaaaaaaaaaaaaaaaaaaaaaaaaaaaaaaaaaaaaaaaaaaaaaaaaaaaaaaaaaaaaaaaugcaucccccccccccccccccccccccccccccccaaaggcucuuuucagagccaccagaauu

SEQ ID NO: 11348 - RNA, 1034 nt, Artificial Sequence
  mRNA product Design d-5 comprising derived and/or modified sequence from HRSV(A2)__P04545.1__M2-1 (opt4)
gggagagggcgcuuggcuugcaaggacccugagcugcggcauugaagcacacccaacccaacucgacugaagucagccucacugaaccggaucugagaaucuucucucucugggcuugccagggcucuccgaaccuagcuagcauccucuucaauuccaacuagaaagcuuaccaugagcagaagaaaccccugcaaguucgagaucagaggccacugccugaacggcaagagaugccacuucagccacaacuacuucgaguggcccccccacgcccugcuggugagacagaacuucaugcugaacagaauccugaagagcauggacaagagcaucgacacccugagcgagaucagcggcgccgccgagcuggacagaaccgaggaguacgcccugggcguggugggcgugcuggagagcuacaucggcagcaucaacaacaucaccaagcagagcgccugcguggccaugagcaagcugcugaccgagcugaacagcgacgacaucaagaagcugagagacaacgaggagcugaacagccccaagaucagaguguacaacaccgugaucagcuacaucgagagcaacagaaagaacaacaagcagaccauccaccugcugaagagacugcccgccgacgugcugaagaagaccaucaagaacacccuggacauccacaagagcaucaccaucaacaaccccaaggagagcaccgugagcgacaccaacgaccacgccaagaacaacgacaccaccugaggacuaguggaagcauuuuccuggcugauuaaaagaaauuacucagcuauggucaucuguuccuguuagaaggcuaugcagcauauuauauacuaugcgcauguuaugaaaugcauaauaaaaaauuuuaaaaaaucuaaaagaucuaaaaaaaaaaaaaaaaaaaaaaaaaaaaaaaaaaaaaaaaaaaaaaaaaaaaaaaaaaaaaaaaugcaucccccccccccccccccccccccccccccccaaaggcucuuuucagagccaccagaauu

SEQ ID NO: 11349 - RNA, 1034 nt, Artificial Sequence
  mRNA product Design d-5 comprising derived and/or modified sequence from HRSV(A2)__P04545.1__M2-1 (opt5)
gggagagggcgcuuggcuugcaaggacccugagcugcggcauugaagcacacccaacccaacucgacugaagucagccucacugaaccggaucugagaaucuucucucucugggcuugccagggcucuccgaaccuagcuagcauccucuucaauuccaacuagaaagcuuaccaugagcagacggaaccccugcaaguucgagauccgcggccacugucugaaugggaaaagaugccauuuuucccacaacuacuucgaauggccuccgcaugcccuccuggugcggcagaauuuuaugcuuaaccgcauucugaagucuauggacaaaagcaucgauacccucuccgagauuucuggagcugccgaacuggacagaacagaggaauaugcgcuuggcgucguuggggugcuggagagcuacaucggauccauuaauaacaucacgaagcaaucugcuuguguggccaugagcaaacuccugaccgagcucaauuccgaugacaucaagaagcugcgggauaacgaggaacugaauagccccaaaauucgcgucuauaacacagugaucucuuacauugaauccaauagaaagaacaauaaacagaccauccaccuucugaagcggcucccugccgacguucugaaaaagacaauuaagaacacccuugauauccauaaaagcauuacaaucaauaaccccaaggagucuaccguguccgacacgaacgaucacgcuaaaaauaacgacaccacaugaggacuaguggaagcauuuuccuggcugauuaaaagaaauuacucagcuauggucaucuguuccuguuagaaggcuaugcagcauauuauauacuaugcgcauguuaugaaaugcauaauaaaaaauuuuaaaaaaucuaaaagaucuaaaaaaaaaaaaaaaaaaaaaaaaaaaaaaaaaaaaaaaaaaaaaaaaaaaaaaaaaaaaaaaaugcaucccccccccccccccccccccccccccccccaaaggcucuuuucagagccaccagaauu

SEQ ID NO: 11350 - RNA, 1034 nt, Artificial Sequence
  mRNA product Design d-5 comprising derived and/or modified sequence from HRSV(A2)__P04545.1__M2-1 (opt6)
gggagagggcgcuuggcuugcaaggacccugagcugcggcauugaagcacacccaacccaacucgacugaagucagccucacugaaccggaucugagaaucuucucucucugggcuugccagggcucuccgaaccuagcuagcauccucuucaauuccaacuagaaagcuuaccaugucaagaagaaacccaugcaaauucgaaauaagaggacacugccuaaacggaaaaagaugccacuucucacacaacuacuucgaauggccaccacacgcacuacuuguaagacaaaacuucaugcuaaacagaauacuaaaaucaauggacaaaucaauagacacauuaucagaaauaucaggagcagcagaacucgacagaacagaagaauacgcacuaggaguaguaggaguacuagaaucauacauaggaucaauaaacaacauaacaaaacaaucagcaugcguagccauguccaaacuacuaacagaacuaaacuccgacgacauaaaaaaacuaagagacaacgaagaacuaaacucaccaaaaauaagaguauacaacacaguaauaucauacauagaaucaaacagaaaaaacaauaaacaaacaauacaccuacuaaaaagacucccagcagacguacuaaaaaaaacaauaaaaaacacacuagacauccacaaaucaauaacaauaaacaacccaaaagaaucaacagucucagacaccaacgaccacgcaaaaaacaacgacacaacauaaggacuaguggaagcauuuuccuggcugauuaaaagaaauuacucagcuauggucaucuguuccuguuagaaggcuaugcagcauauuauauacuaugcgcauguuaugaaaugcauaauaaaaaauuuuaaaaaaucuaaaagaucuaaaaaaaaaaaaaaaaaaaaaaaaaaaaaaaaaaaaaaaaaaaaaaaaaaaaaaaaaaaaaaaaugcaucccccccccccccccccccccccccccccccaaaggcucuuuucagagccaccagaauu

SEQ ID NO: 11351 - RNA, 1034 nt, Artificial Sequence
  mRNA product Design d-5 comprising derived and/or modified sequence from HRSV(A2)__P04545.1__M2-1 (opt11)
gggagagggcgcuuggcuugcaaggacccugagcugcggcauugaagcacacccaacccaacucgacugaagucagccucacugaaccggaucugagaaucuucucucucugggcuugccagggcucuccgaaccuagcuagcauccucuucaauuccaacuagaaagcuuaccaugucacgacgcaaccccugcaaauucgaaauccgcggccacugccuaaacggcaaacgcugccacuucucccacaacuacuucgaauggcccccccacgcccuccuuguccgccaaaacuucaugcucaaccgcauccucaaauccauggacaaaagcaucgacacccucuccgaaaucuccggcgcagccgaacucgaccgcaccgaagaauacgcccucggcgucguaggcguccucgaauccuacaucggcucaaucaacaacaucaccaaacaauccgccugcgucgccauguccaaacuccucaccgaacucaacuccgacgacaucaaaaaacuccgcgacaacgaagaacucaacucccccaaaauccgagucuacaacaccguaaucuccuacaucgaauccaaccgcaaaaacaacaaacaaaccauccaccuacuaaaacgacuccccgccgacguccucaaaaaaacaaucaaaaacacccucgacauccacaaauccaucaccaucaacaaccccaaagaaucaaccgucuccgacaccaacgaccacgccaaaaacaacgacaccaccugaggacuaguggaagcauuuuccuggcugauuaaaagaaauuacucagcuauggucaucuguuccuguuagaaggcuaugcagcauauuauauacuaugcgcauguuaugaaaugcauaauaaaaaauuuuaaaaaaucuaaaagaucuaaaaaaaaaaaaaaaaaaaaaaaaaaaaaaaaaaaaaaaaaaaaaaaaaaaaaaaaaaaaaaaaugcaucccccccccccccccccccccccccccccccaaaggcucuuuucagagccaccagaauu

SEQ ID NO: 11352 - RNA, 914 nt, Artificial Sequence
  mRNA product Design e-1 comprising derived and/or modified sequence from HRSV(A2)__P04545.1__M2-1 (wt)
gggagaauauaagcguuggcggagcgucgguuguagcacucugcgcgcccgcucuucugcugcuguuugucuacuuccuccugcuuccccgccgccgccgccgccaucaagcuuaccaugucacgaaggaauccuugcaaauuugaaauucgaggucauugcuuaaaugguaagaggugucauuuuagucauaauuauuuugaauggccaccccaugcacugcuuguaagacaaaacuuuauguuaaacagaauacuuaagucuauggauaaaaguauagauaccuuaucagaaauaaguggagcugcagaguuggacagaacagaagaguaugcucuugguguaguuggagugcuagagaguuauauaggaucaauaaacaauauaacuaaacaaucagcauguguugccaugagcaaacuccucacugaacucaauagugaugauaucaaaaagcugagggacaaugaagagcuaaauucacccaagauaagaguguacaauacugucauaucauauauugaaagcaacaggaaaaacaauaaacaaacuauccaucuguuaaaaagauugccagcagacguauugaagaaaaccaucaaaaacacauuggauauccauaagagcauaaccaucaacaacccaaaagaaucaacuguuagugauacaaaugaccaugccaaaaauaaugauacuaccugaggacuaguguccaccugucccuccugggcugcuggauugucucguuuuccugccaaauaaacaggaucagcgcuuuacagaucuaaaaaaaaaaaaaaaaaaaaaaaaaaaaaaaaaaaaaaaaaaaaaaaaaaaaaaaaaaaaaaaaugcaucccccccccccccccccccccccccccccccaaaggcucuuuucagagccaccagaauu

SEQ ID NO: 11353 - RNA, 914 nt, Artificial Sequence
  mRNA product Design e-1 comprising derived and/or modified sequence from HRSV(A2)__P04545.1__M2-1 (opt1)
gggagaauauaagcguuggcggagcgucgguuguagcacucugcgcgcccgcucuucugcugcuguuugucuacuuccuccugcuuccccgccgccgccgccgccaucaagcuuaccaugagccgccggaaccccugcaaguucgagauccgcggccacugccugaacgggaagcggugccacuucucccacaacuacuucgaguggccgccccacgcccuccuggugcgccagaacuucaugcugaaccggauccucaagagcauggacaaguccaucgacacccugagcgagaucuccggcgccgcggagcuggaccgcaccgaggaguacgcccucggggucgugggcgugcuggagagcuacaucggguccaucaacaacaucacgaagcagagcgccugcgucgccauguccaagcugcucaccgagcugaacagcgacgacaucaagaagcugcgggacaacgaggagcucaacucccccaagauccgcguguacaacaccgugaucagcuacaucgaguccaaccggaagaacaacaagcagaccauccaccuccugaagcgccugcccgccgacguccugaagaagacgaucaagaacacccuggacauccacaagagcaucaccaucaacaacccgaaggaguccaccgugagcgacacgaacgaccacgcgaagaacaacgacaccaccugaggacuaguguccaccugucccuccugggcugcuggauugucucguuuuccugccaaauaaacaggaucagcgcuuuacagaucuaaaaaaaaaaaaaaaaaaaaaaaaaaaaaaaaaaaaaaaaaaaaaaaaaaaaaaaaaaaaaaaaugcaucccccccccccccccccccccccccccccccaaaggcucuuuucagagccaccagaauu

SEQ ID NO: 11354 - RNA, 914 nt, Artificial Sequence
  mRNA product Design e-1 comprising derived and/or modified sequence from HRSV(A2)__P04545.1__M2-1 (opt2)
gggagaauauaagcguuggcggagcgucgguuguagcacucugcgcgcccgcucuucugcugcuguuugucuacuuccuccugcuuccccgccgccgccgccgccaucaagcuuaccaugucccgccgcaaccccugcaaguucgagauccgcggccacugccucaacggcaagcgcugccacuucucccacaacuacuucgaguggcccccccacgcccuccucguccgccagaacuucaugcucaaccgcauccucaaguccauggacaaguccaucgacacccucuccgagaucuccggcgccgccgagcucgaccgcaccgaggaguacgcccucggcgucgucggcguccucgaguccuacaucggcuccaucaacaacaucaccaagcaguccgccugcgucgccauguccaagcuccucaccgagcucaacuccgacgacaucaagaagcuccgcgacaacgaggagcucaacucccccaagauccgcgucuacaacaccgucaucuccuacaucgaguccaaccgcaagaacaacaagcagaccauccaccuccucaagcgccuccccgccgacguccucaagaagaccaucaagaacacccucgacauccacaaguccaucaccaucaacaaccccaaggaguccaccgucuccgacaccaacgaccacgccaagaacaacgacaccaccugaggacuaguguccaccugucccuccugggcugcuggauugucucguuuuccugccaaauaaacaggaucagcgcuuuacagaucuaaaaaaaaaaaaaaaaaaaaaaaaaaaaaaaaaaaaaaaaaaaaaaaaaaaaaaaaaaaaaaaaugcaucccccccccccccccccccccccccccccccaaaggcucuuuucagagccaccagaauu

SEQ ID NO: 11355 - RNA, 914 nt, Artificial Sequence
  mRNA product Design e-1 comprising derived and/or modified sequence from HRSV(A2)__P04545.1__M2-1 (opt3)
gggagaauauaagcguuggcggagcgucgguuguagcacucugcgcgcccgcucuucugcugcuguuugucuacuuccuccugcuuccccgccgccgccgccgccaucaagcuuaccaugagcagaaggaaccccugcaaguucgagauccggggccacugucugaaugggaaacgcugccauuuuucccacaacuacuucgaauggccuccacaugcacuccuugugcgacagaauuuuaugcugaaccguauuuugaagucuauggacaaaucaauagauaccuuaagugagaucagcggagcugcagaacuggacagaacagaggaauaugcccuaggugucguuggcgugcucgaguccuacauugggucuaucaauaacauuacuaagcaaucggcguguguagcuaugucaaaacugcuuacggagcugaauagcgaugacaucaagaaguugagggauaacgaagaguuaaauaguccgaaaauacggguguauaacaccgucaucuccuacauugaaucuaaucgcaagaacaauaaacagacaauccaucugcugaagagacuccccgccgacgugcucaaaaagacuauuaagaacacccuggauauccacaaaagcauaacaauuaauaacccuaaggaguccaccguuucagacacuaacgaucacgccaaaaauaacgacacaaccugaggacuaguguccaccugucccuccugggcugcuggauugucucguuuuccugccaaauaaacaggaucagcgcuuuacagaucuaaaaaaaaaaaaaaaaaaaaaaaaaaaaaaaaaaaaaaaaaaaaaaaaaaaaaaaaaaaaaaaaugcaucccccccccccccccccccccccccccccccaaaggcucuuuucagagccaccagaauu

SEQ ID NO: 11356 - RNA, 914 nt, Artificial Sequence
  mRNA product Design e-1 comprising derived and/or modified sequence from HRSV(A2)__P04545.1__M2-1 (opt4)
gggagaauauaagcguuggcggagcgucgguuguagcacucugcgcgcccgcucuucugcugcuguuugucuacuuccuccugcuuccccgccgccgccgccgccaucaagcuuaccaugagcagaagaaaccccugcaaguucgagaucagaggccacugccugaacggcaagagaugccacuucagccacaacuacuucgaguggcccccccacgcccugcuggugagacagaacuucaugcugaacagaauccugaagagcauggacaagagcaucgacacccugagcgagaucagcggcgccgccgagcuggacagaaccgaggaguacgcccugggcguggugggcgugcuggagagcuacaucggcagcaucaacaacaucaccaagcagagcgccugcguggccaugagcaagcugcugaccgagcugaacagcgacgacaucaagaagcugagagacaacgaggagcugaacagccccaagaucagaguguacaacaccgugaucagcuacaucgagagcaacagaaagaacaacaagcagaccauccaccugcugaagagacugcccgccgacgugcugaagaagaccaucaagaacacccuggacauccacaagagcaucaccaucaacaaccccaaggagagcaccgugagcgacaccaacgaccacgccaagaacaacgacaccaccugaggacuaguguccaccugucccuccugggcugcuggauugucucguuuuccugccaaauaaacaggaucagcgcuuuacagaucuaaaaaaaaaaaaaaaaaaaaaaaaaaaaaaaaaaaaaaaaaaaaaaaaaaaaaaaaaaaaaaaaugcaucccccccccccccccccccccccccccccccaaaggcucuuuucagagccaccagaauu

SEQ ID NO: 11357 - RNA, 914 nt, Artificial Sequence
  mRNA product Design e-1 comprising derived and/or modified sequence from HRSV(A2)__P04545.1__M2-1 (opt5)
gggagaauauaagcguuggcggagcgucgguuguagcacucugcgcgcccgcucuucugcugcuguuugucuacuuccuccugcuuccccgccgccgccgccgccaucaagcuuaccaugagcagacggaaccccugcaaguucgagauccgcggccacugucugaaugggaaaagaugccauuuuucccacaacuacuucgaauggccuccgcaugcccuccuggugcggcagaauuuuaugcuuaaccgcauucugaagucuauggacaaaagcaucgauacccucuccgagauuucuggagcugccgaacuggacagaacagaggaauaugcgcuuggcgucguuggggugcuggagagcuacaucggauccauuaauaacaucacgaagcaaucugcuuguguggccaugagcaaacuccugaccgagcucaauuccgaugacaucaagaagcugcgggauaacgaggaacugaauagccccaaaauucgcgucuauaacacagugaucucuuacauugaauccaauagaaagaacaauaaacagaccauccaccuucugaagcggcucccugccgacguucugaaaaagacaauuaagaacacccuugauauccauaaaagcauuacaaucaauaaccccaaggagucuaccguguccgacacgaacgaucacgcuaaaaauaacgacaccacaugaggacuaguguccaccugucccuccugggcugcuggauugucucguuuuccugccaaauaaacaggaucagcgcuuuacagaucuaaaaaaaaaaaaaaaaaaaaaaaaaaaaaaaaaaaaaaaaaaaaaaaaaaaaaaaaaaaaaaaaugcaucccccccccccccccccccccccccccccccaaaggcucuuuucagagccaccagaauu

SEQ ID NO: 11358 - RNA, 914 nt, Artificial Sequence
  mRNA product Design e-1 comprising derived and/or modified sequence from HRSV(A2)__P04545.1__M2-1 (opt6)
gggagaauauaagcguuggcggagcgucgguuguagcacucugcgcgcccgcucuucugcugcuguuugucuacuuccuccugcuuccccgccgccgccgccgccaucaagcuuaccaugucaagaagaaacccaugcaaauucgaaauaagaggacacugccuaaacggaaaaagaugccacuucucacacaacuacuucgaauggccaccacacgcacuacuuguaagacaaaacuucaugcuaaacagaauacuaaaaucaauggacaaaucaauagacacauuaucagaaauaucaggagcagcagaacucgacagaacagaagaauacgcacuaggaguaguaggaguacuagaaucauacauaggaucaauaaacaacauaacaaaacaaucagcaugcguagccauguccaaacuacuaacagaacuaaacuccgacgacauaaaaaaacuaagagacaacgaagaacuaaacucaccaaaaauaagaguauacaacacaguaauaucauacauagaaucaaacagaaaaaacaauaaacaaacaauacaccuacuaaaaagacucccagcagacguacuaaaaaaaacaauaaaaaacacacuagacauccacaaaucaauaacaauaaacaacccaaaagaaucaacagucucagacaccaacgaccacgcaaaaaacaacgacacaacauaaggacuaguguccaccugucccuccugggcugcuggauugucucguuuuccugccaaauaaacaggaucagcgcuuuacagaucuaaaaaaaaaaaaaaaaaaaaaaaaaaaaaaaaaaaaaaaaaaaaaaaaaaaaaaaaaaaaaaaaugcaucccccccccccccccccccccccccccccccaaaggcucuuuucagagccaccagaauu

SEQ ID NO: 11359 - RNA, 914 nt, Artificial Sequence
  mRNA product Design e-1 comprising derived and/or modified sequence from HRSV(A2)__P04545.1__M2-1 (opt11)
gggagaauauaagcguuggcggagcgucgguuguagcacucugcgcgcccgcucuucugcugcuguuugucuacuuccuccugcuuccccgccgccgccgccgccaucaagcuuaccaugucacgacgcaaccccugcaaauucgaaauccgcggccacugccuaaacggcaaacgcugccacuucucccacaacuacuucgaauggcccccccacgcccuccuuguccgccaaaacuucaugcucaaccgcauccucaaauccauggacaaaagcaucgacacccucuccgaaaucuccggcgcagccgaacucgaccgcaccgaagaauacgcccucggcgucguaggcguccucgaauccuacaucggcucaaucaacaacaucaccaaacaauccgccugcgucgccauguccaaacuccucaccgaacucaacuccgacgacaucaaaaaacuccgcgacaacgaagaacucaacucccccaaaauccgagucuacaacaccguaaucuccuacaucgaauccaaccgcaaaaacaacaaacaaaccauccaccuacuaaaacgacuccccgccgacguccucaaaaaaacaaucaaaaacacccucgacauccacaaauccaucaccaucaacaaccccaaagaaucaaccgucuccgacaccaacgaccacgccaaaaacaacgacaccaccugaggacuaguguccaccugucccuccugggcugcuggauugucucguuuuccugccaaauaaacaggaucagcgcuuuacagaucuaaaaaaaaaaaaaaaaaaaaaaaaaaaaaaaaaaaaaaaaaaaaaaaaaaaaaaaaaaaaaaaaugcaucccccccccccccccccccccccccccccccaaaggcucuuuucagagccaccagaauu

SEQ ID NO: 11360 - RNA, 896 nt, Artificial Sequence
  mRNA product Design e-2 comprising derived and/or modified sequence from HRSV(A2)__P04545.1__M2-1 (wt)
gggagacccgugacccggaaguuguacggcuacgcgacuuucccucccacaaacccucgcgcccuuccuuuccuacuugggcccggcagaaagcuuaccaugucacgaaggaauccuugcaaauuugaaauucgaggucauugcuuaaaugguaagaggugucauuuuagucauaauuauuuugaauggccaccccaugcacugcuuguaagacaaaacuuuauguuaaacagaauacuuaagucuauggauaaaaguauagauaccuuaucagaaauaaguggagcugcagaguuggacagaacagaagaguaugcucuugguguaguuggagugcuagagaguuauauaggaucaauaaacaauauaacuaaacaaucagcauguguugccaugagcaaacuccucacugaacucaauagugaugauaucaaaaagcugagggacaaugaagagcuaaauucacccaagauaagaguguacaauacugucauaucauauauugaaagcaacaggaaaaacaauaaacaaacuauccaucuguuaaaaagauugccagcagacguauugaagaaaaccaucaaaaacacauuggauauccauaagagcauaaccaucaacaacccaaaagaaucaacuguuagugauacaaaugaccaugccaaaaauaaugauacuaccugaggacuaguguccaccugucccuccugggcugcuggauugucucguuuuccugccaaauaaacaggaucagcgcuuuacagaucuaaaaaaaaaaaaaaaaaaaaaaaaaaaaaaaaaaaaaaaaaaaaaaaaaaaaaaaaaaaaaaaaugcaucccccccccccccccccccccccccccccccaaaggcucuuuucagagccaccagaauu

SEQ ID NO: 11361 - RNA, 896 nt, Artificial Sequence
  mRNA product Design e-2 comprising derived and/or modified sequence from HRSV(A2)__P04545.1__M2-1 (opt1)
gggagacccgugacccggaaguuguacggcuacgcgacuuucccucccacaaacccucgcgcccuuccuuuccuacuugggcccggcagaaagcuuaccaugagccgccggaaccccugcaaguucgagauccgcggccacugccugaacgggaagcggugccacuucucccacaacuacuucgaguggccgccccacgcccuccuggugcgccagaacuucaugcugaaccggauccucaagagcauggacaaguccaucgacacccugagcgagaucuccggcgccgcggagcuggaccgcaccgaggaguacgcccucggggucgugggcgugcuggagagcuacaucggguccaucaacaacaucacgaagcagagcgccugcgucgccauguccaagcugcucaccgagcugaacagcgacgacaucaagaagcugcgggacaacgaggagcucaacucccccaagauccgcguguacaacaccgugaucagcuacaucgaguccaaccggaagaacaacaagcagaccauccaccuccugaagcgccugcccgccgacguccugaagaagacgaucaagaacacccuggacauccacaagagcaucaccaucaacaacccgaaggaguccaccgugagcgacacgaacgaccacgcgaagaacaacgacaccaccugaggacuaguguccaccugucccuccugggcugcuggauugucucguuuuccugccaaauaaacaggaucagcgcuuuacagaucuaaaaaaaaaaaaaaaaaaaaaaaaaaaaaaaaaaaaaaaaaaaaaaaaaaaaaaaaaaaaaaaaugcaucccccccccccccccccccccccccccccccaaaggcucuuuucagagccaccagaauu

SEQ ID NO: 11362 - RNA, 896 nt, Artificial Sequence
  mRNA product Design e-2 comprising derived and/or modified sequence from HRSV(A2)__P04545.1__M2-1 (opt2)
gggagacccgugacccggaaguuguacggcuacgcgacuuucccucccacaaacccucgcgcccuuccuuuccuacuugggcccggcagaaagcuuaccaugucccgccgcaaccccugcaaguucgagauccgcggccacugccucaacggcaagcgcugccacuucucccacaacuacuucgaguggcccccccacgcccuccucguccgccagaacuucaugcucaaccgcauccucaaguccauggacaaguccaucgacacccucuccgagaucuccggcgccgccgagcucgaccgcaccgaggaguacgcccucggcgucgucggcguccucgaguccuacaucggcuccaucaacaacaucaccaagcaguccgccugcgucgccauguccaagcuccucaccgagcucaacuccgacgacaucaagaagcuccgcgacaacgaggagcucaacucccccaagauccgcgucuacaacaccgucaucuccuacaucgaguccaaccgcaagaacaacaagcagaccauccaccuccucaagcgccuccccgccgacguccucaagaagaccaucaagaacacccucgacauccacaaguccaucaccaucaacaaccccaaggaguccaccgucuccgacaccaacgaccacgccaagaacaacgacaccaccugaggacuaguguccaccugucccuccugggcugcuggauugucucguuuuccugccaaauaaacaggaucagcgcuuuacagaucuaaaaaaaaaaaaaaaaaaaaaaaaaaaaaaaaaaaaaaaaaaaaaaaaaaaaaaaaaaaaaaaaugcaucccccccccccccccccccccccccccccccaaaggcucuuuucagagccaccagaauu

SEQ ID NO: 11363 - RNA, 896 nt, Artificial Sequence
  mRNA product Design e-2 comprising derived and/or modified sequence from HRSV(A2)__P04545.1__M2-1 (opt3)
gggagacccgugacccggaaguuguacggcuacgcgacuuucccucccacaaacccucgcgcccuuccuuuccuacuugggcccggcagaaagcuuaccaugagcagaaggaaccccugcaaguucgagauccggggccacugucugaaugggaaacgcugccauuuuucccacaacuacuucgaauggccuccacaugcacuccuugugcgacagaauuuuaugcugaaccguauuuugaagucuauggacaaaucaauagauaccuuaagugagaucagcggagcugcagaacuggacagaacagaggaauaugcccuaggugucguuggcgugcucgaguccuacauugggucuaucaauaacauuacuaagcaaucggcguguguagcuaugucaaaacugcuuacggagcugaauagcgaugacaucaagaaguugagggauaacgaagaguuaaauaguccgaaaauacggguguauaacaccgucaucuccuacauugaaucuaaucgcaagaacaauaaacagacaauccaucugcugaagagacuccccgccgacgugcucaaaaagacuauuaagaacacccuggauauccacaaaagcauaacaauuaauaacccuaaggaguccaccguuucagacacuaacgaucacgccaaaaauaacgacacaaccugaggacuaguguccaccugucccuccugggcugcuggauugucucguuuuccugccaaauaaacaggaucagcgcuuuacagaucuaaaaaaaaaaaaaaaaaaaaaaaaaaaaaaaaaaaaaaaaaaaaaaaaaaaaaaaaaaaaaaaaugcaucccccccccccccccccccccccccccccccaaaggcucuuuucagagccaccagaauu

SEQ ID NO: 11364 - RNA, 896 nt, Artificial Sequence
  mRNA product Design e-2 comprising derived and/or modified sequence from HRSV(A2)__P04545.1__M2-1 (opt4)
gggagacccgugacccggaaguuguacggcuacgcgacuuucccucccacaaacccucgcgcccuuccuuuccuacuugggcccggcagaaagcuuaccaugagcagaagaaaccccugcaaguucgagaucagaggccacugccugaacggcaagagaugccacuucagccacaacuacuucgaguggcccccccacgcccugcuggugagacagaacuucaugcugaacagaauccugaagagcauggacaagagcaucgacacccugagcgagaucagcggcgccgccgagcuggacagaaccgaggaguacgcccugggcguggugggcgugcuggagagcuacaucggcagcaucaacaacaucaccaagcagagcgccugcguggccaugagcaagcugcugaccgagcugaacagcgacgacaucaagaagcugagagacaacgaggagcugaacagccccaagaucagaguguacaacaccgugaucagcuacaucgagagcaacagaaagaacaacaagcagaccauccaccugcugaagagacugcccgccgacgugcugaagaagaccaucaagaacacccuggacauccacaagagcaucaccaucaacaaccccaaggagagcaccgugagcgacaccaacgaccacgccaagaacaacgacaccaccugaggacuaguguccaccugucccuccugggcugcuggauugucucguuuuccugccaaauaaacaggaucagcgcuuuacagaucuaaaaaaaaaaaaaaaaaaaaaaaaaaaaaaaaaaaaaaaaaaaaaaaaaaaaaaaaaaaaaaaaugcaucccccccccccccccccccccccccccccccaaaggcucuuuucagagccaccagaauu

SEQ ID NO: 11365 - RNA, 896 nt, Artificial Sequence
  mRNA product Design e-2 comprising derived and/or modified sequence from HRSV(A2)__P04545.1__M2-1 (opt5)
gggagacccgugacccggaaguuguacggcuacgcgacuuucccucccacaaacccucgcgcccuuccuuuccuacuugggcccggcagaaagcuuaccaugagcagacggaaccccugcaaguucgagauccgcggccacugucugaaugggaaaagaugccauuuuucccacaacuacuucgaauggccuccgcaugcccuccuggugcggcagaauuuuaugcuuaaccgcauucugaagucuauggacaaaagcaucgauacccucuccgagauuucuggagcugccgaacuggacagaacagaggaauaugcgcuuggcgucguuggggugcuggagagcuacaucggauccauuaauaacaucacgaagcaaucugcuuguguggccaugagcaaacuccugaccgagcucaauuccgaugacaucaagaagcugcgggauaacgaggaacugaauagccccaaaauucgcgucuauaacacagugaucucuuacauugaauccaauagaaagaacaauaaacagaccauccaccuucugaagcggcucccugccgacguucugaaaaagacaauuaagaacacccuugauauccauaaaagcauuacaaucaauaaccccaaggagucuaccguguccgacacgaacgaucacgcuaaaaauaacgacaccacaugaggacuaguguccaccugucccuccugggcugcuggauugucucguuuuccugccaaauaaacaggaucagcgcuuuacagaucuaaaaaaaaaaaaaaaaaaaaaaaaaaaaaaaaaaaaaaaaaaaaaaaaaaaaaaaaaaaaaaaaugcaucccccccccccccccccccccccccccccccaaaggcucuuuucagagccaccagaauu

SEQ ID NO: 11366 - RNA, 896 nt, Artificial Sequence
  mRNA product Design e-2 comprising derived and/or modified sequence from HRSV(A2)__P04545.1__M2-1 (opt6)
gggagacccgugacccggaaguuguacggcuacgcgacuuucccucccacaaacccucgcgcccuuccuuuccuacuugggcccggcagaaagcuuaccaugucaagaagaaacccaugcaaauucgaaauaagaggacacugccuaaacggaaaaagaugccacuucucacacaacuacuucgaauggccaccacacgcacuacuuguaagacaaaacuucaugcuaaacagaauacuaaaaucaauggacaaaucaauagacacauuaucagaaauaucaggagcagcagaacucgacagaacagaagaauacgcacuaggaguaguaggaguacuagaaucauacauaggaucaauaaacaacauaacaaaacaaucagcaugcguagccauguccaaacuacuaacagaacuaaacuccgacgacauaaaaaaacuaagagacaacgaagaacuaaacucaccaaaaauaagaguauacaacacaguaauaucauacauagaaucaaacagaaaaaacaauaaacaaacaauacaccuacuaaaaagacucccagcagacguacuaaaaaaaacaauaaaaaacacacuagacauccacaaaucaauaacaauaaacaacccaaaagaaucaacagucucagacaccaacgaccacgcaaaaaacaacgacacaacauaaggacuaguguccaccugucccuccugggcugcuggauugucucguuuuccugccaaauaaacaggaucagcgcuuuacagaucuaaaaaaaaaaaaaaaaaaaaaaaaaaaaaaaaaaaaaaaaaaaaaaaaaaaaaaaaaaaaaaaaugcaucccccccccccccccccccccccccccccccaaaggcucuuuucagagccaccagaauu

SEQ ID NO: 11367 - RNA, 896 nt, Artificial Sequence
  mRNA product Design e-2 comprising derived and/or modified sequence from HRSV(A2)__P04545.1__M2-1 (opt11)
gggagacccgugacccggaaguuguacggcuacgcgacuuucccucccacaaacccucgcgcccuuccuuuccuacuugggcccggcagaaagcuuaccaugucacgacgcaaccccugcaaauucgaaauccgcggccacugccuaaacggcaaacgcugccacuucucccacaacuacuucgaauggcccccccacgcccuccuuguccgccaaaacuucaugcucaaccgcauccucaaauccauggacaaaagcaucgacacccucuccgaaaucuccggcgcagccgaacucgaccgcaccgaagaauacgcccucggcgucguaggcguccucgaauccuacaucggcucaaucaacaacaucaccaaacaauccgccugcgucgccauguccaaacuccucaccgaacucaacuccgacgacaucaaaaaacuccgcgacaacgaagaacucaacucccccaaaauccgagucuacaacaccguaaucuccuacaucgaauccaaccgcaaaaacaacaaacaaaccauccaccuacuaaaacgacuccccgccgacguccucaaaaaaacaaucaaaaacacccucgacauccacaaauccaucaccaucaacaaccccaaagaaucaaccgucuccgacaccaacgaccacgccaaaaacaacgacaccaccugaggacuaguguccaccugucccuccugggcugcuggauugucucguuuuccugccaaauaaacaggaucagcgcuuuacagaucuaaaaaaaaaaaaaaaaaaaaaaaaaaaaaaaaaaaaaaaaaaaaaaaaaaaaaaaaaaaaaaaaugcaucccccccccccccccccccccccccccccccaaaggcucuuuucagagccaccagaauu

SEQ ID NO: 11368 - RNA, 866 nt, Artificial Sequence
  mRNA product Design e-3 comprising derived and/or modified sequence from HRSV(A2)__P04545.1__M2-1 (wt)
gggagacuuucccauucuguagcagaauuugguguugccuguggucuuggucccgcggagaagcuuaccaugucacgaaggaauccuugcaaauuugaaauucgaggucauugcuuaaaugguaagaggugucauuuuagucauaauuauuuugaauggccaccccaugcacugcuuguaagacaaaacuuuauguuaaacagaauacuuaagucuauggauaaaaguauagauaccuuaucagaaauaaguggagcugcagaguuggacagaacagaagaguaugcucuugguguaguuggagugcuagagaguuauauaggaucaauaaacaauauaacuaaacaaucagcauguguugccaugagcaaacuccucacugaacucaauagugaugauaucaaaaagcugagggacaaugaagagcuaaauucacccaagauaagaguguacaauacugucauaucauauauugaaagcaacaggaaaaacaauaaacaaacuauccaucuguuaaaaagauugccagcagacguauugaagaaaaccaucaaaaacacauuggauauccauaagagcauaaccaucaacaacccaaaagaaucaacuguuagugauacaaaugaccaugccaaaaauaaugauacuaccugaggacuaguguccaccugucccuccugggcugcuggauugucucguuuuccugccaaauaaacaggaucagcgcuuuacagaucuaaaaaaaaaaaaaaaaaaaaaaaaaaaaaaaaaaaaaaaaaaaaaaaaaaaaaaaaaaaaaaaaugcaucccccccccccccccccccccccccccccccaaaggcucuuuucagagccaccagaauu

SEQ ID NO: 11369 - RNA, 866 nt, Artificial Sequence
  mRNA product Design e-3 comprising derived and/or modified sequence from HRSV(A2)__P04545.1__M2-1 (opt1)
gggagacuuucccauucuguagcagaauuugguguugccuguggucuuggucccgcggagaagcuuaccaugagccgccggaaccccugcaaguucgagauccgcggccacugccugaacgggaagcggugccacuucucccacaacuacuucgaguggccgccccacgcccuccuggugcgccagaacuucaugcugaaccggauccucaagagcauggacaaguccaucgacacccugagcgagaucuccggcgccgcggagcuggaccgcaccgaggaguacgcccucggggucgugggcgugcuggagagcuacaucggguccaucaacaacaucacgaagcagagcgccugcgucgccauguccaagcugcucaccgagcugaacagcgacgacaucaagaagcugcgggacaacgaggagcucaacucccccaagauccgcguguacaacaccgugaucagcuacaucgaguccaaccggaagaacaacaagcagaccauccaccuccugaagcgccugcccgccgacguccugaagaagacgaucaagaacacccuggacauccacaagagcaucaccaucaacaacccgaaggaguccaccgugagcgacacgaacgaccacgcgaagaacaacgacaccaccugaggacuaguguccaccugucccuccugggcugcuggauugucucguuuuccugccaaauaaacaggaucagcgcuuuacagaucuaaaaaaaaaaaaaaaaaaaaaaaaaaaaaaaaaaaaaaaaaaaaaaaaaaaaaaaaaaaaaaaaugcaucccccccccccccccccccccccccccccccaaaggcucuuuucagagccaccagaauu

SEQ ID NO: 11370 - RNA, 866 nt, Artificial Sequence
  mRNA product Design e-3 comprising derived and/or modified sequence from HRSV(A2)__P04545.1__M2-1 (opt2)
gggagacuuucccauucuguagcagaauuugguguugccuguggucuuggucccgcggagaagcuuaccaugucccgccgcaaccccugcaaguucgagauccgcggccacugccucaacggcaagcgcugccacuucucccacaacuacuucgaguggcccccccacgcccuccucguccgccagaacuucaugcucaaccgcauccucaaguccauggacaaguccaucgacacccucuccgagaucuccggcgccgccgagcucgaccgcaccgaggaguacgcccucggcgucgucggcguccucgaguccuacaucggcuccaucaacaacaucaccaagcaguccgccugcgucgccauguccaagcuccucaccgagcucaacuccgacgacaucaagaagcuccgcgacaacgaggagcucaacucccccaagauccgcgucuacaacaccgucaucuccuacaucgaguccaaccgcaagaacaacaagcagaccauccaccuccucaagcgccuccccgccgacguccucaagaagaccaucaagaacacccucgacauccacaaguccaucaccaucaacaaccccaaggaguccaccgucuccgacaccaacgaccacgccaagaacaacgacaccaccugaggacuaguguccaccugucccuccugggcugcuggauugucucguuuuccugccaaauaaacaggaucagcgcuuuacagaucuaaaaaaaaaaaaaaaaaaaaaaaaaaaaaaaaaaaaaaaaaaaaaaaaaaaaaaaaaaaaaaaaugcaucccccccccccccccccccccccccccccccaaaggcucuuuucagagccaccagaauu

SEQ ID NO: 11371 - RNA, 866 nt, Artificial Sequence
  mRNA product Design e-3 comprising derived and/or modified sequence from HRSV(A2)__P04545.1__M2-1 (opt3)
gggagacuuucccauucuguagcagaauuugguguugccuguggucuuggucccgcggagaagcuuaccaugagcagaaggaaccccugcaaguucgagauccggggccacugucugaaugggaaacgcugccauuuuucccacaacuacuucgaauggccuccacaugcacuccuugugcgacagaauuuuaugcugaaccguauuuugaagucuauggacaaaucaauagauaccuuaagugagaucagcggagcugcagaacuggacagaacagaggaauaugcccuaggugucguuggcgugcucgaguccuacauugggucuaucaauaacauuacuaagcaaucggcguguguagcuaugucaaaacugcuuacggagcugaauagcgaugacaucaagaaguugagggauaacgaagaguuaaauaguccgaaaauacggguguauaacaccgucaucuccuacauugaaucuaaucgcaagaacaauaaacagacaauccaucugcugaagagacuccccgccgacgugcucaaaaagacuauuaagaacacccuggauauccacaaaagcauaacaauuaauaacccuaaggaguccaccguuucagacacuaacgaucacgccaaaaauaacgacacaaccugaggacuaguguccaccugucccuccugggcugcuggauugucucguuuuccugccaaauaaacaggaucagcgcuuuacagaucuaaaaaaaaaaaaaaaaaaaaaaaaaaaaaaaaaaaaaaaaaaaaaaaaaaaaaaaaaaaaaaaaugcaucccccccccccccccccccccccccccccccaaaggcucuuuucagagccaccagaauu

SEQ ID NO: 11372 - RNA, 866 nt, Artificial Sequence
  mRNA product Design e-3 comprising derived and/or modified sequence from HRSV(A2)__P04545.1__M2-1 (opt4)
gggagacuuucccauucuguagcagaauuugguguugccuguggucuuggucccgcggagaagcuuaccaugagcagaagaaaccccugcaaguucgagaucagaggccacugccugaacggcaagagaugccacuucagccacaacuacuucgaguggcccccccacgcccugcuggugagacagaacuucaugcugaacagaauccugaagagcauggacaagagcaucgacacccugagcgagaucagcggcgccgccgagcuggacagaaccgaggaguacgcccugggcguggugggcgugcuggagagcuacaucggcagcaucaacaacaucaccaagcagagcgccugcguggccaugagcaagcugcugaccgagcugaacagcgacgacaucaagaagcugagagacaacgaggagcugaacagccccaagaucagaguguacaacaccgugaucagcuacaucgagagcaacagaaagaacaacaagcagaccauccaccugcugaagagacugcccgccgacgugcugaagaagaccaucaagaacacccuggacauccacaagagcaucaccaucaacaaccccaaggagagcaccgugagcgacaccaacgaccacgccaagaacaacgacaccaccugaggacuaguguccaccugucccuccugggcugcuggauugucucguuuuccugccaaauaaacaggaucagcgcuuuacagaucuaaaaaaaaaaaaaaaaaaaaaaaaaaaaaaaaaaaaaaaaaaaaaaaaaaaaaaaaaaaaaaaaugcaucccccccccccccccccccccccccccccccaaaggcucuuuucagagccaccagaauu

SEQ ID NO: 11373 - RNA, 866 nt, Artificial Sequence
  mRNA product Design e-3 comprising derived and/or modified sequence from HRSV(A2)__P04545.1__M2-1 (opt5)
gggagacuuucccauucuguagcagaauuugguguugccuguggucuuggucccgcggagaagcuuaccaugagcagacggaaccccugcaaguucgagauccgcggccacugucugaaugggaaaagaugccauuuuucccacaacuacuucgaauggccuccgcaugcccuccuggugcggcagaauuuuaugcuuaaccgcauucugaagucuauggacaaaagcaucgauacccucuccgagauuucuggagcugccgaacuggacagaacagaggaauaugcgcuuggcgucguuggggugcuggagagcuacaucggauccauuaauaacaucacgaagcaaucugcuuguguggccaugagcaaacuccugaccgagcucaauuccgaugacaucaagaagcugcgggauaacgaggaacugaauagccccaaaauucgcgucuauaacacagugaucucuuacauugaauccaauagaaagaacaauaaacagaccauccaccuucugaagcggcucccugccgacguucugaaaaagacaauuaagaacacccuugauauccauaaaagcauuacaaucaauaaccccaaggagucuaccguguccgacacgaacgaucacgcuaaaaauaacgacaccacaugaggacuaguguccaccugucccuccugggcugcuggauugucucguuuuccugccaaauaaacaggaucagcgcuuuacagaucuaaaaaaaaaaaaaaaaaaaaaaaaaaaaaaaaaaaaaaaaaaaaaaaaaaaaaaaaaaaaaaaaugcaucccccccccccccccccccccccccccccccaaaggcucuuuucagagccaccagaauu

SEQ ID NO: 11374 - RNA, 866 nt, Artificial Sequence
  mRNA product Design e-3 comprising derived and/or modified sequence from HRSV(A2)__P04545.1__M2-1 (opt6)
gggagacuuucccauucuguagcagaauuugguguugccuguggucuuggucccgcggagaagcuuaccaugucaagaagaaacccaugcaaauucgaaauaagaggacacugccuaaacggaaaaagaugccacuucucacacaacuacuucgaauggccaccacacgcacuacuuguaagacaaaacuucaugcuaaacagaauacuaaaaucaauggacaaaucaauagacacauuaucagaaauaucaggagcagcagaacucgacagaacagaagaauacgcacuaggaguaguaggaguacuagaaucauacauaggaucaauaaacaacauaacaaaacaaucagcaugcguagccauguccaaacuacuaacagaacuaaacuccgacgacauaaaaaaacuaagagacaacgaagaacuaaacucaccaaaaauaagaguauacaacacaguaauaucauacauagaaucaaacagaaaaaacaauaaacaaacaauacaccuacuaaaaagacucccagcagacguacuaaaaaaaacaauaaaaaacacacuagacauccacaaaucaauaacaauaaacaacccaaaagaaucaacagucucagacaccaacgaccacgcaaaaaacaacgacacaacauaaggacuaguguccaccugucccuccugggcugcuggauugucucguuuuccugccaaauaaacaggaucagcgcuuuacagaucuaaaaaaaaaaaaaaaaaaaaaaaaaaaaaaaaaaaaaaaaaaaaaaaaaaaaaaaaaaaaaaaaugcaucccccccccccccccccccccccccccccccaaaggcucuuuucagagccaccagaauu

SEQ ID NO: 11375 - RNA, 866 nt, Artificial Sequence
  mRNA product Design e-3 comprising derived and/or modified sequence from HRSV(A2)__P04545.1__M2-1 (opt11)
gggagacuuucccauucuguagcagaauuugguguugccuguggucuuggucccgcggagaagcuuaccaugucacgacgcaaccccugcaaauucgaaauccgcggccacugccuaaacggcaaacgcugccacuucucccacaacuacuucgaauggcccccccacgcccuccuuguccgccaaaacuucaugcucaaccgcauccucaaauccauggacaaaagcaucgacacccucuccgaaaucuccggcgcagccgaacucgaccgcaccgaagaauacgcccucggcgucguaggcguccucgaauccuacaucggcucaaucaacaacaucaccaaacaauccgccugcgucgccauguccaaacuccucaccgaacucaacuccgacgacaucaaaaaacuccgcgacaacgaagaacucaacucccccaaaauccgagucuacaacaccguaaucuccuacaucgaauccaaccgcaaaaacaacaaacaaaccauccaccuacuaaaacgacuccccgccgacguccucaaaaaaacaaucaaaaacacccucgacauccacaaauccaucaccaucaacaaccccaaagaaucaaccgucuccgacaccaacgaccacgccaaaaacaacgacaccaccugaggacuaguguccaccugucccuccugggcugcuggauugucucguuuuccugccaaauaaacaggaucagcgcuuuacagaucuaaaaaaaaaaaaaaaaaaaaaaaaaaaaaaaaaaaaaaaaaaaaaaaaaaaaaaaaaaaaaaaaugcaucccccccccccccccccccccccccccccccaaaggcucuuuucagagccaccagaauu

SEQ ID NO: 11376 - RNA, 920 nt, Artificial Sequence
  mRNA product Design e-4 comprising derived and/or modified sequence from HRSV(A2)__P04545.1__M2-1 (wt)
gggagacuccugucgggcggaaguaggaggaguagaguuuaaaaacaguacucuuuuuccgguucgggacguaguugaagcaacgacaagccggauaaccgcucuugagacaggaagcuuaccaugucacgaaggaauccuugcaaauuugaaauucgaggucauugcuuaaaugguaagaggugucauuuuagucauaauuauuuugaauggccaccccaugcacugcuuguaagacaaaacuuuauguuaaacagaauacuuaagucuauggauaaaaguauagauaccuuaucagaaauaaguggagcugcagaguuggacagaacagaagaguaugcucuugguguaguuggagugcuagagaguuauauaggaucaauaaacaauauaacuaaacaaucagcauguguugccaugagcaaacuccucacugaacucaauagugaugauaucaaaaagcugagggacaaugaagagcuaaauucacccaagauaagaguguacaauacugucauaucauauauugaaagcaacaggaaaaacaauaaacaaacuauccaucuguuaaaaagauugccagcagacguauugaagaaaaccaucaaaaacacauuggauauccauaagagcauaaccaucaacaacccaaaagaaucaacuguuagugauacaaaugaccaugccaaaaauaaugauacuaccugaggacuaguguccaccugucccuccugggcugcuggauugucucguuuuccugccaaauaaacaggaucagcgcuuuacagaucuaaaaaaaaaaaaaaaaaaaaaaaaaaaaaaaaaaaaaaaaaaaaaaaaaaaaaaaaaaaaaaaaugcaucccccccccccccccccccccccccccccccaaaggcucuuuucagagccaccagaauu

SEQ ID NO: 11377 - RNA, 920 nt, Artificial Sequence
  mRNA product Design e-4 comprising derived and/or modified sequence from HRSV(A2)__P04545.1__M2-1 (opt1)
gggagacuccugucgggcggaaguaggaggaguagaguuuaaaaacaguacucuuuuuccgguucgggacguaguugaagcaacgacaagccggauaaccgcucuugagacaggaagcuuaccaugagccgccggaaccccugcaaguucgagauccgcggccacugccugaacgggaagcggugccacuucucccacaacuacuucgaguggccgccccacgcccuccuggugcgccagaacuucaugcugaaccggauccucaagagcauggacaaguccaucgacacccugagcgagaucuccggcgccgcggagcuggaccgcaccgaggaguacgcccucggggucgugggcgugcuggagagcuacaucggguccaucaacaacaucacgaagcagagcgccugcgucgccauguccaagcugcucaccgagcugaacagcgacgacaucaagaagcugcgggacaacgaggagcucaacucccccaagauccgcguguacaacaccgugaucagcuacaucgaguccaaccggaagaacaacaagcagaccauccaccuccugaagcgccugcccgccgacguccugaagaagacgaucaagaacacccuggacauccacaagagcaucaccaucaacaacccgaaggaguccaccgugagcgacacgaacgaccacgcgaagaacaacgacaccaccugaggacuaguguccaccugucccuccugggcugcuggauugucucguuuuccugccaaauaaacaggaucagcgcuuuacagaucuaaaaaaaaaaaaaaaaaaaaaaaaaaaaaaaaaaaaaaaaaaaaaaaaaaaaaaaaaaaaaaaaugcaucccccccccccccccccccccccccccccccaaaggcucuuuucagagccaccagaauu

SEQ ID NO: 11378 - RNA, 920 nt, Artificial Sequence
  mRNA product Design e-4 comprising derived and/or modified sequence from HRSV(A2)__P04545.1__M2-1 (opt2)
gggagacuccugucgggcggaaguaggaggaguagaguuuaaaaacaguacucuuuuuccgguucgggacguaguugaagcaacgacaagccggauaaccgcucuugagacaggaagcuuaccaugucccgccgcaaccccugcaaguucgagauccgcggccacugccucaacggcaagcgcugccacuucucccacaacuacuucgaguggcccccccacgcccuccucguccgccagaacuucaugcucaaccgcauccucaaguccauggacaaguccaucgacacccucuccgagaucuccggcgccgccgagcucgaccgcaccgaggaguacgcccucggcgucgucggcguccucgaguccuacaucggcuccaucaacaacaucaccaagcaguccgccugcgucgccauguccaagcuccucaccgagcucaacuccgacgacaucaagaagcuccgcgacaacgaggagcucaacucccccaagauccgcgucuacaacaccgucaucuccuacaucgaguccaaccgcaagaacaacaagcagaccauccaccuccucaagcgccuccccgccgacguccucaagaagaccaucaagaacacccucgacauccacaaguccaucaccaucaacaaccccaaggaguccaccgucuccgacaccaacgaccacgccaagaacaacgacaccaccugaggacuaguguccaccugucccuccugggcugcuggauugucucguuuuccugccaaauaaacaggaucagcgcuuuacagaucuaaaaaaaaaaaaaaaaaaaaaaaaaaaaaaaaaaaaaaaaaaaaaaaaaaaaaaaaaaaaaaaaugcaucccccccccccccccccccccccccccccccaaaggcucuuuucagagccaccagaauu

SEQ ID NO: 11379 - RNA, 920 nt, Artificial Sequence
  mRNA product Design e-4 comprising derived and/or modified sequence from HRSV(A2)__P04545.1__M2-1 (opt3)
gggagacuccugucgggcggaaguaggaggaguagaguuuaaaaacaguacucuuuuuccgguucgggacguaguugaagcaacgacaagccggauaaccgcucuugagacaggaagcuuaccaugagcagaaggaaccccugcaaguucgagauccggggccacugucugaaugggaaacgcugccauuuuucccacaacuacuucgaauggccuccacaugcacuccuugugcgacagaauuuuaugcugaaccguauuuugaagucuauggacaaaucaauagauaccuuaagugagaucagcggagcugcagaacuggacagaacagaggaauaugcccuaggugucguuggcgugcucgaguccuacauugggucuaucaauaacauuacuaagcaaucggcguguguagcuaugucaaaacugcuuacggagcugaauagcgaugacaucaagaaguugagggauaacgaagaguuaaauaguccgaaaauacggguguauaacaccgucaucuccuacauugaaucuaaucgcaagaacaauaaacagacaauccaucugcugaagagacuccccgccgacgugcucaaaaagacuauuaagaacacccuggauauccacaaaagcauaacaauuaauaacccuaaggaguccaccguuucagacacuaacgaucacgccaaaaauaacgacacaaccugaggacuaguguccaccugucccuccugggcugcuggauugucucguuuuccugccaaauaaacaggaucagcgcuuuacagaucuaaaaaaaaaaaaaaaaaaaaaaaaaaaaaaaaaaaaaaaaaaaaaaaaaaaaaaaaaaaaaaaaugcaucccccccccccccccccccccccccccccccaaaggcucuuuucagagccaccagaauu

SEQ ID NO: 11380 - RNA, 920 nt, Artificial Sequence
  mRNA product Design e-4 comprising derived and/or modified sequence from HRSV(A2)__P04545.1__M2-1 (opt4)
gggagacuccugucgggcggaaguaggaggaguagaguuuaaaaacaguacucuuuuuccgguucgggacguaguugaagcaacgacaagccggauaaccgcucuugagacaggaagcuuaccaugagcagaagaaaccccugcaaguucgagaucagaggccacugccugaacggcaagagaugccacuucagccacaacuacuucgaguggcccccccacgcccugcuggugagacagaacuucaugcugaacagaauccugaagagcauggacaagagcaucgacacccugagcgagaucagcggcgccgccgagcuggacagaaccgaggaguacgcccugggcguggugggcgugcuggagagcuacaucggcagcaucaacaacaucaccaagcagagcgccugcguggccaugagcaagcugcugaccgagcugaacagcgacgacaucaagaagcugagagacaacgaggagcugaacagccccaagaucagaguguacaacaccgugaucagcuacaucgagagcaacagaaagaacaacaagcagaccauccaccugcugaagagacugcccgccgacgugcugaagaagaccaucaagaacacccuggacauccacaagagcaucaccaucaacaaccccaaggagagcaccgugagcgacaccaacgaccacgccaagaacaacgacaccaccugaggacuaguguccaccugucccuccugggcugcuggauugucucguuuuccugccaaauaaacaggaucagcgcuuuacagaucuaaaaaaaaaaaaaaaaaaaaaaaaaaaaaaaaaaaaaaaaaaaaaaaaaaaaaaaaaaaaaaaaugcaucccccccccccccccccccccccccccccccaaaggcucuuuucagagccaccagaauu

SEQ ID NO: 11381 - RNA, 920 nt, Artificial Sequence
  mRNA product Design e-4 comprising derived and/or modified sequence from HRSV(A2)__P04545.1__M2-1 (opt5)
gggagacuccugucgggcggaaguaggaggaguagaguuuaaaaacaguacucuuuuuccgguucgggacguaguugaagcaacgacaagccggauaaccgcucuugagacaggaagcuuaccaugagcagacggaaccccugcaaguucgagauccgcggccacugucugaaugggaaaagaugccauuuuucccacaacuacuucgaauggccuccgcaugcccuccuggugcggcagaauuuuaugcuuaaccgcauucugaagucuauggacaaaagcaucgauacccucuccgagauuucuggagcugccgaacuggacagaacagaggaauaugcgcuuggcgucguuggggugcuggagagcuacaucggauccauuaauaacaucacgaagcaaucugcuuguguggccaugagcaaacuccugaccgagcucaauuccgaugacaucaagaagcugcgggauaacgaggaacugaauagccccaaaauucgcgucuauaacacagugaucucuuacauugaauccaauagaaagaacaauaaacagaccauccaccuucugaagcggcucccugccgacguucugaaaaagacaauuaagaacacccuugauauccauaaaagcauuacaaucaauaaccccaaggagucuaccguguccgacacgaacgaucacgcuaaaaauaacgacaccacaugaggacuaguguccaccugucccuccugggcugcuggauugucucguuuuccugccaaauaaacaggaucagcgcuuuacagaucuaaaaaaaaaaaaaaaaaaaaaaaaaaaaaaaaaaaaaaaaaaaaaaaaaaaaaaaaaaaaaaaaugcaucccccccccccccccccccccccccccccccaaaggcucuuuucagagccaccagaauu

SEQ ID NO: 11382 - RNA, 920 nt, Artificial Sequence
  mRNA product Design e-4 comprising derived and/or modified sequence from HRSV(A2)__P04545.1__M2-1 (opt6)
gggagacuccugucgggcggaaguaggaggaguagaguuuaaaaacaguacucuuuuuccgguucgggacguaguugaagcaacgacaagccggauaaccgcucuugagacaggaagcuuaccaugucaagaagaaacccaugcaaauucgaaauaagaggacacugccuaaacggaaaaagaugccacuucucacacaacuacuucgaauggccaccacacgcacuacuuguaagacaaaacuucaugcuaaacagaauacuaaaaucaauggacaaaucaauagacacauuaucagaaauaucaggagcagcagaacucgacagaacagaagaauacgcacuaggaguaguaggaguacuagaaucauacauaggaucaauaaacaacauaacaaaacaaucagcaugcguagccauguccaaacuacuaacagaacuaaacuccgacgacauaaaaaaacuaagagacaacgaagaacuaaacucaccaaaaauaagaguauacaacacaguaauaucauacauagaaucaaacagaaaaaacaauaaacaaacaauacaccuacuaaaaagacucccagcagacguacuaaaaaaaacaauaaaaaacacacuagacauccacaaaucaauaacaauaaacaacccaaaagaaucaacagucucagacaccaacgaccacgcaaaaaacaacgacacaacauaaggacuaguguccaccugucccuccugggcugcuggauugucucguuuuccugccaaauaaacaggaucagcgcuuuacagaucuaaaaaaaaaaaaaaaaaaaaaaaaaaaaaaaaaaaaaaaaaaaaaaaaaaaaaaaaaaaaaaaaugcaucccccccccccccccccccccccccccccccaaaggcucuuuucagagccaccagaauu

SEQ ID NO: 11383 - RNA, 920 nt, Artificial Sequence
  mRNA product Design e-4 comprising derived and/or modified sequence from HRSV(A2)__P04545.1__M2-1 (opt11)
gggagacuccugucgggcggaaguaggaggaguagaguuuaaaaacaguacucuuuuuccgguucgggacguaguugaagcaacgacaagccggauaaccgcucuugagacaggaagcuuaccaugucacgacgcaaccccugcaaauucgaaauccgcggccacugccuaaacggcaaacgcugccacuucucccacaacuacuucgaauggcccccccacgcccuccuuguccgccaaaacuucaugcucaaccgcauccucaaauccauggacaaaagcaucgacacccucuccgaaaucuccggcgcagccgaacucgaccgcaccgaagaauacgcccucggcgucguaggcguccucgaauccuacaucggcucaaucaacaacaucaccaaacaauccgccugcgucgccauguccaaacuccucaccgaacucaacuccgacgacaucaaaaaacuccgcgacaacgaagaacucaacucccccaaaauccgagucuacaacaccguaaucuccuacaucgaauccaaccgcaaaaacaacaaacaaaccauccaccuacuaaaacgacuccccgccgacguccucaaaaaaacaaucaaaaacacccucgacauccacaaauccaucaccaucaacaaccccaaagaaucaaccgucuccgacaccaacgaccacgccaaaaacaacgacaccaccugaggacuaguguccaccugucccuccugggcugcuggauugucucguuuuccugccaaauaaacaggaucagcgcuuuacagaucuaaaaaaaaaaaaaaaaaaaaaaaaaaaaaaaaaaaaaaaaaaaaaaaaaaaaaaaaaaaaaaaaugcaucccccccccccccccccccccccccccccccaaaggcucuuuucagagccaccagaauu

SEQ ID NO: 11384 - RNA, 887 nt, Artificial Sequence
  mRNA product Design e-5 comprising derived and/or modified sequence from HRSV(A2)__P04545.1__M2-1 (wt)
gggagagcggcucggccauuuugucccagucaguccggaggcugcggcugcagaaguaccgccugcggaguaacugcaaagaagcuuaccaugucacgaaggaauccuugcaaauuugaaauucgaggucauugcuuaaaugguaagaggugucauuuuagucauaauuauuuugaauggccaccccaugcacugcuuguaagacaaaacuuuauguuaaacagaauacuuaagucuauggauaaaaguauagauaccuuaucagaaauaaguggagcugcagaguuggacagaacagaagaguaugcucuugguguaguuggagugcuagagaguuauauaggaucaauaaacaauauaacuaaacaaucagcauguguugccaugagcaaacuccucacugaacucaauagugaugauaucaaaaagcugagggacaaugaagagcuaaauucacccaagauaagaguguacaauacugucauaucauauauugaaagcaacaggaaaaacaauaaacaaacuauccaucuguuaaaaagauugccagcagacguauugaagaaaaccaucaaaaacacauuggauauccauaagagcauaaccaucaacaacccaaaagaaucaacuguuagugauacaaaugaccaugccaaaaauaaugauacuaccugaggacuaguguccaccugucccuccugggcugcuggauugucucguuuuccugccaaauaaacaggaucagcgcuuuacagaucuaaaaaaaaaaaaaaaaaaaaaaaaaaaaaaaaaaaaaaaaaaaaaaaaaaaaaaaaaaaaaaaaugcaucccccccccccccccccccccccccccccccaaaggcucuuuucagagccaccagaauu

SEQ ID NO: 11385 - RNA, 887 nt, Artificial Sequence
  mRNA product Design e-5 comprising derived and/or modified sequence from HRSV(A2)__P04545.1__M2-1 (opt1)
gggagagcggcucggccauuuugucccagucaguccggaggcugcggcugcagaaguaccgccugcggaguaacugcaaagaagcuuaccaugagccgccggaaccccugcaaguucgagauccgcggccacugccugaacgggaagcggugccacuucucccacaacuacuucgaguggccgccccacgcccuccuggugcgccagaacuucaugcugaaccggauccucaagagcauggacaaguccaucgacacccugagcgagaucuccggcgccgcggagcuggaccgcaccgaggaguacgcccucggggucgugggcgugcuggagagcuacaucggguccaucaacaacaucacgaagcagagcgccugcgucgccauguccaagcugcucaccgagcugaacagcgacgacaucaagaagcugcgggacaacgaggagcucaacucccccaagauccgcguguacaacaccgugaucagcuacaucgaguccaaccggaagaacaacaagcagaccauccaccuccugaagcgccugcccgccgacguccugaagaagacgaucaagaacacccuggacauccacaagagcaucaccaucaacaacccgaaggaguccaccgugagcgacacgaacgaccacgcgaagaacaacgacaccaccugaggacuaguguccaccugucccuccugggcugcuggauugucucguuuuccugccaaauaaacaggaucagcgcuuuacagaucuaaaaaaaaaaaaaaaaaaaaaaaaaaaaaaaaaaaaaaaaaaaaaaaaaaaaaaaaaaaaaaaaugcaucccccccccccccccccccccccccccccccaaaggcucuuuucagagccaccagaauu

SEQ ID NO: 11386 - RNA, 887 nt, Artificial Sequence
  mRNA product Design e-5 comprising derived and/or modified sequence from HRSV(A2)__P04545.1__M2-1 (opt2)
gggagagcggcucggccauuuugucccagucaguccggaggcugcggcugcagaaguaccgccugcggaguaacugcaaagaagcuuaccaugucccgccgcaaccccugcaaguucgagauccgcggccacugccucaacggcaagcgcugccacuucucccacaacuacuucgaguggcccccccacgcccuccucguccgccagaacuucaugcucaaccgcauccucaaguccauggacaaguccaucgacacccucuccgagaucuccggcgccgccgagcucgaccgcaccgaggaguacgcccucggcgucgucggcguccucgaguccuacaucggcuccaucaacaacaucaccaagcaguccgccugcgucgccauguccaagcuccucaccgagcucaacuccgacgacaucaagaagcuccgcgacaacgaggagcucaacucccccaagauccgcgucuacaacaccgucaucuccuacaucgaguccaaccgcaagaacaacaagcagaccauccaccuccucaagcgccuccccgccgacguccucaagaagaccaucaagaacacccucgacauccacaaguccaucaccaucaacaaccccaaggaguccaccgucuccgacaccaacgaccacgccaagaacaacgacaccaccugaggacuaguguccaccugucccuccugggcugcuggauugucucguuuuccugccaaauaaacaggaucagcgcuuuacagaucuaaaaaaaaaaaaaaaaaaaaaaaaaaaaaaaaaaaaaaaaaaaaaaaaaaaaaaaaaaaaaaaaugcaucccccccccccccccccccccccccccccccaaaggcucuuuucagagccaccagaauu

SEQ ID NO: 11387 - RNA, 887 nt, Artificial Sequence
  mRNA product Design e-5 comprising derived and/or modified sequence from HRSV(A2)__P04545.1__M2-1 (opt3)
gggagagcggcucggccauuuugucccagucaguccggaggcugcggcugcagaaguaccgccugcggaguaacugcaaagaagcuuaccaugagcagaaggaaccccugcaaguucgagauccggggccacugucugaaugggaaacgcugccauuuuucccacaacuacuucgaauggccuccacaugcacuccuugugcgacagaauuuuaugcugaaccguauuuugaagucuauggacaaaucaauagauaccuuaagugagaucagcggagcugcagaacuggacagaacagaggaauaugcccuaggugucguuggcgugcucgaguccuacauugggucuaucaauaacauuacuaagcaaucggcguguguagcuaugucaaaacugcuuacggagcugaauagcgaugacaucaagaaguugagggauaacgaagaguuaaauaguccgaaaauacggguguauaacaccgucaucuccuacauugaaucuaaucgcaagaacaauaaacagacaauccaucugcugaagagacuccccgccgacgugcucaaaaagacuauuaagaacacccuggauauccacaaaagcauaacaauuaauaacccuaaggaguccaccguuucagacacuaacgaucacgccaaaaauaacgacacaaccugaggacuaguguccaccugucccuccugggcugcuggauugucucguuuuccugccaaauaaacaggaucagcgcuuuacagaucuaaaaaaaaaaaaaaaaaaaaaaaaaaaaaaaaaaaaaaaaaaaaaaaaaaaaaaaaaaaaaaaaugcaucccccccccccccccccccccccccccccccaaaggcucuuuucagagccaccagaauu

SEQ ID NO: 11388 - RNA, 887 nt, Artificial Sequence
  mRNA product Design e-5 comprising derived and/or modified sequence from HRSV(A2)__P04545.1__M2-1 (opt4)
gggagagcggcucggccauuuugucccagucaguccggaggcugcggcugcagaaguaccgccugcggaguaacugcaaagaagcuuaccaugagcagaagaaaccccugcaaguucgagaucagaggccacugccugaacggcaagagaugccacuucagccacaacuacuucgaguggcccccccacgcccugcuggugagacagaacuucaugcugaacagaauccugaagagcauggacaagagcaucgacacccugagcgagaucagcggcgccgccgagcuggacagaaccgaggaguacgcccugggcguggugggcgugcuggagagcuacaucggcagcaucaacaacaucaccaagcagagcgccugcguggccaugagcaagcugcugaccgagcugaacagcgacgacaucaagaagcugagagacaacgaggagcugaacagccccaagaucagaguguacaacaccgugaucagcuacaucgagagcaacagaaagaacaacaagcagaccauccaccugcugaagagacugcccgccgacgugcugaagaagaccaucaagaacacccuggacauccacaagagcaucaccaucaacaaccccaaggagagcaccgugagcgacaccaacgaccacgccaagaacaacgacaccaccugaggacuaguguccaccugucccuccugggcugcuggauugucucguuuuccugccaaauaaacaggaucagcgcuuuacagaucuaaaaaaaaaaaaaaaaaaaaaaaaaaaaaaaaaaaaaaaaaaaaaaaaaaaaaaaaaaaaaaaaugcaucccccccccccccccccccccccccccccccaaaggcucuuuucagagccaccagaauu

SEQ ID NO: 11389 - RNA, 887 nt, Artificial Sequence
  mRNA product Design e-5 comprising derived and/or modified sequence from HRSV(A2)__P04545.1__M2-1 (opt5)
gggagagcggcucggccauuuugucccagucaguccggaggcugcggcugcagaaguaccgccugcggaguaacugcaaagaagcuuaccaugagcagacggaaccccugcaaguucgagauccgcggccacugucugaaugggaaaagaugccauuuuucccacaacuacuucgaauggccuccgcaugcccuccuggugcggcagaauuuuaugcuuaaccgcauucugaagucuauggacaaaagcaucgauacccucuccgagauuucuggagcugccgaacuggacagaacagaggaauaugcgcuuggcgucguuggggugcuggagagcuacaucggauccauuaauaacaucacgaagcaaucugcuuguguggccaugagcaaacuccugaccgagcucaauuccgaugacaucaagaagcugcgggauaacgaggaacugaauagccccaaaauucgcgucuauaacacagugaucucuuacauugaauccaauagaaagaacaauaaacagaccauccaccuucugaagcggcucccugccgacguucugaaaaagacaauuaagaacacccuugauauccauaaaagcauuacaaucaauaaccccaaggagucuaccguguccgacacgaacgaucacgcuaaaaauaacgacaccacaugaggacuaguguccaccugucccuccugggcugcuggauugucucguuuuccugccaaauaaacaggaucagcgcuuuacagaucuaaaaaaaaaaaaaaaaaaaaaaaaaaaaaaaaaaaaaaaaaaaaaaaaaaaaaaaaaaaaaaaaugcaucccccccccccccccccccccccccccccccaaaggcucuuuucagagccaccagaauu

SEQ ID NO: 11390 - RNA, 887 nt, Artificial Sequence
  mRNA product Design e-5 comprising derived and/or modified sequence from HRSV(A2)__P04545.1__M2-1 (opt6)
gggagagcggcucggccauuuugucccagucaguccggaggcugcggcugcagaaguaccgccugcggaguaacugcaaagaagcuuaccaugucaagaagaaacccaugcaaauucgaaauaagaggacacugccuaaacggaaaaagaugccacuucucacacaacuacuucgaauggccaccacacgcacuacuuguaagacaaaacuucaugcuaaacagaauacuaaaaucaauggacaaaucaauagacacauuaucagaaauaucaggagcagcagaacucgacagaacagaagaauacgcacuaggaguaguaggaguacuagaaucauacauaggaucaauaaacaacauaacaaaacaaucagcaugcguagccauguccaaacuacuaacagaacuaaacuccgacgacauaaaaaaacuaagagacaacgaagaacuaaacucaccaaaaauaagaguauacaacacaguaauaucauacauagaaucaaacagaaaaaacaauaaacaaacaauacaccuacuaaaaagacucccagcagacguacuaaaaaaaacaauaaaaaacacacuagacauccacaaaucaauaacaauaaacaacccaaaagaaucaacagucucagacaccaacgaccacgcaaaaaacaacgacacaacauaaggacuaguguccaccugucccuccugggcugcuggauugucucguuuuccugccaaauaaacaggaucagcgcuuuacagaucuaaaaaaaaaaaaaaaaaaaaaaaaaaaaaaaaaaaaaaaaaaaaaaaaaaaaaaaaaaaaaaaaugcaucccccccccccccccccccccccccccccccaaaggcucuuuucagagccaccagaauu

SEQ ID NO: 11391 - RNA, 887 nt, Artificial Sequence
  mRNA product Design e-5 comprising derived and/or modified sequence from HRSV(A2)__P04545.1__M2-1 (opt11)
gggagagcggcucggccauuuugucccagucaguccggaggcugcggcugcagaaguaccgccugcggaguaacugcaaagaagcuuaccaugucacgacgcaaccccugcaaauucgaaauccgcggccacugccuaaacggcaaacgcugccacuucucccacaacuacuucgaauggcccccccacgcccuccuuguccgccaaaacuucaugcucaaccgcauccucaaauccauggacaaaagcaucgacacccucuccgaaaucuccggcgcagccgaacucgaccgcaccgaagaauacgcccucggcgucguaggcguccucgaauccuacaucggcucaaucaacaacaucaccaaacaauccgccugcgucgccauguccaaacuccucaccgaacucaacuccgacgacaucaaaaaacuccgcgacaacgaagaacucaacucccccaaaauccgagucuacaacaccguaaucuccuacaucgaauccaaccgcaaaaacaacaaacaaaccauccaccuacuaaaacgacuccccgccgacguccucaaaaaaacaaucaaaaacacccucgacauccacaaauccaucaccaucaacaaccccaaagaaucaaccgucuccgacaccaacgaccacgccaaaaacaacgacaccaccugaggacuaguguccaccugucccuccugggcugcuggauugucucguuuuccugccaaauaaacaggaucagcgcuuuacagaucuaaaaaaaaaaaaaaaaaaaaaaaaaaaaaaaaaaaaaaaaaaaaaaaaaaaaaaaaaaaaaaaaugcaucccccccccccccccccccccccccccccccaaaggcucuuuucagagccaccagaauu

SEQ ID NO: 11392 - RNA, 954 nt, Artificial Sequence
  mRNA product Design e-6 comprising derived and/or modified sequence from HRSV(A2)__P04545.1__M2-1 (wt)
gggagagcggcucggccauuuugucccagucaguccggaggcugcggcugcagaaguaccgccugcggaguaacugcaaagaagcuuaccaugucacgaaggaauccuugcaaauuugaaauucgaggucauugcuuaaaugguaagaggugucauuuuagucauaauuauuuugaauggccaccccaugcacugcuuguaagacaaaacuuuauguuaaacagaauacuuaagucuauggauaaaaguauagauaccuuaucagaaauaaguggagcugcagaguuggacagaacagaagaguaugcucuugguguaguuggagugcuagagaguuauauaggaucaauaaacaauauaacuaaacaaucagcauguguugccaugagcaaacuccucacugaacucaauagugaugauaucaaaaagcugagggacaaugaagagcuaaauucacccaagauaagaguguacaauacugucauaucauauauugaaagcaacaggaaaaacaauaaacaaacuauccaucuguuaaaaagauugccagcagacguauugaagaaaaccaucaaaaacacauuggauauccauaagagcauaaccaucaacaacccaaaagaaucaacuguuagugauacaaaugaccaugccaaaaauaaugauacuaccugaggacuaguacuggcugcaucucccuuuccucuguccuccauccuucucccaggauggugaagggggaccugguacccagugauccccaccccaggauccuaaaucaugacuuaccugcuaauaaaaacucauuggaaaagugagaagaucuaaaaaaaaaaaaaaaaaaaaaaaaaaaaaaaaaaaaaaaaaaaaaaaaaaaaaaaaaaaaaaaaugcaucccccccccccccccccccccccccccccccaaaggcucuuuucagagccaccagaauu

SEQ ID NO: 11393 - RNA, 954 nt, Artificial Sequence
  mRNA product Design e-6 comprising derived and/or modified sequence from HRSV(A2)__P04545.1__M2-1 (opt1)
gggagagcggcucggccauuuugucccagucaguccggaggcugcggcugcagaaguaccgccugcggaguaacugcaaagaagcuuaccaugagccgccggaaccccugcaaguucgagauccgcggccacugccugaacgggaagcggugccacuucucccacaacuacuucgaguggccgccccacgcccuccuggugcgccagaacuucaugcugaaccggauccucaagagcauggacaaguccaucgacacccugagcgagaucuccggcgccgcggagcuggaccgcaccgaggaguacgcccucggggucgugggcgugcuggagagcuacaucggguccaucaacaacaucacgaagcagagcgccugcgucgccauguccaagcugcucaccgagcugaacagcgacgacaucaagaagcugcgggacaacgaggagcucaacucccccaagauccgcguguacaacaccgugaucagcuacaucgaguccaaccggaagaacaacaagcagaccauccaccuccugaagcgccugcccgccgacguccugaagaagacgaucaagaacacccuggacauccacaagagcaucaccaucaacaacccgaaggaguccaccgugagcgacacgaacgaccacgcgaagaacaacgacaccaccugaggacuaguacuggcugcaucucccuuuccucuguccuccauccuucucccaggauggugaagggggaccugguacccagugauccccaccccaggauccuaaaucaugacuuaccugcuaauaaaaacucauuggaaaagugagaagaucuaaaaaaaaaaaaaaaaaaaaaaaaaaaaaaaaaaaaaaaaaaaaaaaaaaaaaaaaaaaaaaaaugcaucccccccccccccccccccccccccccccccaaaggcucuuuucagagccaccagaauu

SEQ ID NO: 11394 - RNA, 954 nt, Artificial Sequence
  mRNA product Design e-6 comprising derived and/or modified sequence from HRSV(A2)__P04545.1__M2-1 (opt2)
gggagagcggcucggccauuuugucccagucaguccggaggcugcggcugcagaaguaccgccugcggaguaacugcaaagaagcuuaccaugucccgccgcaaccccugcaaguucgagauccgcggccacugccucaacggcaagcgcugccacuucucccacaacuacuucgaguggcccccccacgcccuccucguccgccagaacuucaugcucaaccgcauccucaaguccauggacaaguccaucgacacccucuccgagaucuccggcgccgccgagcucgaccgcaccgaggaguacgcccucggcgucgucggcguccucgaguccuacaucggcuccaucaacaacaucaccaagcaguccgccugcgucgccauguccaagcuccucaccgagcucaacuccgacgacaucaagaagcuccgcgacaacgaggagcucaacucccccaagauccgcgucuacaacaccgucaucuccuacaucgaguccaaccgcaagaacaacaagcagaccauccaccuccucaagcgccuccccgccgacguccucaagaagaccaucaagaacacccucgacauccacaaguccaucaccaucaacaaccccaaggaguccaccgucuccgacaccaacgaccacgccaagaacaacgacaccaccugaggacuaguacuggcugcaucucccuuuccucuguccuccauccuucucccaggauggugaagggggaccugguacccagugauccccaccccaggauccuaaaucaugacuuaccugcuaauaaaaacucauuggaaaagugagaagaucuaaaaaaaaaaaaaaaaaaaaaaaaaaaaaaaaaaaaaaaaaaaaaaaaaaaaaaaaaaaaaaaaugcaucccccccccccccccccccccccccccccccaaaggcucuuuucagagccaccagaauu

SEQ ID NO: 11395 - RNA, 954 nt, Artificial Sequence
  mRNA product Design e-6 comprising derived and/or modified sequence from HRSV(A2)__P04545.1__M2-1 (opt3)
gggagagcggcucggccauuuugucccagucaguccggaggcugcggcugcagaaguaccgccugcggaguaacugcaaagaagcuuaccaugagcagaaggaaccccugcaaguucgagauccggggccacugucugaaugggaaacgcugccauuuuucccacaacuacuucgaauggccuccacaugcacuccuugugcgacagaauuuuaugcugaaccguauuuugaagucuauggacaaaucaauagauaccuuaagugagaucagcggagcugcagaacuggacagaacagaggaauaugcccuaggugucguuggcgugcucgaguccuacauugggucuaucaauaacauuacuaagcaaucggcguguguagcuaugucaaaacugcuuacggagcugaauagcgaugacaucaagaaguugagggauaacgaagaguuaaauaguccgaaaauacggguguauaacaccgucaucuccuacauugaaucuaaucgcaagaacaauaaacagacaauccaucugcugaagagacuccccgccgacgugcucaaaaagacuauuaagaacacccuggauauccacaaaagcauaacaauuaauaacccuaaggaguccaccguuucagacacuaacgaucacgccaaaaauaacgacacaaccugaggacuaguacuggcugcaucucccuuuccucuguccuccauccuucucccaggauggugaagggggaccugguacccagugauccccaccccaggauccuaaaucaugacuuaccugcuaauaaaaacucauuggaaaagugagaagaucuaaaaaaaaaaaaaaaaaaaaaaaaaaaaaaaaaaaaaaaaaaaaaaaaaaaaaaaaaaaaaaaaugcaucccccccccccccccccccccccccccccccaaaggcucuuuucagagccaccagaauu

SEQ ID NO: 11396 - RNA, 954 nt, Artificial Sequence
  mRNA product Design e-6 comprising derived and/or modified sequence from HRSV(A2)__P04545.1__M2-1 (opt4)
gggagagcggcucggccauuuugucccagucaguccggaggcugcggcugcagaaguaccgccugcggaguaacugcaaagaagcuuaccaugagcagaagaaaccccugcaaguucgagaucagaggccacugccugaacggcaagagaugccacuucagccacaacuacuucgaguggcccccccacgcccugcuggugagacagaacuucaugcugaacagaauccugaagagcauggacaagagcaucgacacccugagcgagaucagcggcgccgccgagcuggacagaaccgaggaguacgcccugggcguggugggcgugcuggagagcuacaucggcagcaucaacaacaucaccaagcagagcgccugcguggccaugagcaagcugcugaccgagcugaacagcgacgacaucaagaagcugagagacaacgaggagcugaacagccccaagaucagaguguacaacaccgugaucagcuacaucgagagcaacagaaagaacaacaagcagaccauccaccugcugaagagacugcccgccgacgugcugaagaagaccaucaagaacacccuggacauccacaagagcaucaccaucaacaaccccaaggagagcaccgugagcgacaccaacgaccacgccaagaacaacgacaccaccugaggacuaguacuggcugcaucucccuuuccucuguccuccauccuucucccaggauggugaagggggaccugguacccagugauccccaccccaggauccuaaaucaugacuuaccugcuaauaaaaacucauuggaaaagugagaagaucuaaaaaaaaaaaaaaaaaaaaaaaaaaaaaaaaaaaaaaaaaaaaaaaaaaaaaaaaaaaaaaaaugcaucccccccccccccccccccccccccccccccaaaggcucuuuucagagccaccagaauu

SEQ ID NO: 11397 - RNA, 954 nt, Artificial Sequence
  mRNA product Design e-6 comprising derived and/or modified sequence from HRSV(A2)__P04545.1__M2-1 (opt5)
gggagagcggcucggccauuuugucccagucaguccggaggcugcggcugcagaaguaccgccugcggaguaacugcaaagaagcuuaccaugagcagacggaaccccugcaaguucgagauccgcggccacugucugaaugggaaaagaugccauuuuucccacaacuacuucgaauggccuccgcaugcccuccuggugcggcagaauuuuaugcuuaaccgcauucugaagucuauggacaaaagcaucgauacccucuccgagauuucuggagcugccgaacuggacagaacagaggaauaugcgcuuggcgucguuggggugcuggagagcuacaucggauccauuaauaacaucacgaagcaaucugcuuguguggccaugagcaaacuccugaccgagcucaauuccgaugacaucaagaagcugcgggauaacgaggaacugaauagccccaaaauucgcgucuauaacacagugaucucuuacauugaauccaauagaaagaacaauaaacagaccauccaccuucugaagcggcucccugccgacguucugaaaaagacaauuaagaacacccuugauauccauaaaagcauuacaaucaauaaccccaaggagucuaccguguccgacacgaacgaucacgcuaaaaauaacgacaccacaugaggacuaguacuggcugcaucucccuuuccucuguccuccauccuucucccaggauggugaagggggaccugguacccagugauccccaccccaggauccuaaaucaugacuuaccugcuaauaaaaacucauuggaaaagugagaagaucuaaaaaaaaaaaaaaaaaaaaaaaaaaaaaaaaaaaaaaaaaaaaaaaaaaaaaaaaaaaaaaaaugcaucccccccccccccccccccccccccccccccaaaggcucuuuucagagccaccagaauu

SEQ ID NO: 11398 - RNA, 954 nt, Artificial Sequence
  mRNA product Design e-6 comprising derived and/or modified sequence from HRSV(A2)__P04545.1__M2-1 (opt6)
gggagagcggcucggccauuuugucccagucaguccggaggcugcggcugcagaaguaccgccugcggaguaacugcaaagaagcuuaccaugucaagaagaaacccaugcaaauucgaaauaagaggacacugccuaaacggaaaaagaugccacuucucacacaacuacuucgaauggccaccacacgcacuacuuguaagacaaaacuucaugcuaaacagaauacuaaaaucaauggacaaaucaauagacacauuaucagaaauaucaggagcagcagaacucgacagaacagaagaauacgcacuaggaguaguaggaguacuagaaucauacauaggaucaauaaacaacauaacaaaacaaucagcaugcguagccauguccaaacuacuaacagaacuaaacuccgacgacauaaaaaaacuaagagacaacgaagaacuaaacucaccaaaaauaagaguauacaacacaguaauaucauacauagaaucaaacagaaaaaacaauaaacaaacaauacaccuacuaaaaagacucccagcagacguacuaaaaaaaacaauaaaaaacacacuagacauccacaaaucaauaacaauaaacaacccaaaagaaucaacagucucagacaccaacgaccacgcaaaaaacaacgacacaacauaaggacuaguacuggcugcaucucccuuuccucuguccuccauccuucucccaggauggugaagggggaccugguacccagugauccccaccccaggauccuaaaucaugacuuaccugcuaauaaaaacucauuggaaaagugagaagaucuaaaaaaaaaaaaaaaaaaaaaaaaaaaaaaaaaaaaaaaaaaaaaaaaaaaaaaaaaaaaaaaaugcaucccccccccccccccccccccccccccccccaaaggcucuuuucagagccaccagaauu

SEQ ID NO: 11399 - RNA, 954 nt, Artificial Sequence
  mRNA product Design e-6 comprising derived and/or modified sequence from HRSV(A2)__P04545.1__M2-1 (opt11)
gggagagcggcucggccauuuugucccagucaguccggaggcugcggcugcagaaguaccgccugcggaguaacugcaaagaagcuuaccaugucacgacgcaaccccugcaaauucgaaauccgcggccacugccuaaacggcaaacgcugccacuucucccacaacuacuucgaauggcccccccacgcccuccuuguccgccaaaacuucaugcucaaccgcauccucaaauccauggacaaaagcaucgacacccucuccgaaaucuccggcgcagccgaacucgaccgcaccgaagaauacgcccucggcgucguaggcguccucgaauccuacaucggcucaaucaacaacaucaccaaacaauccgccugcgucgccauguccaaacuccucaccgaacucaacuccgacgacaucaaaaaacuccgcgacaacgaagaacucaacucccccaaaauccgagucuacaacaccguaaucuccuacaucgaauccaaccgcaaaaacaacaaacaaaccauccaccuacuaaaacgacuccccgccgacguccucaaaaaaacaaucaaaaacacccucgacauccacaaauccaucaccaucaacaaccccaaagaaucaaccgucuccgacaccaacgaccacgccaaaaacaacgacaccaccugaggacuaguacuggcugcaucucccuuuccucuguccuccauccuucucccaggauggugaagggggaccugguacccagugauccccaccccaggauccuaaaucaugacuuaccugcuaauaaaaacucauuggaaaagugagaagaucuaaaaaaaaaaaaaaaaaaaaaaaaaaaaaaaaaaaaaaaaaaaaaaaaaaaaaaaaaaaaaaaaugcaucccccccccccccccccccccccccccccccaaaggcucuuuucagagccaccagaauu

SEQ ID NO: 11400 - RNA, 1170 nt, Artificial Sequence
  mRNA product Design f-1 comprising derived and/or modified sequence from HRSV(A2)__P04545.1__M2-1 (wt)
gggagagcggcucggccauuuugucccagucaguccggaggcugcggcugcagaaguaccgccugcggaguaacugcaaagaagcuuaccaugucacgaaggaauccuugcaaauuugaaauucgaggucauugcuuaaaugguaagaggugucauuuuagucauaauuauuuugaauggccaccccaugcacugcuuguaagacaaaacuuuauguuaaacagaauacuuaagucuauggauaaaaguauagauaccuuaucagaaauaaguggagcugcagaguuggacagaacagaagaguaugcucuugguguaguuggagugcuagagaguuauauaggaucaauaaacaauauaacuaaacaaucagcauguguugccaugagcaaacuccucacugaacucaauagugaugauaucaaaaagcugagggacaaugaagagcuaaauucacccaagauaagaguguacaauacugucauaucauauauugaaagcaacaggaaaaacaauaaacaaacuauccaucuguuaaaaagauugccagcagacguauugaagaaaaccaucaaaaacacauuggauauccauaagagcauaaccaucaacaacccaaaagaaucaacuguuagugauacaaaugaccaugccaaaaauaaugauacuaccugaggacuagugaagggaacacccaaauuuaauucagccuuaagcacaauuaauuaagagugaaacguaauuguacaagcaguuggucacccaccauagggcaugaucaacaccgcaaccuuuccuuuuucccccagugauucugaaaaaccccucuucccuucagcuugcuuagauguuccaaauuuaguaagcuuaaggcggccuacagaagaaaaagaaaaaaaaggccacaaaaguucccucucacuuucaguaaauaaaauaaaagcagcaacagaaauaaagaaauaaaugaaauucaaaaugaaauaaauauuguguugugcagcauuaaaaaaucaauaaaaauuaaaaaugagcaagaucuaaaaaaaaaaaaaaaaaaaaaaaaaaaaaaaaaaaaaaaaaaaaaaaaaaaaaaaaaaaaaaaaugcaucccccccccccccccccccccccccccccccaaaggcucuuuucagagccaccagaauu

SEQ ID NO: 11401 - RNA, 1170 nt, Artificial Sequence
  mRNA product Design f-1 comprising derived and/or modified sequence from HRSV(A2)__P04545.1__M2-1 (opt1)
gggagagcggcucggccauuuugucccagucaguccggaggcugcggcugcagaaguaccgccugcggaguaacugcaaagaagcuuaccaugagccgccggaaccccugcaaguucgagauccgcggccacugccugaacgggaagcggugccacuucucccacaacuacuucgaguggccgccccacgcccuccuggugcgccagaacuucaugcugaaccggauccucaagagcauggacaaguccaucgacacccugagcgagaucuccggcgccgcggagcuggaccgcaccgaggaguacgcccucggggucgugggcgugcuggagagcuacaucggguccaucaacaacaucacgaagcagagcgccugcgucgccauguccaagcugcucaccgagcugaacagcgacgacaucaagaagcugcgggacaacgaggagcucaacucccccaagauccgcguguacaacaccgugaucagcuacaucgaguccaaccggaagaacaacaagcagaccauccaccuccugaagcgccugcccgccgacguccugaagaagacgaucaagaacacccuggacauccacaagagcaucaccaucaacaacccgaaggaguccaccgugagcgacacgaacgaccacgcgaagaacaacgacaccaccugaggacuagugaagggaacacccaaauuuaauucagccuuaagcacaauuaauuaagagugaaacguaauuguacaagcaguuggucacccaccauagggcaugaucaacaccgcaaccuuuccuuuuucccccagugauucugaaaaaccccucuucccuucagcuugcuuagauguuccaaauuuaguaagcuuaaggcggccuacagaagaaaaagaaaaaaaaggccacaaaaguucccucucacuuucaguaaauaaaauaaaagcagcaacagaaauaaagaaauaaaugaaauucaaaaugaaauaaauauuguguugugcagcauuaaaaaaucaauaaaaauuaaaaaugagcaagaucuaaaaaaaaaaaaaaaaaaaaaaaaaaaaaaaaaaaaaaaaaaaaaaaaaaaaaaaaaaaaaaaaugcaucccccccccccccccccccccccccccccccaaaggcucuuuucagagccaccagaauu

SEQ ID NO: 11402 - RNA, 1170 nt, Artificial Sequence
  mRNA product Design f-1 comprising derived and/or modified sequence from HRSV(A2)__P04545.1__M2-1 (opt2)
gggagagcggcucggccauuuugucccagucaguccggaggcugcggcugcagaaguaccgccugcggaguaacugcaaagaagcuuaccaugucccgccgcaaccccugcaaguucgagauccgcggccacugccucaacggcaagcgcugccacuucucccacaacuacuucgaguggcccccccacgcccuccucguccgccagaacuucaugcucaaccgcauccucaaguccauggacaaguccaucgacacccucuccgagaucuccggcgccgccgagcucgaccgcaccgaggaguacgcccucggcgucgucggcguccucgaguccuacaucggcuccaucaacaacaucaccaagcaguccgccugcgucgccauguccaagcuccucaccgagcucaacuccgacgacaucaagaagcuccgcgacaacgaggagcucaacucccccaagauccgcgucuacaacaccgucaucuccuacaucgaguccaaccgcaagaacaacaagcagaccauccaccuccucaagcgccuccccgccgacguccucaagaagaccaucaagaacacccucgacauccacaaguccaucaccaucaacaaccccaaggaguccaccgucuccgacaccaacgaccacgccaagaacaacgacaccaccugaggacuagugaagggaacacccaaauuuaauucagccuuaagcacaauuaauuaagagugaaacguaauuguacaagcaguuggucacccaccauagggcaugaucaacaccgcaaccuuuccuuuuucccccagugauucugaaaaaccccucuucccuucagcuugcuuagauguuccaaauuuaguaagcuuaaggcggccuacagaagaaaaagaaaaaaaaggccacaaaaguucccucucacuuucaguaaauaaaauaaaagcagcaacagaaauaaagaaauaaaugaaauucaaaaugaaauaaauauuguguugugcagcauuaaaaaaucaauaaaaauuaaaaaugagcaagaucuaaaaaaaaaaaaaaaaaaaaaaaaaaaaaaaaaaaaaaaaaaaaaaaaaaaaaaaaaaaaaaaaugcaucccccccccccccccccccccccccccccccaaaggcucuuuucagagccaccagaauu

SEQ ID NO: 11403 - RNA, 1170 nt, Artificial Sequence
  mRNA product Design f-1 comprising derived and/or modified sequence from HRSV(A2)__P04545.1__M2-1 (opt3)
gggagagcggcucggccauuuugucccagucaguccggaggcugcggcugcagaaguaccgccugcggaguaacugcaaagaagcuuaccaugagcagaaggaaccccugcaaguucgagauccggggccacugucugaaugggaaacgcugccauuuuucccacaacuacuucgaauggccuccacaugcacuccuugugcgacagaauuuuaugcugaaccguauuuugaagucuauggacaaaucaauagauaccuuaagugagaucagcggagcugcagaacuggacagaacagaggaauaugcccuaggugucguuggcgugcucgaguccuacauugggucuaucaauaacauuacuaagcaaucggcguguguagcuaugucaaaacugcuuacggagcugaauagcgaugacaucaagaaguugagggauaacgaagaguuaaauaguccgaaaauacggguguauaacaccgucaucuccuacauugaaucuaaucgcaagaacaauaaacagacaauccaucugcugaagagacuccccgccgacgugcucaaaaagacuauuaagaacacccuggauauccacaaaagcauaacaauuaauaacccuaaggaguccaccguuucagacacuaacgaucacgccaaaaauaacgacacaaccugaggacuagugaagggaacacccaaauuuaauucagccuuaagcacaauuaauuaagagugaaacguaauuguacaagcaguuggucacccaccauagggcaugaucaacaccgcaaccuuuccuuuuucccccagugauucugaaaaaccccucuucccuucagcuugcuuagauguuccaaauuuaguaagcuuaaggcggccuacagaagaaaaagaaaaaaaaggccacaaaaguucccucucacuuucaguaaauaaaauaaaagcagcaacagaaauaaagaaauaaaugaaauucaaaaugaaauaaauauuguguugugcagcauuaaaaaaucaauaaaaauuaaaaaugagcaagaucuaaaaaaaaaaaaaaaaaaaaaaaaaaaaaaaaaaaaaaaaaaaaaaaaaaaaaaaaaaaaaaaaugcaucccccccccccccccccccccccccccccccaaaggcucuuuucagagccaccagaauu

SEQ ID NO: 11404 - RNA, 1170 nt, Artificial Sequence
  mRNA product Design f-1 comprising derived and/or modified sequence from HRSV(A2)__P04545.1__M2-1 (opt4)
gggagagcggcucggccauuuugucccagucaguccggaggcugcggcugcagaaguaccgccugcggaguaacugcaaagaagcuuaccaugagcagaagaaaccccugcaaguucgagaucagaggccacugccugaacggcaagagaugccacuucagccacaacuacuucgaguggcccccccacgcccugcuggugagacagaacuucaugcugaacagaauccugaagagcauggacaagagcaucgacacccugagcgagaucagcggcgccgccgagcuggacagaaccgaggaguacgcccugggcguggugggcgugcuggagagcuacaucggcagcaucaacaacaucaccaagcagagcgccugcguggccaugagcaagcugcugaccgagcugaacagcgacgacaucaagaagcugagagacaacgaggagcugaacagccccaagaucagaguguacaacaccgugaucagcuacaucgagagcaacagaaagaacaacaagcagaccauccaccugcugaagagacugcccgccgacgugcugaagaagaccaucaagaacacccuggacauccacaagagcaucaccaucaacaaccccaaggagagcaccgugagcgacaccaacgaccacgccaagaacaacgacaccaccugaggacuagugaagggaacacccaaauuuaauucagccuuaagcacaauuaauuaagagugaaacguaauuguacaagcaguuggucacccaccauagggcaugaucaacaccgcaaccuuuccuuuuucccccagugauucugaaaaaccccucuucccuucagcuugcuuagauguuccaaauuuaguaagcuuaaggcggccuacagaagaaaaagaaaaaaaaggccacaaaaguucccucucacuuucaguaaauaaaauaaaagcagcaacagaaauaaagaaauaaaugaaauucaaaaugaaauaaauauuguguugugcagcauuaaaaaaucaauaaaaauuaaaaaugagcaagaucuaaaaaaaaaaaaaaaaaaaaaaaaaaaaaaaaaaaaaaaaaaaaaaaaaaaaaaaaaaaaaaaaugcaucccccccccccccccccccccccccccccccaaaggcucuuuucagagccaccagaauu

SEQ ID NO: 11405 - RNA, 1170 nt, Artificial Sequence
  mRNA product Design f-1 comprising derived and/or modified sequence from HRSV(A2)__P04545.1__M2-1 (opt5)
gggagagcggcucggccauuuugucccagucaguccggaggcugcggcugcagaaguaccgccugcggaguaacugcaaagaagcuuaccaugagcagacggaaccccugcaaguucgagauccgcggccacugucugaaugggaaaagaugccauuuuucccacaacuacuucgaauggccuccgcaugcccuccuggugcggcagaauuuuaugcuuaaccgcauucugaagucuauggacaaaagcaucgauacccucuccgagauuucuggagcugccgaacuggacagaacagaggaauaugcgcuuggcgucguuggggugcuggagagcuacaucggauccauuaauaacaucacgaagcaaucugcuuguguggccaugagcaaacuccugaccgagcucaauuccgaugacaucaagaagcugcgggauaacgaggaacugaauagccccaaaauucgcgucuauaacacagugaucucuuacauugaauccaauagaaagaacaauaaacagaccauccaccuucugaagcggcucccugccgacguucugaaaaagacaauuaagaacacccuugauauccauaaaagcauuacaaucaauaaccccaaggagucuaccguguccgacacgaacgaucacgcuaaaaauaacgacaccacaugaggacuagugaagggaacacccaaauuuaauucagccuuaagcacaauuaauuaagagugaaacguaauuguacaagcaguuggucacccaccauagggcaugaucaacaccgcaaccuuuccuuuuucccccagugauucugaaaaaccccucuucccuucagcuugcuuagauguuccaaauuuaguaagcuuaaggcggccuacagaagaaaaagaaaaaaaaggccacaaaaguucccucucacuuucaguaaauaaaauaaaagcagcaacagaaauaaagaaauaaaugaaauucaaaaugaaauaaauauuguguugugcagcauuaaaaaaucaauaaaaauuaaaaaugagcaagaucuaaaaaaaaaaaaaaaaaaaaaaaaaaaaaaaaaaaaaaaaaaaaaaaaaaaaaaaaaaaaaaaaugcaucccccccccccccccccccccccccccccccaaaggcucuuuucagagccaccagaauu

SEQ ID NO: 11406 - RNA, 1170 nt, Artificial Sequence
  mRNA product Design f-1 comprising derived and/or modified sequence from HRSV(A2)__P04545.1__M2-1 (opt6)
gggagagcggcucggccauuuugucccagucaguccggaggcugcggcugcagaaguaccgccugcggaguaacugcaaagaagcuuaccaugucaagaagaaacccaugcaaauucgaaauaagaggacacugccuaaacggaaaaagaugccacuucucacacaacuacuucgaauggccaccacacgcacuacuuguaagacaaaacuucaugcuaaacagaauacuaaaaucaauggacaaaucaauagacacauuaucagaaauaucaggagcagcagaacucgacagaacagaagaauacgcacuaggaguaguaggaguacuagaaucauacauaggaucaauaaacaacauaacaaaacaaucagcaugcguagccauguccaaacuacuaacagaacuaaacuccgacgacauaaaaaaacuaagagacaacgaagaacuaaacucaccaaaaauaagaguauacaacacaguaauaucauacauagaaucaaacagaaaaaacaauaaacaaacaauacaccuacuaaaaagacucccagcagacguacuaaaaaaaacaauaaaaaacacacuagacauccacaaaucaauaacaauaaacaacccaaaagaaucaacagucucagacaccaacgaccacgcaaaaaacaacgacacaacauaaggacuagugaagggaacacccaaauuuaauucagccuuaagcacaauuaauuaagagugaaacguaauuguacaagcaguuggucacccaccauagggcaugaucaacaccgcaaccuuuccuuuuucccccagugauucugaaaaaccccucuucccuucagcuugcuuagauguuccaaauuuaguaagcuuaaggcggccuacagaagaaaaagaaaaaaaaggccacaaaaguucccucucacuuucaguaaauaaaauaaaagcagcaacagaaauaaagaaauaaaugaaauucaaaaugaaauaaauauuguguugugcagcauuaaaaaaucaauaaaaauuaaaaaugagcaagaucuaaaaaaaaaaaaaaaaaaaaaaaaaaaaaaaaaaaaaaaaaaaaaaaaaaaaaaaaaaaaaaaaugcaucccccccccccccccccccccccccccccccaaaggcucuuuucagagccaccagaauu

SEQ ID NO: 11407 - RNA, 1170 nt, Artificial Sequence
  mRNA product Design f-1 comprising derived and/or modified sequence from HRSV(A2)__P04545.1__M2-1 (opt11)
gggagagcggcucggccauuuugucccagucaguccggaggcugcggcugcagaaguaccgccugcggaguaacugcaaagaagcuuaccaugucacgacgcaaccccugcaaauucgaaauccgcggccacugccuaaacggcaaacgcugccacuucucccacaacuacuucgaauggcccccccacgcccuccuuguccgccaaaacuucaugcucaaccgcauccucaaauccauggacaaaagcaucgacacccucuccgaaaucuccggcgcagccgaacucgaccgcaccgaagaauacgcccucggcgucguaggcguccucgaauccuacaucggcucaaucaacaacaucaccaaacaauccgccugcgucgccauguccaaacuccucaccgaacucaacuccgacgacaucaaaaaacuccgcgacaacgaagaacucaacucccccaaaauccgagucuacaacaccguaaucuccuacaucgaauccaaccgcaaaaacaacaaacaaaccauccaccuacuaaaacgacuccccgccgacguccucaaaaaaacaaucaaaaacacccucgacauccacaaauccaucaccaucaacaaccccaaagaaucaaccgucuccgacaccaacgaccacgccaaaaacaacgacaccaccugaggacuagugaagggaacacccaaauuuaauucagccuuaagcacaauuaauuaagagugaaacguaauuguacaagcaguuggucacccaccauagggcaugaucaacaccgcaaccuuuccuuuuucccccagugauucugaaaaaccccucuucccuucagcuugcuuagauguuccaaauuuaguaagcuuaaggcggccuacagaagaaaaagaaaaaaaaggccacaaaaguucccucucacuuucaguaaauaaaauaaaagcagcaacagaaauaaagaaauaaaugaaauucaaaaugaaauaaauauuguguugugcagcauuaaaaaaucaauaaaaauuaaaaaugagcaagaucuaaaaaaaaaaaaaaaaaaaaaaaaaaaaaaaaaaaaaaaaaaaaaaaaaaaaaaaaaaaaaaaaugcaucccccccccccccccccccccccccccccccaaaggcucuuuucagagccaccagaauu

SEQ ID NO: 11408 - RNA, 950 nt, Artificial Sequence
  mRNA product Design f-2 comprising derived and/or modified sequence from HRSV(A2)__P04545.1__M2-1 (wt)
gggagagcggcucggccauuuugucccagucaguccggaggcugcggcugcagaaguaccgccugcggaguaacugcaaagaagcuuaccaugucacgaaggaauccuugcaaauuugaaauucgaggucauugcuuaaaugguaagaggugucauuuuagucauaauuauuuugaauggccaccccaugcacugcuuguaagacaaaacuuuauguuaaacagaauacuuaagucuauggauaaaaguauagauaccuuaucagaaauaaguggagcugcagaguuggacagaacagaagaguaugcucuugguguaguuggagugcuagagaguuauauaggaucaauaaacaauauaacuaaacaaucagcauguguugccaugagcaaacuccucacugaacucaauagugaugauaucaaaaagcugagggacaaugaagagcuaaauucacccaagauaagaguguacaauacugucauaucauauauugaaagcaacaggaaaaacaauaaacaaacuauccaucuguuaaaaagauugccagcagacguauugaagaaaaccaucaaaaacacauuggauauccauaagagcauaaccaucaacaacccaaaagaaucaacuguuagugauacaaaugaccaugccaaaaauaaugauacuaccugaggacuaguggaagcauuuuccuggcugauuaaaagaaauuacucagcuauggucaucuguuccuguuagaaggcuaugcagcauauuauauacuaugcgcauguuaugaaaugcauaauaaaaaauuuuaaaaaaucuaaaagaucuaaaaaaaaaaaaaaaaaaaaaaaaaaaaaaaaaaaaaaaaaaaaaaaaaaaaaaaaaaaaaaaaugcaucccccccccccccccccccccccccccccccaaaggcucuuuucagagccaccagaauu

SEQ ID NO: 11409 - RNA, 950 nt, Artificial Sequence
  mRNA product Design f-2 comprising derived and/or modified sequence from HRSV(A2)__P04545.1__M2-1 (opt1)
gggagagcggcucggccauuuugucccagucaguccggaggcugcggcugcagaaguaccgccugcggaguaacugcaaagaagcuuaccaugagccgccggaaccccugcaaguucgagauccgcggccacugccugaacgggaagcggugccacuucucccacaacuacuucgaguggccgccccacgcccuccuggugcgccagaacuucaugcugaaccggauccucaagagcauggacaaguccaucgacacccugagcgagaucuccggcgccgcggagcuggaccgcaccgaggaguacgcccucggggucgugggcgugcuggagagcuacaucggguccaucaacaacaucacgaagcagagcgccugcgucgccauguccaagcugcucaccgagcugaacagcgacgacaucaagaagcugcgggacaacgaggagcucaacucccccaagauccgcguguacaacaccgugaucagcuacaucgaguccaaccggaagaacaacaagcagaccauccaccuccugaagcgccugcccgccgacguccugaagaagacgaucaagaacacccuggacauccacaagagcaucaccaucaacaacccgaaggaguccaccgugagcgacacgaacgaccacgcgaagaacaacgacaccaccugaggacuaguggaagcauuuuccuggcugauuaaaagaaauuacucagcuauggucaucuguuccuguuagaaggcuaugcagcauauuauauacuaugcgcauguuaugaaaugcauaauaaaaaauuuuaaaaaaucuaaaagaucuaaaaaaaaaaaaaaaaaaaaaaaaaaaaaaaaaaaaaaaaaaaaaaaaaaaaaaaaaaaaaaaaugcaucccccccccccccccccccccccccccccccaaaggcucuuuucagagccaccagaauu

SEQ ID NO: 11410 - RNA, 950 nt, Artificial Sequence
  mRNA product Design f-2 comprising derived and/or modified sequence from HRSV(A2)__P04545.1__M2-1 (opt2)
gggagagcggcucggccauuuugucccagucaguccggaggcugcggcugcagaaguaccgccugcggaguaacugcaaagaagcuuaccaugucccgccgcaaccccugcaaguucgagauccgcggccacugccucaacggcaagcgcugccacuucucccacaacuacuucgaguggcccccccacgcccuccucguccgccagaacuucaugcucaaccgcauccucaaguccauggacaaguccaucgacacccucuccgagaucuccggcgccgccgagcucgaccgcaccgaggaguacgcccucggcgucgucggcguccucgaguccuacaucggcuccaucaacaacaucaccaagcaguccgccugcgucgccauguccaagcuccucaccgagcucaacuccgacgacaucaagaagcuccgcgacaacgaggagcucaacucccccaagauccgcgucuacaacaccgucaucuccuacaucgaguccaaccgcaagaacaacaagcagaccauccaccuccucaagcgccuccccgccgacguccucaagaagaccaucaagaacacccucgacauccacaaguccaucaccaucaacaaccccaaggaguccaccgucuccgacaccaacgaccacgccaagaacaacgacaccaccugaggacuaguggaagcauuuuccuggcugauuaaaagaaauuacucagcuauggucaucuguuccuguuagaaggcuaugcagcauauuauauacuaugcgcauguuaugaaaugcauaauaaaaaauuuuaaaaaaucuaaaagaucuaaaaaaaaaaaaaaaaaaaaaaaaaaaaaaaaaaaaaaaaaaaaaaaaaaaaaaaaaaaaaaaaugcaucccccccccccccccccccccccccccccccaaaggcucuuuucagagccaccagaauu

SEQ ID NO: 11411 - RNA, 950 nt, Artificial Sequence
  mRNA product Design f-2 comprising derived and/or modified sequence from HRSV(A2)__P04545.1__M2-1 (opt3)
gggagagcggcucggccauuuugucccagucaguccggaggcugcggcugcagaaguaccgccugcggaguaacugcaaagaagcuuaccaugagcagaaggaaccccugcaaguucgagauccggggccacugucugaaugggaaacgcugccauuuuucccacaacuacuucgaauggccuccacaugcacuccuugugcgacagaauuuuaugcugaaccguauuuugaagucuauggacaaaucaauagauaccuuaagugagaucagcggagcugcagaacuggacagaacagaggaauaugcccuaggugucguuggcgugcucgaguccuacauugggucuaucaauaacauuacuaagcaaucggcguguguagcuaugucaaaacugcuuacggagcugaauagcgaugacaucaagaaguugagggauaacgaagaguuaaauaguccgaaaauacggguguauaacaccgucaucuccuacauugaaucuaaucgcaagaacaauaaacagacaauccaucugcugaagagacuccccgccgacgugcucaaaaagacuauuaagaacacccuggauauccacaaaagcauaacaauuaauaacccuaaggaguccaccguuucagacacuaacgaucacgccaaaaauaacgacacaaccugaggacuaguggaagcauuuuccuggcugauuaaaagaaauuacucagcuauggucaucuguuccuguuagaaggcuaugcagcauauuauauacuaugcgcauguuaugaaaugcauaauaaaaaauuuuaaaaaaucuaaaagaucuaaaaaaaaaaaaaaaaaaaaaaaaaaaaaaaaaaaaaaaaaaaaaaaaaaaaaaaaaaaaaaaaugcaucccccccccccccccccccccccccccccccaaaggcucuuuucagagccaccagaauu

SEQ ID NO: 11412 - RNA, 950 nt, Artificial Sequence
  mRNA product Design f-2 comprising derived and/or modified sequence from HRSV(A2)__P04545.1__M2-1 (opt4)
gggagagcggcucggccauuuugucccagucaguccggaggcugcggcugcagaaguaccgccugcggaguaacugcaaagaagcuuaccaugagcagaagaaaccccugcaaguucgagaucagaggccacugccugaacggcaagagaugccacuucagccacaacuacuucgaguggcccccccacgcccugcuggugagacagaacuucaugcugaacagaauccugaagagcauggacaagagcaucgacacccugagcgagaucagcggcgccgccgagcuggacagaaccgaggaguacgcccugggcguggugggcgugcuggagagcuacaucggcagcaucaacaacaucaccaagcagagcgccugcguggccaugagcaagcugcugaccgagcugaacagcgacgacaucaagaagcugagagacaacgaggagcugaacagccccaagaucagaguguacaacaccgugaucagcuacaucgagagcaacagaaagaacaacaagcagaccauccaccugcugaagagacugcccgccgacgugcugaagaagaccaucaagaacacccuggacauccacaagagcaucaccaucaacaaccccaaggagagcaccgugagcgacaccaacgaccacgccaagaacaacgacaccaccugaggacuaguggaagcauuuuccuggcugauuaaaagaaauuacucagcuauggucaucuguuccuguuagaaggcuaugcagcauauuauauacuaugcgcauguuaugaaaugcauaauaaaaaauuuuaaaaaaucuaaaagaucuaaaaaaaaaaaaaaaaaaaaaaaaaaaaaaaaaaaaaaaaaaaaaaaaaaaaaaaaaaaaaaaaugcaucccccccccccccccccccccccccccccccaaaggcucuuuucagagccaccagaauu

SEQ ID NO: 11413 - RNA, 950 nt, Artificial Sequence
  mRNA product Design f-2 comprising derived and/or modified sequence from HRSV(A2)__P04545.1__M2-1 (opt5)
gggagagcggcucggccauuuugucccagucaguccggaggcugcggcugcagaaguaccgccugcggaguaacugcaaagaagcuuaccaugagcagacggaaccccugcaaguucgagauccgcggccacugucugaaugggaaaagaugccauuuuucccacaacuacuucgaauggccuccgcaugcccuccuggugcggcagaauuuuaugcuuaaccgcauucugaagucuauggacaaaagcaucgauacccucuccgagauuucuggagcugccgaacuggacagaacagaggaauaugcgcuuggcgucguuggggugcuggagagcuacaucggauccauuaauaacaucacgaagcaaucugcuuguguggccaugagcaaacuccugaccgagcucaauuccgaugacaucaagaagcugcgggauaacgaggaacugaauagccccaaaauucgcgucuauaacacagugaucucuuacauugaauccaauagaaagaacaauaaacagaccauccaccuucugaagcggcucccugccgacguucugaaaaagacaauuaagaacacccuugauauccauaaaagcauuacaaucaauaaccccaaggagucuaccguguccgacacgaacgaucacgcuaaaaauaacgacaccacaugaggacuaguggaagcauuuuccuggcugauuaaaagaaauuacucagcuauggucaucuguuccuguuagaaggcuaugcagcauauuauauacuaugcgcauguuaugaaaugcauaauaaaaaauuuuaaaaaaucuaaaagaucuaaaaaaaaaaaaaaaaaaaaaaaaaaaaaaaaaaaaaaaaaaaaaaaaaaaaaaaaaaaaaaaaugcaucccccccccccccccccccccccccccccccaaaggcucuuuucagagccaccagaauu

SEQ ID NO: 11414 - RNA, 950 nt, Artificial Sequence
  mRNA product Design f-2 comprising derived and/or modified sequence from HRSV(A2)__P04545.1__M2-1 (opt6)
gggagagcggcucggccauuuugucccagucaguccggaggcugcggcugcagaaguaccgccugcggaguaacugcaaagaagcuuaccaugucaagaagaaacccaugcaaauucgaaauaagaggacacugccuaaacggaaaaagaugccacuucucacacaacuacuucgaauggccaccacacgcacuacuuguaagacaaaacuucaugcuaaacagaauacuaaaaucaauggacaaaucaauagacacauuaucagaaauaucaggagcagcagaacucgacagaacagaagaauacgcacuaggaguaguaggaguacuagaaucauacauaggaucaauaaacaacauaacaaaacaaucagcaugcguagccauguccaaacuacuaacagaacuaaacuccgacgacauaaaaaaacuaagagacaacgaagaacuaaacucaccaaaaauaagaguauacaacacaguaauaucauacauagaaucaaacagaaaaaacaauaaacaaacaauacaccuacuaaaaagacucccagcagacguacuaaaaaaaacaauaaaaaacacacuagacauccacaaaucaauaacaauaaacaacccaaaagaaucaacagucucagacaccaacgaccacgcaaaaaacaacgacacaacauaaggacuaguggaagcauuuuccuggcugauuaaaagaaauuacucagcuauggucaucuguuccuguuagaaggcuaugcagcauauuauauacuaugcgcauguuaugaaaugcauaauaaaaaauuuuaaaaaaucuaaaagaucuaaaaaaaaaaaaaaaaaaaaaaaaaaaaaaaaaaaaaaaaaaaaaaaaaaaaaaaaaaaaaaaaugcaucccccccccccccccccccccccccccccccaaaggcucuuuucagagccaccagaauu

SEQ ID NO: 11415 - RNA, 950 nt, Artificial Sequence
  mRNA product Design f-2 comprising derived and/or modified sequence from HRSV(A2)__P04545.1__M2-1 (opt11)
gggagagcggcucggccauuuugucccagucaguccggaggcugcggcugcagaaguaccgccugcggaguaacugcaaagaagcuuaccaugucacgacgcaaccccugcaaauucgaaauccgcggccacugccuaaacggcaaacgcugccacuucucccacaacuacuucgaauggcccccccacgcccuccuuguccgccaaaacuucaugcucaaccgcauccucaaauccauggacaaaagcaucgacacccucuccgaaaucuccggcgcagccgaacucgaccgcaccgaagaauacgcccucggcgucguaggcguccucgaauccuacaucggcucaaucaacaacaucaccaaacaauccgccugcgucgccauguccaaacuccucaccgaacucaacuccgacgacaucaaaaaacuccgcgacaacgaagaacucaacucccccaaaauccgagucuacaacaccguaaucuccuacaucgaauccaaccgcaaaaacaacaaacaaaccauccaccuacuaaaacgacuccccgccgacguccucaaaaaaacaaucaaaaacacccucgacauccacaaauccaucaccaucaacaaccccaaagaaucaaccgucuccgacaccaacgaccacgccaaaaacaacgacaccaccugaggacuaguggaagcauuuuccuggcugauuaaaagaaauuacucagcuauggucaucuguuccuguuagaaggcuaugcagcauauuauauacuaugcgcauguuaugaaaugcauaauaaaaaauuuuaaaaaaucuaaaagaucuaaaaaaaaaaaaaaaaaaaaaaaaaaaaaaaaaaaaaaaaaaaaaaaaaaaaaaaaaaaaaaaaugcaucccccccccccccccccccccccccccccccaaaggcucuuuucagagccaccagaauu

SEQ ID NO: 11416 - RNA, 941 nt, Artificial Sequence
  mRNA product Design f-3 comprising derived and/or modified sequence from HRSV(A2)__P04545.1__M2-1 (wt)
gggagagucccgcagucggcguccagcggcucugcuuguucgugugugugucguugcaggccuuauucaagcuuaccaugucacgaaggaauccuugcaaauuugaaauucgaggucauugcuuaaaugguaagaggugucauuuuagucauaauuauuuugaauggccaccccaugcacugcuuguaagacaaaacuuuauguuaaacagaauacuuaagucuauggauaaaaguauagauaccuuaucagaaauaaguggagcugcagaguuggacagaacagaagaguaugcucuugguguaguuggagugcuagagaguuauauaggaucaauaaacaauauaacuaaacaaucagcauguguugccaugagcaaacuccucacugaacucaauagugaugauaucaaaaagcugagggacaaugaagagcuaaauucacccaagauaagaguguacaauacugucauaucauauauugaaagcaacaggaaaaacaauaaacaaacuauccaucuguuaaaaagauugccagcagacguauugaagaaaaccaucaaaaacacauuggauauccauaagagcauaaccaucaacaacccaaaagaaucaacuguuagugauacaaaugaccaugccaaaaauaaugauacuaccugaggacuaguacuggcugcaucucccuuuccucuguccuccauccuucucccaggauggugaagggggaccugguacccagugauccccaccccaggauccuaaaucaugacuuaccugcuaauaaaaacucauuggaaaagugagaagaucuaaaaaaaaaaaaaaaaaaaaaaaaaaaaaaaaaaaaaaaaaaaaaaaaaaaaaaaaaaaaaaaaugcaucccccccccccccccccccccccccccccccaaaggcucuuuucagagccaccagaauu

SEQ ID NO: 11417 - RNA, 941 nt, Artificial Sequence
  mRNA product Design f-3 comprising derived and/or modified sequence from HRSV(A2)__P04545.1__M2-1 (opt1)
gggagagucccgcagucggcguccagcggcucugcuuguucgugugugugucguugcaggccuuauucaagcuuaccaugagccgccggaaccccugcaaguucgagauccgcggccacugccugaacgggaagcggugccacuucucccacaacuacuucgaguggccgccccacgcccuccuggugcgccagaacuucaugcugaaccggauccucaagagcauggacaaguccaucgacacccugagcgagaucuccggcgccgcggagcuggaccgcaccgaggaguacgcccucggggucgugggcgugcuggagagcuacaucggguccaucaacaacaucacgaagcagagcgccugcgucgccauguccaagcugcucaccgagcugaacagcgacgacaucaagaagcugcgggacaacgaggagcucaacucccccaagauccgcguguacaacaccgugaucagcuacaucgaguccaaccggaagaacaacaagcagaccauccaccuccugaagcgccugcccgccgacguccugaagaagacgaucaagaacacccuggacauccacaagagcaucaccaucaacaacccgaaggaguccaccgugagcgacacgaacgaccacgcgaagaacaacgacaccaccugaggacuaguacuggcugcaucucccuuuccucuguccuccauccuucucccaggauggugaagggggaccugguacccagugauccccaccccaggauccuaaaucaugacuuaccugcuaauaaaaacucauuggaaaagugagaagaucuaaaaaaaaaaaaaaaaaaaaaaaaaaaaaaaaaaaaaaaaaaaaaaaaaaaaaaaaaaaaaaaaugcaucccccccccccccccccccccccccccccccaaaggcucuuuucagagccaccagaauu

SEQ ID NO: 11418 - RNA, 941 nt, Artificial Sequence
  mRNA product Design f-3 comprising derived and/or modified sequence from HRSV(A2)__P04545.1__M2-1 (opt2)
gggagagucccgcagucggcguccagcggcucugcuuguucgugugugugucguugcaggccuuauucaagcuuaccaugucccgccgcaaccccugcaaguucgagauccgcggccacugccucaacggcaagcgcugccacuucucccacaacuacuucgaguggcccccccacgcccuccucguccgccagaacuucaugcucaaccgcauccucaaguccauggacaaguccaucgacacccucuccgagaucuccggcgccgccgagcucgaccgcaccgaggaguacgcccucggcgucgucggcguccucgaguccuacaucggcuccaucaacaacaucaccaagcaguccgccugcgucgccauguccaagcuccucaccgagcucaacuccgacgacaucaagaagcuccgcgacaacgaggagcucaacucccccaagauccgcgucuacaacaccgucaucuccuacaucgaguccaaccgcaagaacaacaagcagaccauccaccuccucaagcgccuccccgccgacguccucaagaagaccaucaagaacacccucgacauccacaaguccaucaccaucaacaaccccaaggaguccaccgucuccgacaccaacgaccacgccaagaacaacgacaccaccugaggacuaguacuggcugcaucucccuuuccucuguccuccauccuucucccaggauggugaagggggaccugguacccagugauccccaccccaggauccuaaaucaugacuuaccugcuaauaaaaacucauuggaaaagugagaagaucuaaaaaaaaaaaaaaaaaaaaaaaaaaaaaaaaaaaaaaaaaaaaaaaaaaaaaaaaaaaaaaaaugcaucccccccccccccccccccccccccccccccaaaggcucuuuucagagccaccagaauu

SEQ ID NO: 11419 - RNA, 941 nt, Artificial Sequence
  mRNA product Design f-3 comprising derived and/or modified sequence from HRSV(A2)__P04545.1__M2-1 (opt3)
gggagagucccgcagucggcguccagcggcucugcuuguucgugugugugucguugcaggccuuauucaagcuuaccaugagcagaaggaaccccugcaaguucgagauccggggccacugucugaaugggaaacgcugccauuuuucccacaacuacuucgaauggccuccacaugcacuccuugugcgacagaauuuuaugcugaaccguauuuugaagucuauggacaaaucaauagauaccuuaagugagaucagcggagcugcagaacuggacagaacagaggaauaugcccuaggugucguuggcgugcucgaguccuacauugggucuaucaauaacauuacuaagcaaucggcguguguagcuaugucaaaacugcuuacggagcugaauagcgaugacaucaagaaguugagggauaacgaagaguuaaauaguccgaaaauacggguguauaacaccgucaucuccuacauugaaucuaaucgcaagaacaauaaacagacaauccaucugcugaagagacuccccgccgacgugcucaaaaagacuauuaagaacacccuggauauccacaaaagcauaacaauuaauaacccuaaggaguccaccguuucagacacuaacgaucacgccaaaaauaacgacacaaccugaggacuaguacuggcugcaucucccuuuccucuguccuccauccuucucccaggauggugaagggggaccugguacccagugauccccaccccaggauccuaaaucaugacuuaccugcuaauaaaaacucauuggaaaagugagaagaucuaaaaaaaaaaaaaaaaaaaaaaaaaaaaaaaaaaaaaaaaaaaaaaaaaaaaaaaaaaaaaaaaugcaucccccccccccccccccccccccccccccccaaaggcucuuuucagagccaccagaauu

SEQ ID NO: 11420 - RNA, 941 nt, Artificial Sequence
  mRNA product Design f-3 comprising derived and/or modified sequence from HRSV(A2)__P04545.1__M2-1 (opt4)
gggagagucccgcagucggcguccagcggcucugcuuguucgugugugugucguugcaggccuuauucaagcuuaccaugagcagaagaaaccccugcaaguucgagaucagaggccacugccugaacggcaagagaugccacuucagccacaacuacuucgaguggcccccccacgcccugcuggugagacagaacuucaugcugaacagaauccugaagagcauggacaagagcaucgacacccugagcgagaucagcggcgccgccgagcuggacagaaccgaggaguacgcccugggcguggugggcgugcuggagagcuacaucggcagcaucaacaacaucaccaagcagagcgccugcguggccaugagcaagcugcugaccgagcugaacagcgacgacaucaagaagcugagagacaacgaggagcugaacagccccaagaucagaguguacaacaccgugaucagcuacaucgagagcaacagaaagaacaacaagcagaccauccaccugcugaagagacugcccgccgacgugcugaagaagaccaucaagaacacccuggacauccacaagagcaucaccaucaacaaccccaaggagagcaccgugagcgacaccaacgaccacgccaagaacaacgacaccaccugaggacuaguacuggcugcaucucccuuuccucuguccuccauccuucucccaggauggugaagggggaccugguacccagugauccccaccccaggauccuaaaucaugacuuaccugcuaauaaaaacucauuggaaaagugagaagaucuaaaaaaaaaaaaaaaaaaaaaaaaaaaaaaaaaaaaaaaaaaaaaaaaaaaaaaaaaaaaaaaaugcaucccccccccccccccccccccccccccccccaaaggcucuuuucagagccaccagaauu

SEQ ID NO: 11421 - RNA, 941 nt, Artificial Sequence
  mRNA product Design f-3 comprising derived and/or modified sequence from HRSV(A2)__P04545.1__M2-1 (opt5)
gggagagucccgcagucggcguccagcggcucugcuuguucgugugugugucguugcaggccuuauucaagcuuaccaugagcagacggaaccccugcaaguucgagauccgcggccacugucugaaugggaaaagaugccauuuuucccacaacuacuucgaauggccuccgcaugcccuccuggugcggcagaauuuuaugcuuaaccgcauucugaagucuauggacaaaagcaucgauacccucuccgagauuucuggagcugccgaacuggacagaacagaggaauaugcgcuuggcgucguuggggugcuggagagcuacaucggauccauuaauaacaucacgaagcaaucugcuuguguggccaugagcaaacuccugaccgagcucaauuccgaugacaucaagaagcugcgggauaacgaggaacugaauagccccaaaauucgcgucuauaacacagugaucucuuacauugaauccaauagaaagaacaauaaacagaccauccaccuucugaagcggcucccugccgacguucugaaaaagacaauuaagaacacccuugauauccauaaaagcauuacaaucaauaaccccaaggagucuaccguguccgacacgaacgaucacgcuaaaaauaacgacaccacaugaggacuaguacuggcugcaucucccuuuccucuguccuccauccuucucccaggauggugaagggggaccugguacccagugauccccaccccaggauccuaaaucaugacuuaccugcuaauaaaaacucauuggaaaagugagaagaucuaaaaaaaaaaaaaaaaaaaaaaaaaaaaaaaaaaaaaaaaaaaaaaaaaaaaaaaaaaaaaaaaugcaucccccccccccccccccccccccccccccccaaaggcucuuuucagagccaccagaauu

SEQ ID NO: 11422 - RNA, 941 nt, Artificial Sequence
  mRNA product Design f-3 comprising derived and/or modified sequence from HRSV(A2)__P04545.1__M2-1 (opt6)
gggagagucccgcagucggcguccagcggcucugcuuguucgugugugugucguugcaggccuuauucaagcuuaccaugucaagaagaaacccaugcaaauucgaaauaagaggacacugccuaaacggaaaaagaugccacuucucacacaacuacuucgaauggccaccacacgcacuacuuguaagacaaaacuucaugcuaaacagaauacuaaaaucaauggacaaaucaauagacacauuaucagaaauaucaggagcagcagaacucgacagaacagaagaauacgcacuaggaguaguaggaguacuagaaucauacauaggaucaauaaacaacauaacaaaacaaucagcaugcguagccauguccaaacuacuaacagaacuaaacuccgacgacauaaaaaaacuaagagacaacgaagaacuaaacucaccaaaaauaagaguauacaacacaguaauaucauacauagaaucaaacagaaaaaacaauaaacaaacaauacaccuacuaaaaagacucccagcagacguacuaaaaaaaacaauaaaaaacacacuagacauccacaaaucaauaacaauaaacaacccaaaagaaucaacagucucagacaccaacgaccacgcaaaaaacaacgacacaacauaaggacuaguacuggcugcaucucccuuuccucuguccuccauccuucucccaggauggugaagggggaccugguacccagugauccccaccccaggauccuaaaucaugacuuaccugcuaauaaaaacucauuggaaaagugagaagaucuaaaaaaaaaaaaaaaaaaaaaaaaaaaaaaaaaaaaaaaaaaaaaaaaaaaaaaaaaaaaaaaaugcaucccccccccccccccccccccccccccccccaaaggcucuuuucagagccaccagaauu

SEQ ID NO: 11423 - RNA, 941 nt, Artificial Sequence
  mRNA product Design f-3 comprising derived and/or modified sequence from HRSV(A2)__P04545.1__M2-1 (opt11)
gggagagucccgcagucggcguccagcggcucugcuuguucgugugugugucguugcaggccuuauucaagcuuaccaugucacgacgcaaccccugcaaauucgaaauccgcggccacugccuaaacggcaaacgcugccacuucucccacaacuacuucgaauggcccccccacgcccuccuuguccgccaaaacuucaugcucaaccgcauccucaaauccauggacaaaagcaucgacacccucuccgaaaucuccggcgcagccgaacucgaccgcaccgaagaauacgcccucggcgucguaggcguccucgaauccuacaucggcucaaucaacaacaucaccaaacaauccgccugcgucgccauguccaaacuccucaccgaacucaacuccgacgacaucaaaaaacuccgcgacaacgaagaacucaacucccccaaaauccgagucuacaacaccguaaucuccuacaucgaauccaaccgcaaaaacaacaaacaaaccauccaccuacuaaaacgacuccccgccgacguccucaaaaaaacaaucaaaaacacccucgacauccacaaauccaucaccaucaacaaccccaaagaaucaaccgucuccgacaccaacgaccacgccaaaaacaacgacaccaccugaggacuaguacuggcugcaucucccuuuccucuguccuccauccuucucccaggauggugaagggggaccugguacccagugauccccaccccaggauccuaaaucaugacuuaccugcuaauaaaaacucauuggaaaagugagaagaucuaaaaaaaaaaaaaaaaaaaaaaaaaaaaaaaaaaaaaaaaaaaaaaaaaaaaaaaaaaaaaaaaugcaucccccccccccccccccccccccccccccccaaaggcucuuuucagagccaccagaauu

SEQ ID NO: 11424 - RNA, 1157 nt, Artificial Sequence
  mRNA product Design f-4 comprising derived and/or modified sequence from HRSV(A2)__P04545.1__M2-1 (wt)
gggagagucccgcagucggcguccagcggcucugcuuguucgugugugugucguugcaggccuuauucaagcuuaccaugucacgaaggaauccuugcaaauuugaaauucgaggucauugcuuaaaugguaagaggugucauuuuagucauaauuauuuugaauggccaccccaugcacugcuuguaagacaaaacuuuauguuaaacagaauacuuaagucuauggauaaaaguauagauaccuuaucagaaauaaguggagcugcagaguuggacagaacagaagaguaugcucuugguguaguuggagugcuagagaguuauauaggaucaauaaacaauauaacuaaacaaucagcauguguugccaugagcaaacuccucacugaacucaauagugaugauaucaaaaagcugagggacaaugaagagcuaaauucacccaagauaagaguguacaauacugucauaucauauauugaaagcaacaggaaaaacaauaaacaaacuauccaucuguuaaaaagauugccagcagacguauugaagaaaaccaucaaaaacacauuggauauccauaagagcauaaccaucaacaacccaaaagaaucaacuguuagugauacaaaugaccaugccaaaaauaaugauacuaccugaggacuagugaagggaacacccaaauuuaauucagccuuaagcacaauuaauuaagagugaaacguaauuguacaagcaguuggucacccaccauagggcaugaucaacaccgcaaccuuuccuuuuucccccagugauucugaaaaaccccucuucccuucagcuugcuuagauguuccaaauuuaguaagcuuaaggcggccuacagaagaaaaagaaaaaaaaggccacaaaaguucccucucacuuucaguaaauaaaauaaaagcagcaacagaaauaaagaaauaaaugaaauucaaaaugaaauaaauauuguguugugcagcauuaaaaaaucaauaaaaauuaaaaaugagcaagaucuaaaaaaaaaaaaaaaaaaaaaaaaaaaaaaaaaaaaaaaaaaaaaaaaaaaaaaaaaaaaaaaaugcaucccccccccccccccccccccccccccccccaaaggcucuuuucagagccaccagaauu

SEQ ID NO: 11425 - RNA, 1157 nt, Artificial Sequence
  mRNA product Design f-4 comprising derived and/or modified sequence from HRSV(A2)__P04545.1__M2-1 (opt1)
gggagagucccgcagucggcguccagcggcucugcuuguucgugugugugucguugcaggccuuauucaagcuuaccaugagccgccggaaccccugcaaguucgagauccgcggccacugccugaacgggaagcggugccacuucucccacaacuacuucgaguggccgccccacgcccuccuggugcgccagaacuucaugcugaaccggauccucaagagcauggacaaguccaucgacacccugagcgagaucuccggcgccgcggagcuggaccgcaccgaggaguacgcccucggggucgugggcgugcuggagagcuacaucggguccaucaacaacaucacgaagcagagcgccugcgucgccauguccaagcugcucaccgagcugaacagcgacgacaucaagaagcugcgggacaacgaggagcucaacucccccaagauccgcguguacaacaccgugaucagcuacaucgaguccaaccggaagaacaacaagcagaccauccaccuccugaagcgccugcccgccgacguccugaagaagacgaucaagaacacccuggacauccacaagagcaucaccaucaacaacccgaaggaguccaccgugagcgacacgaacgaccacgcgaagaacaacgacaccaccugaggacuagugaagggaacacccaaauuuaauucagccuuaagcacaauuaauuaagagugaaacguaauuguacaagcaguuggucacccaccauagggcaugaucaacaccgcaaccuuuccuuuuucccccagugauucugaaaaaccccucuucccuucagcuugcuuagauguuccaaauuuaguaagcuuaaggcggccuacagaagaaaaagaaaaaaaaggccacaaaaguucccucucacuuucaguaaauaaaauaaaagcagcaacagaaauaaagaaauaaaugaaauucaaaaugaaauaaauauuguguugugcagcauuaaaaaaucaauaaaaauuaaaaaugagcaagaucuaaaaaaaaaaaaaaaaaaaaaaaaaaaaaaaaaaaaaaaaaaaaaaaaaaaaaaaaaaaaaaaaugcaucccccccccccccccccccccccccccccccaaaggcucuuuucagagccaccagaauu

SEQ ID NO: 11426 - RNA, 1157 nt, Artificial Sequence
  mRNA product Design f-4 comprising derived and/or modified sequence from HRSV(A2)__P04545.1__M2-1 (opt2)
gggagagucccgcagucggcguccagcggcucugcuuguucgugugugugucguugcaggccuuauucaagcuuaccaugucccgccgcaaccccugcaaguucgagauccgcggccacugccucaacggcaagcgcugccacuucucccacaacuacuucgaguggcccccccacgcccuccucguccgccagaacuucaugcucaaccgcauccucaaguccauggacaaguccaucgacacccucuccgagaucuccggcgccgccgagcucgaccgcaccgaggaguacgcccucggcgucgucggcguccucgaguccuacaucggcuccaucaacaacaucaccaagcaguccgccugcgucgccauguccaagcuccucaccgagcucaacuccgacgacaucaagaagcuccgcgacaacgaggagcucaacucccccaagauccgcgucuacaacaccgucaucuccuacaucgaguccaaccgcaagaacaacaagcagaccauccaccuccucaagcgccuccccgccgacguccucaagaagaccaucaagaacacccucgacauccacaaguccaucaccaucaacaaccccaaggaguccaccgucuccgacaccaacgaccacgccaagaacaacgacaccaccugaggacuagugaagggaacacccaaauuuaauucagccuuaagcacaauuaauuaagagugaaacguaauuguacaagcaguuggucacccaccauagggcaugaucaacaccgcaaccuuuccuuuuucccccagugauucugaaaaaccccucuucccuucagcuugcuuagauguuccaaauuuaguaagcuuaaggcggccuacagaagaaaaagaaaaaaaaggccacaaaaguucccucucacuuucaguaaauaaaauaaaagcagcaacagaaauaaagaaauaaaugaaauucaaaaugaaauaaauauuguguugugcagcauuaaaaaaucaauaaaaauuaaaaaugagcaagaucuaaaaaaaaaaaaaaaaaaaaaaaaaaaaaaaaaaaaaaaaaaaaaaaaaaaaaaaaaaaaaaaaugcaucccccccccccccccccccccccccccccccaaaggcucuuuucagagccaccagaauu

SEQ ID NO: 11427 - RNA, 1157 nt, Artificial Sequence
  mRNA product Design f-4 comprising derived and/or modified sequence from HRSV(A2)__P04545.1__M2-1 (opt3)
gggagagucccgcagucggcguccagcggcucugcuuguucgugugugugucguugcaggccuuauucaagcuuaccaugagcagaaggaaccccugcaaguucgagauccggggccacugucugaaugggaaacgcugccauuuuucccacaacuacuucgaauggccuccacaugcacuccuugugcgacagaauuuuaugcugaaccguauuuugaagucuauggacaaaucaauagauaccuuaagugagaucagcggagcugcagaacuggacagaacagaggaauaugcccuaggugucguuggcgugcucgaguccuacauugggucuaucaauaacauuacuaagcaaucggcguguguagcuaugucaaaacugcuuacggagcugaauagcgaugacaucaagaaguugagggauaacgaagaguuaaauaguccgaaaauacggguguauaacaccgucaucuccuacauugaaucuaaucgcaagaacaauaaacagacaauccaucugcugaagagacuccccgccgacgugcucaaaaagacuauuaagaacacccuggauauccacaaaagcauaacaauuaauaacccuaaggaguccaccguuucagacacuaacgaucacgccaaaaauaacgacacaaccugaggacuagugaagggaacacccaaauuuaauucagccuuaagcacaauuaauuaagagugaaacguaauuguacaagcaguuggucacccaccauagggcaugaucaacaccgcaaccuuuccuuuuucccccagugauucugaaaaaccccucuucccuucagcuugcuuagauguuccaaauuuaguaagcuuaaggcggccuacagaagaaaaagaaaaaaaaggccacaaaaguucccucucacuuucaguaaauaaaauaaaagcagcaacagaaauaaagaaauaaaugaaauucaaaaugaaauaaauauuguguugugcagcauuaaaaaaucaauaaaaauuaaaaaugagcaagaucuaaaaaaaaaaaaaaaaaaaaaaaaaaaaaaaaaaaaaaaaaaaaaaaaaaaaaaaaaaaaaaaaugcaucccccccccccccccccccccccccccccccaaaggcucuuuucagagccaccagaauu

SEQ ID NO: 11428 - RNA, 1157 nt, Artificial Sequence
  mRNA product Design f-4 comprising derived and/or modified sequence from HRSV(A2)__P04545.1__M2-1 (opt4)
gggagagucccgcagucggcguccagcggcucugcuuguucgugugugugucguugcaggccuuauucaagcuuaccaugagcagaagaaaccccugcaaguucgagaucagaggccacugccugaacggcaagagaugccacuucagccacaacuacuucgaguggcccccccacgcccugcuggugagacagaacuucaugcugaacagaauccugaagagcauggacaagagcaucgacacccugagcgagaucagcggcgccgccgagcuggacagaaccgaggaguacgcccugggcguggugggcgugcuggagagcuacaucggcagcaucaacaacaucaccaagcagagcgccugcguggccaugagcaagcugcugaccgagcugaacagcgacgacaucaagaagcugagagacaacgaggagcugaacagccccaagaucagaguguacaacaccgugaucagcuacaucgagagcaacagaaagaacaacaagcagaccauccaccugcugaagagacugcccgccgacgugcugaagaagaccaucaagaacacccuggacauccacaagagcaucaccaucaacaaccccaaggagagcaccgugagcgacaccaacgaccacgccaagaacaacgacaccaccugaggacuagugaagggaacacccaaauuuaauucagccuuaagcacaauuaauuaagagugaaacguaauuguacaagcaguuggucacccaccauagggcaugaucaacaccgcaaccuuuccuuuuucccccagugauucugaaaaaccccucuucccuucagcuugcuuagauguuccaaauuuaguaagcuuaaggcggccuacagaagaaaaagaaaaaaaaggccacaaaaguucccucucacuuucaguaaauaaaauaaaagcagcaacagaaauaaagaaauaaaugaaauucaaaaugaaauaaauauuguguugugcagcauuaaaaaaucaauaaaaauuaaaaaugagcaagaucuaaaaaaaaaaaaaaaaaaaaaaaaaaaaaaaaaaaaaaaaaaaaaaaaaaaaaaaaaaaaaaaaugcaucccccccccccccccccccccccccccccccaaaggcucuuuucagagccaccagaauu

SEQ ID NO: 11429 - RNA, 1157 nt, Artificial Sequence
  mRNA product Design f-4 comprising derived and/or modified sequence from HRSV(A2)__P04545.1__M2-1 (opt5)
gggagagucccgcagucggcguccagcggcucugcuuguucgugugugugucguugcaggccuuauucaagcuuaccaugagcagacggaaccccugcaaguucgagauccgcggccacugucugaaugggaaaagaugccauuuuucccacaacuacuucgaauggccuccgcaugcccuccuggugcggcagaauuuuaugcuuaaccgcauucugaagucuauggacaaaagcaucgauacccucuccgagauuucuggagcugccgaacuggacagaacagaggaauaugcgcuuggcgucguuggggugcuggagagcuacaucggauccauuaauaacaucacgaagcaaucugcuuguguggccaugagcaaacuccugaccgagcucaauuccgaugacaucaagaagcugcgggauaacgaggaacugaauagccccaaaauucgcgucuauaacacagugaucucuuacauugaauccaauagaaagaacaauaaacagaccauccaccuucugaagcggcucccugccgacguucugaaaaagacaauuaagaacacccuugauauccauaaaagcauuacaaucaauaaccccaaggagucuaccguguccgacacgaacgaucacgcuaaaaauaacgacaccacaugaggacuagugaagggaacacccaaauuuaauucagccuuaagcacaauuaauuaagagugaaacguaauuguacaagcaguuggucacccaccauagggcaugaucaacaccgcaaccuuuccuuuuucccccagugauucugaaaaaccccucuucccuucagcuugcuuagauguuccaaauuuaguaagcuuaaggcggccuacagaagaaaaagaaaaaaaaggccacaaaaguucccucucacuuucaguaaauaaaauaaaagcagcaacagaaauaaagaaauaaaugaaauucaaaaugaaauaaauauuguguugugcagcauuaaaaaaucaauaaaaauuaaaaaugagcaagaucuaaaaaaaaaaaaaaaaaaaaaaaaaaaaaaaaaaaaaaaaaaaaaaaaaaaaaaaaaaaaaaaaugcaucccccccccccccccccccccccccccccccaaaggcucuuuucagagccaccagaauu

SEQ ID NO: 11430 - RNA, 1157 nt, Artificial Sequence
  mRNA product Design f-4 comprising derived and/or modified sequence from HRSV(A2)__P04545.1__M2-1 (opt6)
gggagagucccgcagucggcguccagcggcucugcuuguucgugugugugucguugcaggccuuauucaagcuuaccaugucaagaagaaacccaugcaaauucgaaauaagaggacacugccuaaacggaaaaagaugccacuucucacacaacuacuucgaauggccaccacacgcacuacuuguaagacaaaacuucaugcuaaacagaauacuaaaaucaauggacaaaucaauagacacauuaucagaaauaucaggagcagcagaacucgacagaacagaagaauacgcacuaggaguaguaggaguacuagaaucauacauaggaucaauaaacaacauaacaaaacaaucagcaugcguagccauguccaaacuacuaacagaacuaaacuccgacgacauaaaaaaacuaagagacaacgaagaacuaaacucaccaaaaauaagaguauacaacacaguaauaucauacauagaaucaaacagaaaaaacaauaaacaaacaauacaccuacuaaaaagacucccagcagacguacuaaaaaaaacaauaaaaaacacacuagacauccacaaaucaauaacaauaaacaacccaaaagaaucaacagucucagacaccaacgaccacgcaaaaaacaacgacacaacauaaggacuagugaagggaacacccaaauuuaauucagccuuaagcacaauuaauuaagagugaaacguaauuguacaagcaguuggucacccaccauagggcaugaucaacaccgcaaccuuuccuuuuucccccagugauucugaaaaaccccucuucccuucagcuugcuuagauguuccaaauuuaguaagcuuaaggcggccuacagaagaaaaagaaaaaaaaggccacaaaaguucccucucacuuucaguaaauaaaauaaaagcagcaacagaaauaaagaaauaaaugaaauucaaaaugaaauaaauauuguguugugcagcauuaaaaaaucaauaaaaauuaaaaaugagcaagaucuaaaaaaaaaaaaaaaaaaaaaaaaaaaaaaaaaaaaaaaaaaaaaaaaaaaaaaaaaaaaaaaaugcaucccccccccccccccccccccccccccccccaaaggcucuuuucagagccaccagaauu

SEQ ID NO: 11431 - RNA, 1157 nt, Artificial Sequence
  mRNA product Design f-4 comprising derived and/or modified sequence from HRSV(A2)__P04545.1__M2-1 (opt11)
gggagagucccgcagucggcguccagcggcucugcuuguucgugugugugucguugcaggccuuauucaagcuuaccaugucacgacgcaaccccugcaaauucgaaauccgcggccacugccuaaacggcaaacgcugccacuucucccacaacuacuucgaauggcccccccacgcccuccuuguccgccaaaacuucaugcucaaccgcauccucaaauccauggacaaaagcaucgacacccucuccgaaaucuccggcgcagccgaacucgaccgcaccgaagaauacgcccucggcgucguaggcguccucgaauccuacaucggcucaaucaacaacaucaccaaacaauccgccugcgucgccauguccaaacuccucaccgaacucaacuccgacgacaucaaaaaacuccgcgacaacgaagaacucaacucccccaaaauccgagucuacaacaccguaaucuccuacaucgaauccaaccgcaaaaacaacaaacaaaccauccaccuacuaaaacgacuccccgccgacguccucaaaaaaacaaucaaaaacacccucgacauccacaaauccaucaccaucaacaaccccaaagaaucaaccgucuccgacaccaacgaccacgccaaaaacaacgacaccaccugaggacuagugaagggaacacccaaauuuaauucagccuuaagcacaauuaauuaagagugaaacguaauuguacaagcaguuggucacccaccauagggcaugaucaacaccgcaaccuuuccuuuuucccccagugauucugaaaaaccccucuucccuucagcuugcuuagauguuccaaauuuaguaagcuuaaggcggccuacagaagaaaaagaaaaaaaaggccacaaaaguucccucucacuuucaguaaauaaaauaaaagcagcaacagaaauaaagaaauaaaugaaauucaaaaugaaauaaauauuguguugugcagcauuaaaaaaucaauaaaaauuaaaaaugagcaagaucuaaaaaaaaaaaaaaaaaaaaaaaaaaaaaaaaaaaaaaaaaaaaaaaaaaaaaaaaaaaaaaaaugcaucccccccccccccccccccccccccccccccaaaggcucuuuucagagccaccagaauu

SEQ ID NO: 11432 - RNA, 933 nt, Artificial Sequence
  mRNA product Design f-5 comprising derived and/or modified sequence from HRSV(A2)__P04545.1__M2-1 (wt)
gggagacuuucccauucuguagcagaauuugguguugccuguggucuuggucccgcggagaagcuuaccaugucacgaaggaauccuugcaaauuugaaauucgaggucauugcuuaaaugguaagaggugucauuuuagucauaauuauuuugaauggccaccccaugcacugcuuguaagacaaaacuuuauguuaaacagaauacuuaagucuauggauaaaaguauagauaccuuaucagaaauaaguggagcugcagaguuggacagaacagaagaguaugcucuugguguaguuggagugcuagagaguuauauaggaucaauaaacaauauaacuaaacaaucagcauguguugccaugagcaaacuccucacugaacucaauagugaugauaucaaaaagcugagggacaaugaagagcuaaauucacccaagauaagaguguacaauacugucauaucauauauugaaagcaacaggaaaaacaauaaacaaacuauccaucuguuaaaaagauugccagcagacguauugaagaaaaccaucaaaaacacauuggauauccauaagagcauaaccaucaacaacccaaaagaaucaacuguuagugauacaaaugaccaugccaaaaauaaugauacuaccugaggacuaguacuggcugcaucucccuuuccucuguccuccauccuucucccaggauggugaagggggaccugguacccagugauccccaccccaggauccuaaaucaugacuuaccugcuaauaaaaacucauuggaaaagugagaagaucuaaaaaaaaaaaaaaaaaaaaaaaaaaaaaaaaaaaaaaaaaaaaaaaaaaaaaaaaaaaaaaaaugcaucccccccccccccccccccccccccccccccaaaggcucuuuucagagccaccagaauu

SEQ ID NO: 11433 - RNA, 933 nt, Artificial Sequence
  mRNA product Design f-5 comprising derived and/or modified sequence from HRSV(A2)__P04545.1__M2-1 (opt1)
gggagacuuucccauucuguagcagaauuugguguugccuguggucuuggucccgcggagaagcuuaccaugagccgccggaaccccugcaaguucgagauccgcggccacugccugaacgggaagcggugccacuucucccacaacuacuucgaguggccgccccacgcccuccuggugcgccagaacuucaugcugaaccggauccucaagagcauggacaaguccaucgacacccugagcgagaucuccggcgccgcggagcuggaccgcaccgaggaguacgcccucggggucgugggcgugcuggagagcuacaucggguccaucaacaacaucacgaagcagagcgccugcgucgccauguccaagcugcucaccgagcugaacagcgacgacaucaagaagcugcgggacaacgaggagcucaacucccccaagauccgcguguacaacaccgugaucagcuacaucgaguccaaccggaagaacaacaagcagaccauccaccuccugaagcgccugcccgccgacguccugaagaagacgaucaagaacacccuggacauccacaagagcaucaccaucaacaacccgaaggaguccaccgugagcgacacgaacgaccacgcgaagaacaacgacaccaccugaggacuaguacuggcugcaucucccuuuccucuguccuccauccuucucccaggauggugaagggggaccugguacccagugauccccaccccaggauccuaaaucaugacuuaccugcuaauaaaaacucauuggaaaagugagaagaucuaaaaaaaaaaaaaaaaaaaaaaaaaaaaaaaaaaaaaaaaaaaaaaaaaaaaaaaaaaaaaaaaugcaucccccccccccccccccccccccccccccccaaaggcucuuuucagagccaccagaauu

SEQ ID NO: 11434 - RNA, 933 nt, Artificial Sequence
  mRNA product Design f-5 comprising derived and/or modified sequence from HRSV(A2)__P04545.1__M2-1 (opt2)
gggagacuuucccauucuguagcagaauuugguguugccuguggucuuggucccgcggagaagcuuaccaugucccgccgcaaccccugcaaguucgagauccgcggccacugccucaacggcaagcgcugccacuucucccacaacuacuucgaguggcccccccacgcccuccucguccgccagaacuucaugcucaaccgcauccucaaguccauggacaaguccaucgacacccucuccgagaucuccggcgccgccgagcucgaccgcaccgaggaguacgcccucggcgucgucggcguccucgaguccuacaucggcuccaucaacaacaucaccaagcaguccgccugcgucgccauguccaagcuccucaccgagcucaacuccgacgacaucaagaagcuccgcgacaacgaggagcucaacucccccaagauccgcgucuacaacaccgucaucuccuacaucgaguccaaccgcaagaacaacaagcagaccauccaccuccucaagcgccuccccgccgacguccucaagaagaccaucaagaacacccucgacauccacaaguccaucaccaucaacaaccccaaggaguccaccgucuccgacaccaacgaccacgccaagaacaacgacaccaccugaggacuaguacuggcugcaucucccuuuccucuguccuccauccuucucccaggauggugaagggggaccugguacccagugauccccaccccaggauccuaaaucaugacuuaccugcuaauaaaaacucauuggaaaagugagaagaucuaaaaaaaaaaaaaaaaaaaaaaaaaaaaaaaaaaaaaaaaaaaaaaaaaaaaaaaaaaaaaaaaugcaucccccccccccccccccccccccccccccccaaaggcucuuuucagagccaccagaauu

SEQ ID NO: 11435 - RNA, 933 nt, Artificial Sequence
  mRNA product Design f-5 comprising derived and/or modified sequence from HRSV(A2)__P04545.1__M2-1 (opt3)
gggagacuuucccauucuguagcagaauuugguguugccuguggucuuggucccgcggagaagcuuaccaugagcagaaggaaccccugcaaguucgagauccggggccacugucugaaugggaaacgcugccauuuuucccacaacuacuucgaauggccuccacaugcacuccuugugcgacagaauuuuaugcugaaccguauuuugaagucuauggacaaaucaauagauaccuuaagugagaucagcggagcugcagaacuggacagaacagaggaauaugcccuaggugucguuggcgugcucgaguccuacauugggucuaucaauaacauuacuaagcaaucggcguguguagcuaugucaaaacugcuuacggagcugaauagcgaugacaucaagaaguugagggauaacgaagaguuaaauaguccgaaaauacggguguauaacaccgucaucuccuacauugaaucuaaucgcaagaacaauaaacagacaauccaucugcugaagagacuccccgccgacgugcucaaaaagacuauuaagaacacccuggauauccacaaaagcauaacaauuaauaacccuaaggaguccaccguuucagacacuaacgaucacgccaaaaauaacgacacaaccugaggacuaguacuggcugcaucucccuuuccucuguccuccauccuucucccaggauggugaagggggaccugguacccagugauccccaccccaggauccuaaaucaugacuuaccugcuaauaaaaacucauuggaaaagugagaagaucuaaaaaaaaaaaaaaaaaaaaaaaaaaaaaaaaaaaaaaaaaaaaaaaaaaaaaaaaaaaaaaaaugcaucccccccccccccccccccccccccccccccaaaggcucuuuucagagccaccagaauu

SEQ ID NO: 11436 - RNA, 933 nt, Artificial Sequence
  mRNA product Design f-5 comprising derived and/or modified sequence from HRSV(A2)__P04545.1__M2-1 (opt4)
gggagacuuucccauucuguagcagaauuugguguugccuguggucuuggucccgcggagaagcuuaccaugagcagaagaaaccccugcaaguucgagaucagaggccacugccugaacggcaagagaugccacuucagccacaacuacuucgaguggcccccccacgcccugcuggugagacagaacuucaugcugaacagaauccugaagagcauggacaagagcaucgacacccugagcgagaucagcggcgccgccgagcuggacagaaccgaggaguacgcccugggcguggugggcgugcuggagagcuacaucggcagcaucaacaacaucaccaagcagagcgccugcguggccaugagcaagcugcugaccgagcugaacagcgacgacaucaagaagcugagagacaacgaggagcugaacagccccaagaucagaguguacaacaccgugaucagcuacaucgagagcaacagaaagaacaacaagcagaccauccaccugcugaagagacugcccgccgacgugcugaagaagaccaucaagaacacccuggacauccacaagagcaucaccaucaacaaccccaaggagagcaccgugagcgacaccaacgaccacgccaagaacaacgacaccaccugaggacuaguacuggcugcaucucccuuuccucuguccuccauccuucucccaggauggugaagggggaccugguacccagugauccccaccccaggauccuaaaucaugacuuaccugcuaauaaaaacucauuggaaaagugagaagaucuaaaaaaaaaaaaaaaaaaaaaaaaaaaaaaaaaaaaaaaaaaaaaaaaaaaaaaaaaaaaaaaaugcaucccccccccccccccccccccccccccccccaaaggcucuuuucagagccaccagaauu

SEQ ID NO: 11437 - RNA, 933 nt, Artificial Sequence
  mRNA product Design f-5 comprising derived and/or modified sequence from HRSV(A2)__P04545.1__M2-1 (opt5)
gggagacuuucccauucuguagcagaauuugguguugccuguggucuuggucccgcggagaagcuuaccaugagcagacggaaccccugcaaguucgagauccgcggccacugucugaaugggaaaagaugccauuuuucccacaacuacuucgaauggccuccgcaugcccuccuggugcggcagaauuuuaugcuuaaccgcauucugaagucuauggacaaaagcaucgauacccucuccgagauuucuggagcugccgaacuggacagaacagaggaauaugcgcuuggcgucguuggggugcuggagagcuacaucggauccauuaauaacaucacgaagcaaucugcuuguguggccaugagcaaacuccugaccgagcucaauuccgaugacaucaagaagcugcgggauaacgaggaacugaauagccccaaaauucgcgucuauaacacagugaucucuuacauugaauccaauagaaagaacaauaaacagaccauccaccuucugaagcggcucccugccgacguucugaaaaagacaauuaagaacacccuugauauccauaaaagcauuacaaucaauaaccccaaggagucuaccguguccgacacgaacgaucacgcuaaaaauaacgacaccacaugaggacuaguacuggcugcaucucccuuuccucuguccuccauccuucucccaggauggugaagggggaccugguacccagugauccccaccccaggauccuaaaucaugacuuaccugcuaauaaaaacucauuggaaaagugagaagaucuaaaaaaaaaaaaaaaaaaaaaaaaaaaaaaaaaaaaaaaaaaaaaaaaaaaaaaaaaaaaaaaaugcaucccccccccccccccccccccccccccccccaaaggcucuuuucagagccaccagaauu

SEQ ID NO: 11438 - RNA, 933 nt, Artificial Sequence
  mRNA product Design f-5 comprising derived and/or modified sequence from HRSV(A2)__P04545.1__M2-1 (opt6)
gggagacuuucccauucuguagcagaauuugguguugccuguggucuuggucccgcggagaagcuuaccaugucaagaagaaacccaugcaaauucgaaauaagaggacacugccuaaacggaaaaagaugccacuucucacacaacuacuucgaauggccaccacacgcacuacuuguaagacaaaacuucaugcuaaacagaauacuaaaaucaauggacaaaucaauagacacauuaucagaaauaucaggagcagcagaacucgacagaacagaagaauacgcacuaggaguaguaggaguacuagaaucauacauaggaucaauaaacaacauaacaaaacaaucagcaugcguagccauguccaaacuacuaacagaacuaaacuccgacgacauaaaaaaacuaagagacaacgaagaacuaaacucaccaaaaauaagaguauacaacacaguaauaucauacauagaaucaaacagaaaaaacaauaaacaaacaauacaccuacuaaaaagacucccagcagacguacuaaaaaaaacaauaaaaaacacacuagacauccacaaaucaauaacaauaaacaacccaaaagaaucaacagucucagacaccaacgaccacgcaaaaaacaacgacacaacauaaggacuaguacuggcugcaucucccuuuccucuguccuccauccuucucccaggauggugaagggggaccugguacccagugauccccaccccaggauccuaaaucaugacuuaccugcuaauaaaaacucauuggaaaagugagaagaucuaaaaaaaaaaaaaaaaaaaaaaaaaaaaaaaaaaaaaaaaaaaaaaaaaaaaaaaaaaaaaaaaugcaucccccccccccccccccccccccccccccccaaaggcucuuuucagagccaccagaauu

SEQ ID NO: 11439 - RNA, 933 nt, Artificial Sequence
  mRNA product Design f-5 comprising derived and/or modified sequence from HRSV(A2)__P04545.1__M2-1 (opt11)
gggagacuuucccauucuguagcagaauuugguguugccuguggucuuggucccgcggagaagcuuaccaugucacgacgcaaccccugcaaauucgaaauccgcggccacugccuaaacggcaaacgcugccacuucucccacaacuacuucgaauggcccccccacgcccuccuuguccgccaaaacuucaugcucaaccgcauccucaaauccauggacaaaagcaucgacacccucuccgaaaucuccggcgcagccgaacucgaccgcaccgaagaauacgcccucggcgucguaggcguccucgaauccuacaucggcucaaucaacaacaucaccaaacaauccgccugcgucgccauguccaaacuccucaccgaacucaacuccgacgacaucaaaaaacuccgcgacaacgaagaacucaacucccccaaaauccgagucuacaacaccguaaucuccuacaucgaauccaaccgcaaaaacaacaaacaaaccauccaccuacuaaaacgacuccccgccgacguccucaaaaaaacaaucaaaaacacccucgacauccacaaauccaucaccaucaacaaccccaaagaaucaaccgucuccgacaccaacgaccacgccaaaaacaacgacaccaccugaggacuaguacuggcugcaucucccuuuccucuguccuccauccuucucccaggauggugaagggggaccugguacccagugauccccaccccaggauccuaaaucaugacuuaccugcuaauaaaaacucauuggaaaagugagaagaucuaaaaaaaaaaaaaaaaaaaaaaaaaaaaaaaaaaaaaaaaaaaaaaaaaaaaaaaaaaaaaaaaugcaucccccccccccccccccccccccccccccccaaaggcucuuuucagagccaccagaauu

SEQ ID NO: 11440 - RNA, 929 nt, Artificial Sequence
  mRNA product Design g-1 comprising derived and/or modified sequence from HRSV(A2)__P04545.1__M2-1 (wt)
gggagacuuucccauucuguagcagaauuugguguugccuguggucuuggucccgcggagaagcuuaccaugucacgaaggaauccuugcaaauuugaaauucgaggucauugcuuaaaugguaagaggugucauuuuagucauaauuauuuugaauggccaccccaugcacugcuuguaagacaaaacuuuauguuaaacagaauacuuaagucuauggauaaaaguauagauaccuuaucagaaauaaguggagcugcagaguuggacagaacagaagaguaugcucuugguguaguuggagugcuagagaguuauauaggaucaauaaacaauauaacuaaacaaucagcauguguugccaugagcaaacuccucacugaacucaauagugaugauaucaaaaagcugagggacaaugaagagcuaaauucacccaagauaagaguguacaauacugucauaucauauauugaaagcaacaggaaaaacaauaaacaaacuauccaucuguuaaaaagauugccagcagacguauugaagaaaaccaucaaaaacacauuggauauccauaagagcauaaccaucaacaacccaaaagaaucaacuguuagugauacaaaugaccaugccaaaaauaaugauacuaccugaggacuaguggaagcauuuuccuggcugauuaaaagaaauuacucagcuauggucaucuguuccuguuagaaggcuaugcagcauauuauauacuaugcgcauguuaugaaaugcauaauaaaaaauuuuaaaaaaucuaaaagaucuaaaaaaaaaaaaaaaaaaaaaaaaaaaaaaaaaaaaaaaaaaaaaaaaaaaaaaaaaaaaaaaaugcaucccccccccccccccccccccccccccccccaaaggcucuuuucagagccaccagaauu

SEQ ID NO: 11441 - RNA, 929 nt, Artificial Sequence
  mRNA product Design g-1 comprising derived and/or modified sequence from HRSV(A2)__P04545.1__M2-1 (opt1)
gggagacuuucccauucuguagcagaauuugguguugccuguggucuuggucccgcggagaagcuuaccaugagccgccggaaccccugcaaguucgagauccgcggccacugccugaacgggaagcggugccacuucucccacaacuacuucgaguggccgccccacgcccuccuggugcgccagaacuucaugcugaaccggauccucaagagcauggacaaguccaucgacacccugagcgagaucuccggcgccgcggagcuggaccgcaccgaggaguacgcccucggggucgugggcgugcuggagagcuacaucggguccaucaacaacaucacgaagcagagcgccugcgucgccauguccaagcugcucaccgagcugaacagcgacgacaucaagaagcugcgggacaacgaggagcucaacucccccaagauccgcguguacaacaccgugaucagcuacaucgaguccaaccggaagaacaacaagcagaccauccaccuccugaagcgccugcccgccgacguccugaagaagacgaucaagaacacccuggacauccacaagagcaucaccaucaacaacccgaaggaguccaccgugagcgacacgaacgaccacgcgaagaacaacgacaccaccugaggacuaguggaagcauuuuccuggcugauuaaaagaaauuacucagcuauggucaucuguuccuguuagaaggcuaugcagcauauuauauacuaugcgcauguuaugaaaugcauaauaaaaaauuuuaaaaaaucuaaaagaucuaaaaaaaaaaaaaaaaaaaaaaaaaaaaaaaaaaaaaaaaaaaaaaaaaaaaaaaaaaaaaaaaugcaucccccccccccccccccccccccccccccccaaaggcucuuuucagagccaccagaauu

SEQ ID NO: 11442 - RNA, 929 nt, Artificial Sequence
  mRNA product Design g-1 comprising derived and/or modified sequence from HRSV(A2)__P04545.1__M2-1 (opt2)
gggagacuuucccauucuguagcagaauuugguguugccuguggucuuggucccgcggagaagcuuaccaugucccgccgcaaccccugcaaguucgagauccgcggccacugccucaacggcaagcgcugccacuucucccacaacuacuucgaguggcccccccacgcccuccucguccgccagaacuucaugcucaaccgcauccucaaguccauggacaaguccaucgacacccucuccgagaucuccggcgccgccgagcucgaccgcaccgaggaguacgcccucggcgucgucggcguccucgaguccuacaucggcuccaucaacaacaucaccaagcaguccgccugcgucgccauguccaagcuccucaccgagcucaacuccgacgacaucaagaagcuccgcgacaacgaggagcucaacucccccaagauccgcgucuacaacaccgucaucuccuacaucgaguccaaccgcaagaacaacaagcagaccauccaccuccucaagcgccuccccgccgacguccucaagaagaccaucaagaacacccucgacauccacaaguccaucaccaucaacaaccccaaggaguccaccgucuccgacaccaacgaccacgccaagaacaacgacaccaccugaggacuaguggaagcauuuuccuggcugauuaaaagaaauuacucagcuauggucaucuguuccuguuagaaggcuaugcagcauauuauauacuaugcgcauguuaugaaaugcauaauaaaaaauuuuaaaaaaucuaaaagaucuaaaaaaaaaaaaaaaaaaaaaaaaaaaaaaaaaaaaaaaaaaaaaaaaaaaaaaaaaaaaaaaaugcaucccccccccccccccccccccccccccccccaaaggcucuuuucagagccaccagaauu

SEQ ID NO: 11443 - RNA, 929 nt, Artificial Sequence
  mRNA product Design g-1 comprising derived and/or modified sequence from HRSV(A2)__P04545.1__M2-1 (opt3)
gggagacuuucccauucuguagcagaauuugguguugccuguggucuuggucccgcggagaagcuuaccaugagcagaaggaaccccugcaaguucgagauccggggccacugucugaaugggaaacgcugccauuuuucccacaacuacuucgaauggccuccacaugcacuccuugugcgacagaauuuuaugcugaaccguauuuugaagucuauggacaaaucaauagauaccuuaagugagaucagcggagcugcagaacuggacagaacagaggaauaugcccuaggugucguuggcgugcucgaguccuacauugggucuaucaauaacauuacuaagcaaucggcguguguagcuaugucaaaacugcuuacggagcugaauagcgaugacaucaagaaguugagggauaacgaagaguuaaauaguccgaaaauacggguguauaacaccgucaucuccuacauugaaucuaaucgcaagaacaauaaacagacaauccaucugcugaagagacuccccgccgacgugcucaaaaagacuauuaagaacacccuggauauccacaaaagcauaacaauuaauaacccuaaggaguccaccguuucagacacuaacgaucacgccaaaaauaacgacacaaccugaggacuaguggaagcauuuuccuggcugauuaaaagaaauuacucagcuauggucaucuguuccuguuagaaggcuaugcagcauauuauauacuaugcgcauguuaugaaaugcauaauaaaaaauuuuaaaaaaucuaaaagaucuaaaaaaaaaaaaaaaaaaaaaaaaaaaaaaaaaaaaaaaaaaaaaaaaaaaaaaaaaaaaaaaaugcaucccccccccccccccccccccccccccccccaaaggcucuuuucagagccaccagaauu

SEQ ID NO: 11444 - RNA, 929 nt, Artificial Sequence
  mRNA product Design g-1 comprising derived and/or modified sequence from HRSV(A2)__P04545.1__M2-1 (opt4)
gggagacuuucccauucuguagcagaauuugguguugccuguggucuuggucccgcggagaagcuuaccaugagcagaagaaaccccugcaaguucgagaucagaggccacugccugaacggcaagagaugccacuucagccacaacuacuucgaguggcccccccacgcccugcuggugagacagaacuucaugcugaacagaauccugaagagcauggacaagagcaucgacacccugagcgagaucagcggcgccgccgagcuggacagaaccgaggaguacgcccugggcguggugggcgugcuggagagcuacaucggcagcaucaacaacaucaccaagcagagcgccugcguggccaugagcaagcugcugaccgagcugaacagcgacgacaucaagaagcugagagacaacgaggagcugaacagccccaagaucagaguguacaacaccgugaucagcuacaucgagagcaacagaaagaacaacaagcagaccauccaccugcugaagagacugcccgccgacgugcugaagaagaccaucaagaacacccuggacauccacaagagcaucaccaucaacaaccccaaggagagcaccgugagcgacaccaacgaccacgccaagaacaacgacaccaccugaggacuaguggaagcauuuuccuggcugauuaaaagaaauuacucagcuauggucaucuguuccuguuagaaggcuaugcagcauauuauauacuaugcgcauguuaugaaaugcauaauaaaaaauuuuaaaaaaucuaaaagaucuaaaaaaaaaaaaaaaaaaaaaaaaaaaaaaaaaaaaaaaaaaaaaaaaaaaaaaaaaaaaaaaaugcaucccccccccccccccccccccccccccccccaaaggcucuuuucagagccaccagaauu

SEQ ID NO: 11445 - RNA, 929 nt, Artificial Sequence
  mRNA product Design g-1 comprising derived and/or modified sequence from HRSV(A2)__P04545.1__M2-1 (opt5)
gggagacuuucccauucuguagcagaauuugguguugccuguggucuuggucccgcggagaagcuuaccaugagcagacggaaccccugcaaguucgagauccgcggccacugucugaaugggaaaagaugccauuuuucccacaacuacuucgaauggccuccgcaugcccuccuggugcggcagaauuuuaugcuuaaccgcauucugaagucuauggacaaaagcaucgauacccucuccgagauuucuggagcugccgaacuggacagaacagaggaauaugcgcuuggcgucguuggggugcuggagagcuacaucggauccauuaauaacaucacgaagcaaucugcuuguguggccaugagcaaacuccugaccgagcucaauuccgaugacaucaagaagcugcgggauaacgaggaacugaauagccccaaaauucgcgucuauaacacagugaucucuuacauugaauccaauagaaagaacaauaaacagaccauccaccuucugaagcggcucccugccgacguucugaaaaagacaauuaagaacacccuugauauccauaaaagcauuacaaucaauaaccccaaggagucuaccguguccgacacgaacgaucacgcuaaaaauaacgacaccacaugaggacuaguggaagcauuuuccuggcugauuaaaagaaauuacucagcuauggucaucuguuccuguuagaaggcuaugcagcauauuauauacuaugcgcauguuaugaaaugcauaauaaaaaauuuuaaaaaaucuaaaagaucuaaaaaaaaaaaaaaaaaaaaaaaaaaaaaaaaaaaaaaaaaaaaaaaaaaaaaaaaaaaaaaaaugcaucccccccccccccccccccccccccccccccaaaggcucuuuucagagccaccagaauu

SEQ ID NO: 11446 - RNA, 929 nt, Artificial Sequence
  mRNA product Design g-1 comprising derived and/or modified sequence from HRSV(A2)__P04545.1__M2-1 (opt6)
gggagacuuucccauucuguagcagaauuugguguugccuguggucuuggucccgcggagaagcuuaccaugucaagaagaaacccaugcaaauucgaaauaagaggacacugccuaaacggaaaaagaugccacuucucacacaacuacuucgaauggccaccacacgcacuacuuguaagacaaaacuucaugcuaaacagaauacuaaaaucaauggacaaaucaauagacacauuaucagaaauaucaggagcagcagaacucgacagaacagaagaauacgcacuaggaguaguaggaguacuagaaucauacauaggaucaauaaacaacauaacaaaacaaucagcaugcguagccauguccaaacuacuaacagaacuaaacuccgacgacauaaaaaaacuaagagacaacgaagaacuaaacucaccaaaaauaagaguauacaacacaguaauaucauacauagaaucaaacagaaaaaacaauaaacaaacaauacaccuacuaaaaagacucccagcagacguacuaaaaaaaacaauaaaaaacacacuagacauccacaaaucaauaacaauaaacaacccaaaagaaucaacagucucagacaccaacgaccacgcaaaaaacaacgacacaacauaaggacuaguggaagcauuuuccuggcugauuaaaagaaauuacucagcuauggucaucuguuccuguuagaaggcuaugcagcauauuauauacuaugcgcauguuaugaaaugcauaauaaaaaauuuuaaaaaaucuaaaagaucuaaaaaaaaaaaaaaaaaaaaaaaaaaaaaaaaaaaaaaaaaaaaaaaaaaaaaaaaaaaaaaaaugcaucccccccccccccccccccccccccccccccaaaggcucuuuucagagccaccagaauu

SEQ ID NO: 11447 - RNA, 929 nt, Artificial Sequence
  mRNA product Design g-1 comprising derived and/or modified sequence from HRSV(A2)__P04545.1__M2-1 (opt11)
gggagacuuucccauucuguagcagaauuugguguugccuguggucuuggucccgcggagaagcuuaccaugucacgacgcaaccccugcaaauucgaaauccgcggccacugccuaaacggcaaacgcugccacuucucccacaacuacuucgaauggcccccccacgcccuccuuguccgccaaaacuucaugcucaaccgcauccucaaauccauggacaaaagcaucgacacccucuccgaaaucuccggcgcagccgaacucgaccgcaccgaagaauacgcccucggcgucguaggcguccucgaauccuacaucggcucaaucaacaacaucaccaaacaauccgccugcgucgccauguccaaacuccucaccgaacucaacuccgacgacaucaaaaaacuccgcgacaacgaagaacucaacucccccaaaauccgagucuacaacaccguaaucuccuacaucgaauccaaccgcaaaaacaacaaacaaaccauccaccuacuaaaacgacuccccgccgacguccucaaaaaaacaaucaaaaacacccucgacauccacaaauccaucaccaucaacaaccccaaagaaucaaccgucuccgacaccaacgaccacgccaaaaacaacgacaccaccugaggacuaguggaagcauuuuccuggcugauuaaaagaaauuacucagcuauggucaucuguuccuguuagaaggcuaugcagcauauuauauacuaugcgcauguuaugaaaugcauaauaaaaaauuuuaaaaaaucuaaaagaucuaaaaaaaaaaaaaaaaaaaaaaaaaaaaaaaaaaaaaaaaaaaaaaaaaaaaaaaaaaaaaaaaugcaucccccccccccccccccccccccccccccccaaaggcucuuuucagagccaccagaauu

SEQ ID NO: 11448 - RNA, 944 nt, Artificial Sequence
  mRNA product Design g-2 comprising derived and/or modified sequence from HRSV(A2)__P04545.1__M2-1 (wt)
gggagaguccgcucagccagguugcagaagcggcuuagcguguguccuaaucuucucucugcguguagguaggccugugccgcaaacaagcuuaccaugucacgaaggaauccuugcaaauuugaaauucgaggucauugcuuaaaugguaagaggugucauuuuagucauaauuauuuugaauggccaccccaugcacugcuuguaagacaaaacuuuauguuaaacagaauacuuaagucuauggauaaaaguauagauaccuuaucagaaauaaguggagcugcagaguuggacagaacagaagaguaugcucuugguguaguuggagugcuagagaguuauauaggaucaauaaacaauauaacuaaacaaucagcauguguugccaugagcaaacuccucacugaacucaauagugaugauaucaaaaagcugagggacaaugaagagcuaaauucacccaagauaagaguguacaauacugucauaucauauauugaaagcaacaggaaaaacaauaaacaaacuauccaucuguuaaaaagauugccagcagacguauugaagaaaaccaucaaaaacacauuggauauccauaagagcauaaccaucaacaacccaaaagaaucaacuguuagugauacaaaugaccaugccaaaaauaaugauacuaccugaggacuaguaauaaggaaacuguaugaaugucugugggcaggaagugaagagauccuucuguaaagguuuuuggaauuaugucugcugaauaauaaacuuuuuugaaauaauaaaucugguagaaaaaugagaucuaaaaaaaaaaaaaaaaaaaaaaaaaaaaaaaaaaaaaaaaaaaaaaaaaaaaaaaaaaaaaaaaugcaucccccccccccccccccccccccccccccccaaaggcucuuuucagagccaccagaauu

SEQ ID NO: 11449 - RNA, 944 nt, Artificial Sequence
  mRNA product Design g-2 comprising derived and/or modified sequence from HRSV(A2)__P04545.1__M2-1 (opt1)
gggagaguccgcucagccagguugcagaagcggcuuagcguguguccuaaucuucucucugcguguagguaggccugugccgcaaacaagcuuaccaugagccgccggaaccccugcaaguucgagauccgcggccacugccugaacgggaagcggugccacuucucccacaacuacuucgaguggccgccccacgcccuccuggugcgccagaacuucaugcugaaccggauccucaagagcauggacaaguccaucgacacccugagcgagaucuccggcgccgcggagcuggaccgcaccgaggaguacgcccucggggucgugggcgugcuggagagcuacaucggguccaucaacaacaucacgaagcagagcgccugcgucgccauguccaagcugcucaccgagcugaacagcgacgacaucaagaagcugcgggacaacgaggagcucaacucccccaagauccgcguguacaacaccgugaucagcuacaucgaguccaaccggaagaacaacaagcagaccauccaccuccugaagcgccugcccgccgacguccugaagaagacgaucaagaacacccuggacauccacaagagcaucaccaucaacaacccgaaggaguccaccgugagcgacacgaacgaccacgcgaagaacaacgacaccaccugaggacuaguaauaaggaaacuguaugaaugucugugggcaggaagugaagagauccuucuguaaagguuuuuggaauuaugucugcugaauaauaaacuuuuuugaaauaauaaaucugguagaaaaaugagaucuaaaaaaaaaaaaaaaaaaaaaaaaaaaaaaaaaaaaaaaaaaaaaaaaaaaaaaaaaaaaaaaaugcaucccccccccccccccccccccccccccccccaaaggcucuuuucagagccaccagaauu

SEQ ID NO: 11450 - RNA, 944 nt, Artificial Sequence
  mRNA product Design g-2 comprising derived and/or modified sequence from HRSV(A2)__P04545.1__M2-1 (opt2)
gggagaguccgcucagccagguugcagaagcggcuuagcguguguccuaaucuucucucugcguguagguaggccugugccgcaaacaagcuuaccaugucccgccgcaaccccugcaaguucgagauccgcggccacugccucaacggcaagcgcugccacuucucccacaacuacuucgaguggcccccccacgcccuccucguccgccagaacuucaugcucaaccgcauccucaaguccauggacaaguccaucgacacccucuccgagaucuccggcgccgccgagcucgaccgcaccgaggaguacgcccucggcgucgucggcguccucgaguccuacaucggcuccaucaacaacaucaccaagcaguccgccugcgucgccauguccaagcuccucaccgagcucaacuccgacgacaucaagaagcuccgcgacaacgaggagcucaacucccccaagauccgcgucuacaacaccgucaucuccuacaucgaguccaaccgcaagaacaacaagcagaccauccaccuccucaagcgccuccccgccgacguccucaagaagaccaucaagaacacccucgacauccacaaguccaucaccaucaacaaccccaaggaguccaccgucuccgacaccaacgaccacgccaagaacaacgacaccaccugaggacuaguaauaaggaaacuguaugaaugucugugggcaggaagugaagagauccuucuguaaagguuuuuggaauuaugucugcugaauaauaaacuuuuuugaaauaauaaaucugguagaaaaaugagaucuaaaaaaaaaaaaaaaaaaaaaaaaaaaaaaaaaaaaaaaaaaaaaaaaaaaaaaaaaaaaaaaaugcaucccccccccccccccccccccccccccccccaaaggcucuuuucagagccaccagaauu

SEQ ID NO: 11451 - RNA, 944 nt, Artificial Sequence
  mRNA product Design g-2 comprising derived and/or modified sequence from HRSV(A2)__P04545.1__M2-1 (opt3)
gggagaguccgcucagccagguugcagaagcggcuuagcguguguccuaaucuucucucugcguguagguaggccugugccgcaaacaagcuuaccaugagcagaaggaaccccugcaaguucgagauccggggccacugucugaaugggaaacgcugccauuuuucccacaacuacuucgaauggccuccacaugcacuccuugugcgacagaauuuuaugcugaaccguauuuugaagucuauggacaaaucaauagauaccuuaagugagaucagcggagcugcagaacuggacagaacagaggaauaugcccuaggugucguuggcgugcucgaguccuacauugggucuaucaauaacauuacuaagcaaucggcguguguagcuaugucaaaacugcuuacggagcugaauagcgaugacaucaagaaguugagggauaacgaagaguuaaauaguccgaaaauacggguguauaacaccgucaucuccuacauugaaucuaaucgcaagaacaauaaacagacaauccaucugcugaagagacuccccgccgacgugcucaaaaagacuauuaagaacacccuggauauccacaaaagcauaacaauuaauaacccuaaggaguccaccguuucagacacuaacgaucacgccaaaaauaacgacacaaccugaggacuaguaauaaggaaacuguaugaaugucugugggcaggaagugaagagauccuucuguaaagguuuuuggaauuaugucugcugaauaauaaacuuuuuugaaauaauaaaucugguagaaaaaugagaucuaaaaaaaaaaaaaaaaaaaaaaaaaaaaaaaaaaaaaaaaaaaaaaaaaaaaaaaaaaaaaaaaugcaucccccccccccccccccccccccccccccccaaaggcucuuuucagagccaccagaauu

SEQ ID NO: 11452 - RNA, 944 nt, Artificial Sequence
  mRNA product Design g-2 comprising derived and/or modified sequence from HRSV(A2)__P04545.1__M2-1 (opt4)
gggagaguccgcucagccagguugcagaagcggcuuagcguguguccuaaucuucucucugcguguagguaggccugugccgcaaacaagcuuaccaugagcagaagaaaccccugcaaguucgagaucagaggccacugccugaacggcaagagaugccacuucagccacaacuacuucgaguggcccccccacgcccugcuggugagacagaacuucaugcugaacagaauccugaagagcauggacaagagcaucgacacccugagcgagaucagcggcgccgccgagcuggacagaaccgaggaguacgcccugggcguggugggcgugcuggagagcuacaucggcagcaucaacaacaucaccaagcagagcgccugcguggccaugagcaagcugcugaccgagcugaacagcgacgacaucaagaagcugagagacaacgaggagcugaacagccccaagaucagaguguacaacaccgugaucagcuacaucgagagcaacagaaagaacaacaagcagaccauccaccugcugaagagacugcccgccgacgugcugaagaagaccaucaagaacacccuggacauccacaagagcaucaccaucaacaaccccaaggagagcaccgugagcgacaccaacgaccacgccaagaacaacgacaccaccugaggacuaguaauaaggaaacuguaugaaugucugugggcaggaagugaagagauccuucuguaaagguuuuuggaauuaugucugcugaauaauaaacuuuuuugaaauaauaaaucugguagaaaaaugagaucuaaaaaaaaaaaaaaaaaaaaaaaaaaaaaaaaaaaaaaaaaaaaaaaaaaaaaaaaaaaaaaaaugcaucccccccccccccccccccccccccccccccaaaggcucuuuucagagccaccagaauu

SEQ ID NO: 11453 - RNA, 944 nt, Artificial Sequence
  mRNA product Design g-2 comprising derived and/or modified sequence from HRSV(A2)__P04545.1__M2-1 (opt5)
gggagaguccgcucagccagguugcagaagcggcuuagcguguguccuaaucuucucucugcguguagguaggccugugccgcaaacaagcuuaccaugagcagacggaaccccugcaaguucgagauccgcggccacugucugaaugggaaaagaugccauuuuucccacaacuacuucgaauggccuccgcaugcccuccuggugcggcagaauuuuaugcuuaaccgcauucugaagucuauggacaaaagcaucgauacccucuccgagauuucuggagcugccgaacuggacagaacagaggaauaugcgcuuggcgucguuggggugcuggagagcuacaucggauccauuaauaacaucacgaagcaaucugcuuguguggccaugagcaaacuccugaccgagcucaauuccgaugacaucaagaagcugcgggauaacgaggaacugaauagccccaaaauucgcgucuauaacacagugaucucuuacauugaauccaauagaaagaacaauaaacagaccauccaccuucugaagcggcucccugccgacguucugaaaaagacaauuaagaacacccuugauauccauaaaagcauuacaaucaauaaccccaaggagucuaccguguccgacacgaacgaucacgcuaaaaauaacgacaccacaugaggacuaguaauaaggaaacuguaugaaugucugugggcaggaagugaagagauccuucuguaaagguuuuuggaauuaugucugcugaauaauaaacuuuuuugaaauaauaaaucugguagaaaaaugagaucuaaaaaaaaaaaaaaaaaaaaaaaaaaaaaaaaaaaaaaaaaaaaaaaaaaaaaaaaaaaaaaaaugcaucccccccccccccccccccccccccccccccaaaggcucuuuucagagccaccagaauu

SEQ ID NO: 11454 - RNA, 944 nt, Artificial Sequence
  mRNA product Design g-2 comprising derived and/or modified sequence from HRSV(A2)__P04545.1__M2-1 (opt6)
gggagaguccgcucagccagguugcagaagcggcuuagcguguguccuaaucuucucucugcguguagguaggccugugccgcaaacaagcuuaccaugucaagaagaaacccaugcaaauucgaaauaagaggacacugccuaaacggaaaaagaugccacuucucacacaacuacuucgaauggccaccacacgcacuacuuguaagacaaaacuucaugcuaaacagaauacuaaaaucaauggacaaaucaauagacacauuaucagaaauaucaggagcagcagaacucgacagaacagaagaauacgcacuaggaguaguaggaguacuagaaucauacauaggaucaauaaacaacauaacaaaacaaucagcaugcguagccauguccaaacuacuaacagaacuaaacuccgacgacauaaaaaaacuaagagacaacgaagaacuaaacucaccaaaaauaagaguauacaacacaguaauaucauacauagaaucaaacagaaaaaacaauaaacaaacaauacaccuacuaaaaagacucccagcagacguacuaaaaaaaacaauaaaaaacacacuagacauccacaaaucaauaacaauaaacaacccaaaagaaucaacagucucagacaccaacgaccacgcaaaaaacaacgacacaacauaaggacuaguaauaaggaaacuguaugaaugucugugggcaggaagugaagagauccuucuguaaagguuuuuggaauuaugucugcugaauaauaaacuuuuuugaaauaauaaaucugguagaaaaaugagaucuaaaaaaaaaaaaaaaaaaaaaaaaaaaaaaaaaaaaaaaaaaaaaaaaaaaaaaaaaaaaaaaaugcaucccccccccccccccccccccccccccccccaaaggcucuuuucagagccaccagaauu

SEQ ID NO: 11455 - RNA, 944 nt, Artificial Sequence
  mRNA product Design g-2 comprising derived and/or modified sequence from HRSV(A2)__P04545.1__M2-1 (opt11)
gggagaguccgcucagccagguugcagaagcggcuuagcguguguccuaaucuucucucugcguguagguaggccugugccgcaaacaagcuuaccaugucacgacgcaaccccugcaaauucgaaauccgcggccacugccuaaacggcaaacgcugccacuucucccacaacuacuucgaauggcccccccacgcccuccuuguccgccaaaacuucaugcucaaccgcauccucaaauccauggacaaaagcaucgacacccucuccgaaaucuccggcgcagccgaacucgaccgcaccgaagaauacgcccucggcgucguaggcguccucgaauccuacaucggcucaaucaacaacaucaccaaacaauccgccugcgucgccauguccaaacuccucaccgaacucaacuccgacgacaucaaaaaacuccgcgacaacgaagaacucaacucccccaaaauccgagucuacaacaccguaaucuccuacaucgaauccaaccgcaaaaacaacaaacaaaccauccaccuacuaaaacgacuccccgccgacguccucaaaaaaacaaucaaaaacacccucgacauccacaaauccaucaccaucaacaaccccaaagaaucaaccgucuccgacaccaacgaccacgccaaaaacaacgacaccaccugaggacuaguaauaaggaaacuguaugaaugucugugggcaggaagugaagagauccuucuguaaagguuuuuggaauuaugucugcugaauaauaaacuuuuuugaaauaauaaaucugguagaaaaaugagaucuaaaaaaaaaaaaaaaaaaaaaaaaaaaaaaaaaaaaaaaaaaaaaaaaaaaaaaaaaaaaaaaaugcaucccccccccccccccccccccccccccccccaaaggcucuuuucagagccaccagaauu

SEQ ID NO: 11456 - RNA, 1176 nt, Artificial Sequence
  mRNA product Design g-3 comprising derived and/or modified sequence from HRSV(A2)__P04545.1__M2-1 (wt)
gggagaguccgcucagccagguugcagaagcggcuuagcguguguccuaaucuucucucugcguguagguaggccugugccgcaaacaagcuuaccaugucacgaaggaauccuugcaaauuugaaauucgaggucauugcuuaaaugguaagaggugucauuuuagucauaauuauuuugaauggccaccccaugcacugcuuguaagacaaaacuuuauguuaaacagaauacuuaagucuauggauaaaaguauagauaccuuaucagaaauaaguggagcugcagaguuggacagaacagaagaguaugcucuugguguaguuggagugcuagagaguuauauaggaucaauaaacaauauaacuaaacaaucagcauguguugccaugagcaaacuccucacugaacucaauagugaugauaucaaaaagcugagggacaaugaagagcuaaauucacccaagauaagaguguacaauacugucauaucauauauugaaagcaacaggaaaaacaauaaacaaacuauccaucuguuaaaaagauugccagcagacguauugaagaaaaccaucaaaaacacauuggauauccauaagagcauaaccaucaacaacccaaaagaaucaacuguuagugauacaaaugaccaugccaaaaauaaugauacuaccugaggacuagugaagggaacacccaaauuuaauucagccuuaagcacaauuaauuaagagugaaacguaauuguacaagcaguuggucacccaccauagggcaugaucaacaccgcaaccuuuccuuuuucccccagugauucugaaaaaccccucuucccuucagcuugcuuagauguuccaaauuuaguaagcuuaaggcggccuacagaagaaaaagaaaaaaaaggccacaaaaguucccucucacuuucaguaaauaaaauaaaagcagcaacagaaauaaagaaauaaaugaaauucaaaaugaaauaaauauuguguugugcagcauuaaaaaaucaauaaaaauuaaaaaugagcaagaucuaaaaaaaaaaaaaaaaaaaaaaaaaaaaaaaaaaaaaaaaaaaaaaaaaaaaaaaaaaaaaaaaugcaucccccccccccccccccccccccccccccccaaaggcucuuuucagagccaccagaauu

SEQ ID NO: 11457 - RNA, 1176 nt, Artificial Sequence
  mRNA product Design g-3 comprising derived and/or modified sequence from HRSV(A2)__P04545.1__M2-1 (opt1)
gggagaguccgcucagccagguugcagaagcggcuuagcguguguccuaaucuucucucugcguguagguaggccugugccgcaaacaagcuuaccaugagccgccggaaccccugcaaguucgagauccgcggccacugccugaacgggaagcggugccacuucucccacaacuacuucgaguggccgccccacgcccuccuggugcgccagaacuucaugcugaaccggauccucaagagcauggacaaguccaucgacacccugagcgagaucuccggcgccgcggagcuggaccgcaccgaggaguacgcccucggggucgugggcgugcuggagagcuacaucggguccaucaacaacaucacgaagcagagcgccugcgucgccauguccaagcugcucaccgagcugaacagcgacgacaucaagaagcugcgggacaacgaggagcucaacucccccaagauccgcguguacaacaccgugaucagcuacaucgaguccaaccggaagaacaacaagcagaccauccaccuccugaagcgccugcccgccgacguccugaagaagacgaucaagaacacccuggacauccacaagagcaucaccaucaacaacccgaaggaguccaccgugagcgacacgaacgaccacgcgaagaacaacgacaccaccugaggacuagugaagggaacacccaaauuuaauucagccuuaagcacaauuaauuaagagugaaacguaauuguacaagcaguuggucacccaccauagggcaugaucaacaccgcaaccuuuccuuuuucccccagugauucugaaaaaccccucuucccuucagcuugcuuagauguuccaaauuuaguaagcuuaaggcggccuacagaagaaaaagaaaaaaaaggccacaaaaguucccucucacuuucaguaaauaaaauaaaagcagcaacagaaauaaagaaauaaaugaaauucaaaaugaaauaaauauuguguugugcagcauuaaaaaaucaauaaaaauuaaaaaugagcaagaucuaaaaaaaaaaaaaaaaaaaaaaaaaaaaaaaaaaaaaaaaaaaaaaaaaaaaaaaaaaaaaaaaugcaucccccccccccccccccccccccccccccccaaaggcucuuuucagagccaccagaauu

SEQ ID NO: 11458 - RNA, 1176 nt, Artificial Sequence
  mRNA product Design g-3 comprising derived and/or modified sequence from HRSV(A2)__P04545.1__M2-1 (opt2)
gggagaguccgcucagccagguugcagaagcggcuuagcguguguccuaaucuucucucugcguguagguaggccugugccgcaaacaagcuuaccaugucccgccgcaaccccugcaaguucgagauccgcggccacugccucaacggcaagcgcugccacuucucccacaacuacuucgaguggcccccccacgcccuccucguccgccagaacuucaugcucaaccgcauccucaaguccauggacaaguccaucgacacccucuccgagaucuccggcgccgccgagcucgaccgcaccgaggaguacgcccucggcgucgucggcguccucgaguccuacaucggcuccaucaacaacaucaccaagcaguccgccugcgucgccauguccaagcuccucaccgagcucaacuccgacgacaucaagaagcuccgcgacaacgaggagcucaacucccccaagauccgcgucuacaacaccgucaucuccuacaucgaguccaaccgcaagaacaacaagcagaccauccaccuccucaagcgccuccccgccgacguccucaagaagaccaucaagaacacccucgacauccacaaguccaucaccaucaacaaccccaaggaguccaccgucuccgacaccaacgaccacgccaagaacaacgacaccaccugaggacuagugaagggaacacccaaauuuaauucagccuuaagcacaauuaauuaagagugaaacguaauuguacaagcaguuggucacccaccauagggcaugaucaacaccgcaaccuuuccuuuuucccccagugauucugaaaaaccccucuucccuucagcuugcuuagauguuccaaauuuaguaagcuuaaggcggccuacagaagaaaaagaaaaaaaaggccacaaaaguucccucucacuuucaguaaauaaaauaaaagcagcaacagaaauaaagaaauaaaugaaauucaaaaugaaauaaauauuguguugugcagcauuaaaaaaucaauaaaaauuaaaaaugagcaagaucuaaaaaaaaaaaaaaaaaaaaaaaaaaaaaaaaaaaaaaaaaaaaaaaaaaaaaaaaaaaaaaaaugcaucccccccccccccccccccccccccccccccaaaggcucuuuucagagccaccagaauu

SEQ ID NO: 11459 - RNA, 1176 nt, Artificial Sequence
  mRNA product Design g-3 comprising derived and/or modified sequence from HRSV(A2)__P04545.1__M2-1 (opt3)
gggagaguccgcucagccagguugcagaagcggcuuagcguguguccuaaucuucucucugcguguagguaggccugugccgcaaacaagcuuaccaugagcagaaggaaccccugcaaguucgagauccggggccacugucugaaugggaaacgcugccauuuuucccacaacuacuucgaauggccuccacaugcacuccuugugcgacagaauuuuaugcugaaccguauuuugaagucuauggacaaaucaauagauaccuuaagugagaucagcggagcugcagaacuggacagaacagaggaauaugcccuaggugucguuggcgugcucgaguccuacauugggucuaucaauaacauuacuaagcaaucggcguguguagcuaugucaaaacugcuuacggagcugaauagcgaugacaucaagaaguugagggauaacgaagaguuaaauaguccgaaaauacggguguauaacaccgucaucuccuacauugaaucuaaucgcaagaacaauaaacagacaauccaucugcugaagagacuccccgccgacgugcucaaaaagacuauuaagaacacccuggauauccacaaaagcauaacaauuaauaacccuaaggaguccaccguuucagacacuaacgaucacgccaaaaauaacgacacaaccugaggacuagugaagggaacacccaaauuuaauucagccuuaagcacaauuaauuaagagugaaacguaauuguacaagcaguuggucacccaccauagggcaugaucaacaccgcaaccuuuccuuuuucccccagugauucugaaaaaccccucuucccuucagcuugcuuagauguuccaaauuuaguaagcuuaaggcggccuacagaagaaaaagaaaaaaaaggccacaaaaguucccucucacuuucaguaaauaaaauaaaagcagcaacagaaauaaagaaauaaaugaaauucaaaaugaaauaaauauuguguugugcagcauuaaaaaaucaauaaaaauuaaaaaugagcaagaucuaaaaaaaaaaaaaaaaaaaaaaaaaaaaaaaaaaaaaaaaaaaaaaaaaaaaaaaaaaaaaaaaugcaucccccccccccccccccccccccccccccccaaaggcucuuuucagagccaccagaauu

SEQ ID NO: 11460 - RNA, 1176 nt, Artificial Sequence
  mRNA product Design g-3 comprising derived and/or modified sequence from HRSV(A2)__P04545.1__M2-1 (opt4)
gggagaguccgcucagccagguugcagaagcggcuuagcguguguccuaaucuucucucugcguguagguaggccugugccgcaaacaagcuuaccaugagcagaagaaaccccugcaaguucgagaucagaggccacugccugaacggcaagagaugccacuucagccacaacuacuucgaguggcccccccacgcccugcuggugagacagaacuucaugcugaacagaauccugaagagcauggacaagagcaucgacacccugagcgagaucagcggcgccgccgagcuggacagaaccgaggaguacgcccugggcguggugggcgugcuggagagcuacaucggcagcaucaacaacaucaccaagcagagcgccugcguggccaugagcaagcugcugaccgagcugaacagcgacgacaucaagaagcugagagacaacgaggagcugaacagccccaagaucagaguguacaacaccgugaucagcuacaucgagagcaacagaaagaacaacaagcagaccauccaccugcugaagagacugcccgccgacgugcugaagaagaccaucaagaacacccuggacauccacaagagcaucaccaucaacaaccccaaggagagcaccgugagcgacaccaacgaccacgccaagaacaacgacaccaccugaggacuagugaagggaacacccaaauuuaauucagccuuaagcacaauuaauuaagagugaaacguaauuguacaagcaguuggucacccaccauagggcaugaucaacaccgcaaccuuuccuuuuucccccagugauucugaaaaaccccucuucccuucagcuugcuuagauguuccaaauuuaguaagcuuaaggcggccuacagaagaaaaagaaaaaaaaggccacaaaaguucccucucacuuucaguaaauaaaauaaaagcagcaacagaaauaaagaaauaaaugaaauucaaaaugaaauaaauauuguguugugcagcauuaaaaaaucaauaaaaauuaaaaaugagcaagaucuaaaaaaaaaaaaaaaaaaaaaaaaaaaaaaaaaaaaaaaaaaaaaaaaaaaaaaaaaaaaaaaaugcaucccccccccccccccccccccccccccccccaaaggcucuuuucagagccaccagaauu

SEQ ID NO: 11461 - RNA, 1176 nt, Artificial Sequence
  mRNA product Design g-3 comprising derived and/or modified sequence from HRSV(A2)__P04545.1__M2-1 (opt5)
gggagaguccgcucagccagguugcagaagcggcuuagcguguguccuaaucuucucucugcguguagguaggccugugccgcaaacaagcuuaccaugagcagacggaaccccugcaaguucgagauccgcggccacugucugaaugggaaaagaugccauuuuucccacaacuacuucgaauggccuccgcaugcccuccuggugcggcagaauuuuaugcuuaaccgcauucugaagucuauggacaaaagcaucgauacccucuccgagauuucuggagcugccgaacuggacagaacagaggaauaugcgcuuggcgucguuggggugcuggagagcuacaucggauccauuaauaacaucacgaagcaaucugcuuguguggccaugagcaaacuccugaccgagcucaauuccgaugacaucaagaagcugcgggauaacgaggaacugaauagccccaaaauucgcgucuauaacacagugaucucuuacauugaauccaauagaaagaacaauaaacagaccauccaccuucugaagcggcucccugccgacguucugaaaaagacaauuaagaacacccuugauauccauaaaagcauuacaaucaauaaccccaaggagucuaccguguccgacacgaacgaucacgcuaaaaauaacgacaccacaugaggacuagugaagggaacacccaaauuuaauucagccuuaagcacaauuaauuaagagugaaacguaauuguacaagcaguuggucacccaccauagggcaugaucaacaccgcaaccuuuccuuuuucccccagugauucugaaaaaccccucuucccuucagcuugcuuagauguuccaaauuuaguaagcuuaaggcggccuacagaagaaaaagaaaaaaaaggccacaaaaguucccucucacuuucaguaaauaaaauaaaagcagcaacagaaauaaagaaauaaaugaaauucaaaaugaaauaaauauuguguugugcagcauuaaaaaaucaauaaaaauuaaaaaugagcaagaucuaaaaaaaaaaaaaaaaaaaaaaaaaaaaaaaaaaaaaaaaaaaaaaaaaaaaaaaaaaaaaaaaugcaucccccccccccccccccccccccccccccccaaaggcucuuuucagagccaccagaauu

SEQ ID NO: 11462 - RNA, 1176 nt, Artificial Sequence
  mRNA product Design g-3 comprising derived and/or modified sequence from HRSV(A2)__P04545.1__M2-1 (opt6)
gggagaguccgcucagccagguugcagaagcggcuuagcguguguccuaaucuucucucugcguguagguaggccugugccgcaaacaagcuuaccaugucaagaagaaacccaugcaaauucgaaauaagaggacacugccuaaacggaaaaagaugccacuucucacacaacuacuucgaauggccaccacacgcacuacuuguaagacaaaacuucaugcuaaacagaauacuaaaaucaauggacaaaucaauagacacauuaucagaaauaucaggagcagcagaacucgacagaacagaagaauacgcacuaggaguaguaggaguacuagaaucauacauaggaucaauaaacaacauaacaaaacaaucagcaugcguagccauguccaaacuacuaacagaacuaaacuccgacgacauaaaaaaacuaagagacaacgaagaacuaaacucaccaaaaauaagaguauacaacacaguaauaucauacauagaaucaaacagaaaaaacaauaaacaaacaauacaccuacuaaaaagacucccagcagacguacuaaaaaaaacaauaaaaaacacacuagacauccacaaaucaauaacaauaaacaacccaaaagaaucaacagucucagacaccaacgaccacgcaaaaaacaacgacacaacauaaggacuagugaagggaacacccaaauuuaauucagccuuaagcacaauuaauuaagagugaaacguaauuguacaagcaguuggucacccaccauagggcaugaucaacaccgcaaccuuuccuuuuucccccagugauucugaaaaaccccucuucccuucagcuugcuuagauguuccaaauuuaguaagcuuaaggcggccuacagaagaaaaagaaaaaaaaggccacaaaaguucccucucacuuucaguaaauaaaauaaaagcagcaacagaaauaaagaaauaaaugaaauucaaaaugaaauaaauauuguguugugcagcauuaaaaaaucaauaaaaauuaaaaaugagcaagaucuaaaaaaaaaaaaaaaaaaaaaaaaaaaaaaaaaaaaaaaaaaaaaaaaaaaaaaaaaaaaaaaaugcaucccccccccccccccccccccccccccccccaaaggcucuuuucagagccaccagaauu

SEQ ID NO: 11463 - RNA, 1176 nt, Artificial Sequence
  mRNA product Design g-3 comprising derived and/or modified sequence from HRSV(A2)__P04545.1__M2-1 (opt11)
gggagaguccgcucagccagguugcagaagcggcuuagcguguguccuaaucuucucucugcguguagguaggccugugccgcaaacaagcuuaccaugucacgacgcaaccccugcaaauucgaaauccgcggccacugccuaaacggcaaacgcugccacuucucccacaacuacuucgaauggcccccccacgcccuccuuguccgccaaaacuucaugcucaaccgcauccucaaauccauggacaaaagcaucgacacccucuccgaaaucuccggcgcagccgaacucgaccgcaccgaagaauacgcccucggcgucguaggcguccucgaauccuacaucggcucaaucaacaacaucaccaaacaauccgccugcgucgccauguccaaacuccucaccgaacucaacuccgacgacaucaaaaaacuccgcgacaacgaagaacucaacucccccaaaauccgagucuacaacaccguaaucuccuacaucgaauccaaccgcaaaaacaacaaacaaaccauccaccuacuaaaacgacuccccgccgacguccucaaaaaaacaaucaaaaacacccucgacauccacaaauccaucaccaucaacaaccccaaagaaucaaccgucuccgacaccaacgaccacgccaaaaacaacgacaccaccugaggacuagugaagggaacacccaaauuuaauucagccuuaagcacaauuaauuaagagugaaacguaauuguacaagcaguuggucacccaccauagggcaugaucaacaccgcaaccuuuccuuuuucccccagugauucugaaaaaccccucuucccuucagcuugcuuagauguuccaaauuuaguaagcuuaaggcggccuacagaagaaaaagaaaaaaaaggccacaaaaguucccucucacuuucaguaaauaaaauaaaagcagcaacagaaauaaagaaauaaaugaaauucaaaaugaaauaaauauuguguugugcagcauuaaaaaaucaauaaaaauuaaaaaugagcaagaucuaaaaaaaaaaaaaaaaaaaaaaaaaaaaaaaaaaaaaaaaaaaaaaaaaaaaaaaaaaaaaaaaugcaucccccccccccccccccccccccccccccccaaaggcucuuuucagagccaccagaauu

SEQ ID NO: 11464 - RNA, 971 nt, Artificial Sequence
  mRNA product Design g-4 comprising derived and/or modified sequence from HRSV(A2)__P04545.1__M2-1 (wt)
gggagacuccugucgggcggaaguaggaggaguagaguuuaaaaacaguacucuuuuuccgguucgggacguaguugaagcaacgacaagccggauaaccgcucuugagacaggaagcuuaccaugucacgaaggaauccuugcaaauuugaaauucgaggucauugcuuaaaugguaagaggugucauuuuagucauaauuauuuugaauggccaccccaugcacugcuuguaagacaaaacuuuauguuaaacagaauacuuaagucuauggauaaaaguauagauaccuuaucagaaauaaguggagcugcagaguuggacagaacagaagaguaugcucuugguguaguuggagugcuagagaguuauauaggaucaauaaacaauauaacuaaacaaucagcauguguugccaugagcaaacuccucacugaacucaauagugaugauaucaaaaagcugagggacaaugaagagcuaaauucacccaagauaagaguguacaauacugucauaucauauauugaaagcaacaggaaaaacaauaaacaaacuauccaucuguuaaaaagauugccagcagacguauugaagaaaaccaucaaaaacacauuggauauccauaagagcauaaccaucaacaacccaaaagaaucaacuguuagugauacaaaugaccaugccaaaaauaaugauacuaccugaggacuaguaauaaggaaacuguaugaaugucugugggcaggaagugaagagauccuucuguaaagguuuuuggaauuaugucugcugaauaauaaacuuuuuugaaauaauaaaucugguagaaaaaugagaucuaaaaaaaaaaaaaaaaaaaaaaaaaaaaaaaaaaaaaaaaaaaaaaaaaaaaaaaaaaaaaaaaugcaucccccccccccccccccccccccccccccccaaaggcucuuuucagagccaccagaauu

SEQ ID NO: 11465 - RNA, 971 nt, Artificial Sequence
  mRNA product Design g-4 comprising derived and/or modified sequence from HRSV(A2)__P04545.1__M2-1 (opt1)
gggagacuccugucgggcggaaguaggaggaguagaguuuaaaaacaguacucuuuuuccgguucgggacguaguugaagcaacgacaagccggauaaccgcucuugagacaggaagcuuaccaugagccgccggaaccccugcaaguucgagauccgcggccacugccugaacgggaagcggugccacuucucccacaacuacuucgaguggccgccccacgcccuccuggugcgccagaacuucaugcugaaccggauccucaagagcauggacaaguccaucgacacccugagcgagaucuccggcgccgcggagcuggaccgcaccgaggaguacgcccucggggucgugggcgugcuggagagcuacaucggguccaucaacaacaucacgaagcagagcgccugcgucgccauguccaagcugcucaccgagcugaacagcgacgacaucaagaagcugcgggacaacgaggagcucaacucccccaagauccgcguguacaacaccgugaucagcuacaucgaguccaaccggaagaacaacaagcagaccauccaccuccugaagcgccugcccgccgacguccugaagaagacgaucaagaacacccuggacauccacaagagcaucaccaucaacaacccgaaggaguccaccgugagcgacacgaacgaccacgcgaagaacaacgacaccaccugaggacuaguaauaaggaaacuguaugaaugucugugggcaggaagugaagagauccuucuguaaagguuuuuggaauuaugucugcugaauaauaaacuuuuuugaaauaauaaaucugguagaaaaaugagaucuaaaaaaaaaaaaaaaaaaaaaaaaaaaaaaaaaaaaaaaaaaaaaaaaaaaaaaaaaaaaaaaaugcaucccccccccccccccccccccccccccccccaaaggcucuuuucagagccaccagaauu

SEQ ID NO: 11466 - RNA, 971 nt, Artificial Sequence
  mRNA product Design g-4 comprising derived and/or modified sequence from HRSV(A2)__P04545.1__M2-1 (opt2)
gggagacuccugucgggcggaaguaggaggaguagaguuuaaaaacaguacucuuuuuccgguucgggacguaguugaagcaacgacaagccggauaaccgcucuugagacaggaagcuuaccaugucccgccgcaaccccugcaaguucgagauccgcggccacugccucaacggcaagcgcugccacuucucccacaacuacuucgaguggcccccccacgcccuccucguccgccagaacuucaugcucaaccgcauccucaaguccauggacaaguccaucgacacccucuccgagaucuccggcgccgccgagcucgaccgcaccgaggaguacgcccucggcgucgucggcguccucgaguccuacaucggcuccaucaacaacaucaccaagcaguccgccugcgucgccauguccaagcuccucaccgagcucaacuccgacgacaucaagaagcuccgcgacaacgaggagcucaacucccccaagauccgcgucuacaacaccgucaucuccuacaucgaguccaaccgcaagaacaacaagcagaccauccaccuccucaagcgccuccccgccgacguccucaagaagaccaucaagaacacccucgacauccacaaguccaucaccaucaacaaccccaaggaguccaccgucuccgacaccaacgaccacgccaagaacaacgacaccaccugaggacuaguaauaaggaaacuguaugaaugucugugggcaggaagugaagagauccuucuguaaagguuuuuggaauuaugucugcugaauaauaaacuuuuuugaaauaauaaaucugguagaaaaaugagaucuaaaaaaaaaaaaaaaaaaaaaaaaaaaaaaaaaaaaaaaaaaaaaaaaaaaaaaaaaaaaaaaaugcaucccccccccccccccccccccccccccccccaaaggcucuuuucagagccaccagaauu

SEQ ID NO: 11467 - RNA, 971 nt, Artificial Sequence
  mRNA product Design g-4 comprising derived and/or modified sequence from HRSV(A2)__P04545.1__M2-1 (opt3)
gggagacuccugucgggcggaaguaggaggaguagaguuuaaaaacaguacucuuuuuccgguucgggacguaguugaagcaacgacaagccggauaaccgcucuugagacaggaagcuuaccaugagcagaaggaaccccugcaaguucgagauccggggccacugucugaaugggaaacgcugccauuuuucccacaacuacuucgaauggccuccacaugcacuccuugugcgacagaauuuuaugcugaaccguauuuugaagucuauggacaaaucaauagauaccuuaagugagaucagcggagcugcagaacuggacagaacagaggaauaugcccuaggugucguuggcgugcucgaguccuacauugggucuaucaauaacauuacuaagcaaucggcguguguagcuaugucaaaacugcuuacggagcugaauagcgaugacaucaagaaguugagggauaacgaagaguuaaauaguccgaaaauacggguguauaacaccgucaucuccuacauugaaucuaaucgcaagaacaauaaacagacaauccaucugcugaagagacuccccgccgacgugcucaaaaagacuauuaagaacacccuggauauccacaaaagcauaacaauuaauaacccuaaggaguccaccguuucagacacuaacgaucacgccaaaaauaacgacacaaccugaggacuaguaauaaggaaacuguaugaaugucugugggcaggaagugaagagauccuucuguaaagguuuuuggaauuaugucugcugaauaauaaacuuuuuugaaauaauaaaucugguagaaaaaugagaucuaaaaaaaaaaaaaaaaaaaaaaaaaaaaaaaaaaaaaaaaaaaaaaaaaaaaaaaaaaaaaaaaugcaucccccccccccccccccccccccccccccccaaaggcucuuuucagagccaccagaauu

SEQ ID NO: 11468 - RNA, 971 nt, Artificial Sequence
  mRNA product Design g-4 comprising derived and/or modified sequence from HRSV(A2)__P04545.1__M2-1 (opt4)
gggagacuccugucgggcggaaguaggaggaguagaguuuaaaaacaguacucuuuuuccgguucgggacguaguugaagcaacgacaagccggauaaccgcucuugagacaggaagcuuaccaugagcagaagaaaccccugcaaguucgagaucagaggccacugccugaacggcaagagaugccacuucagccacaacuacuucgaguggcccccccacgcccugcuggugagacagaacuucaugcugaacagaauccugaagagcauggacaagagcaucgacacccugagcgagaucagcggcgccgccgagcuggacagaaccgaggaguacgcccugggcguggugggcgugcuggagagcuacaucggcagcaucaacaacaucaccaagcagagcgccugcguggccaugagcaagcugcugaccgagcugaacagcgacgacaucaagaagcugagagacaacgaggagcugaacagccccaagaucagaguguacaacaccgugaucagcuacaucgagagcaacagaaagaacaacaagcagaccauccaccugcugaagagacugcccgccgacgugcugaagaagaccaucaagaacacccuggacauccacaagagcaucaccaucaacaaccccaaggagagcaccgugagcgacaccaacgaccacgccaagaacaacgacaccaccugaggacuaguaauaaggaaacuguaugaaugucugugggcaggaagugaagagauccuucuguaaagguuuuuggaauuaugucugcugaauaauaaacuuuuuugaaauaauaaaucugguagaaaaaugagaucuaaaaaaaaaaaaaaaaaaaaaaaaaaaaaaaaaaaaaaaaaaaaaaaaaaaaaaaaaaaaaaaaugcaucccccccccccccccccccccccccccccccaaaggcucuuuucagagccaccagaauu

SEQ ID NO: 11469 - RNA, 971 nt, Artificial Sequence
  mRNA product Design g-4 comprising derived and/or modified sequence from HRSV(A2)__P04545.1__M2-1 (opt5)
gggagacuccugucgggcggaaguaggaggaguagaguuuaaaaacaguacucuuuuuccgguucgggacguaguugaagcaacgacaagccggauaaccgcucuugagacaggaagcuuaccaugagcagacggaaccccugcaaguucgagauccgcggccacugucugaaugggaaaagaugccauuuuucccacaacuacuucgaauggccuccgcaugcccuccuggugcggcagaauuuuaugcuuaaccgcauucugaagucuauggacaaaagcaucgauacccucuccgagauuucuggagcugccgaacuggacagaacagaggaauaugcgcuuggcgucguuggggugcuggagagcuacaucggauccauuaauaacaucacgaagcaaucugcuuguguggccaugagcaaacuccugaccgagcucaauuccgaugacaucaagaagcugcgggauaacgaggaacugaauagccccaaaauucgcgucuauaacacagugaucucuuacauugaauccaauagaaagaacaauaaacagaccauccaccuucugaagcggcucccugccgacguucugaaaaagacaauuaagaacacccuugauauccauaaaagcauuacaaucaauaaccccaaggagucuaccguguccgacacgaacgaucacgcuaaaaauaacgacaccacaugaggacuaguaauaaggaaacuguaugaaugucugugggcaggaagugaagagauccuucuguaaagguuuuuggaauuaugucugcugaauaauaaacuuuuuugaaauaauaaaucugguagaaaaaugagaucuaaaaaaaaaaaaaaaaaaaaaaaaaaaaaaaaaaaaaaaaaaaaaaaaaaaaaaaaaaaaaaaaugcaucccccccccccccccccccccccccccccccaaaggcucuuuucagagccaccagaauu

SEQ ID NO: 11470 - RNA, 971 nt, Artificial Sequence
  mRNA product Design g-4 comprising derived and/or modified sequence from HRSV(A2)__P04545.1__M2-1 (opt6)
gggagacuccugucgggcggaaguaggaggaguagaguuuaaaaacaguacucuuuuuccgguucgggacguaguugaagcaacgacaagccggauaaccgcucuugagacaggaagcuuaccaugucaagaagaaacccaugcaaauucgaaauaagaggacacugccuaaacggaaaaagaugccacuucucacacaacuacuucgaauggccaccacacgcacuacuuguaagacaaaacuucaugcuaaacagaauacuaaaaucaauggacaaaucaauagacacauuaucagaaauaucaggagcagcagaacucgacagaacagaagaauacgcacuaggaguaguaggaguacuagaaucauacauaggaucaauaaacaacauaacaaaacaaucagcaugcguagccauguccaaacuacuaacagaacuaaacuccgacgacauaaaaaaacuaagagacaacgaagaacuaaacucaccaaaaauaagaguauacaacacaguaauaucauacauagaaucaaacagaaaaaacaauaaacaaacaauacaccuacuaaaaagacucccagcagacguacuaaaaaaaacaauaaaaaacacacuagacauccacaaaucaauaacaauaaacaacccaaaagaaucaacagucucagacaccaacgaccacgcaaaaaacaacgacacaacauaaggacuaguaauaaggaaacuguaugaaugucugugggcaggaagugaagagauccuucuguaaagguuuuuggaauuaugucugcugaauaauaaacuuuuuugaaauaauaaaucugguagaaaaaugagaucuaaaaaaaaaaaaaaaaaaaaaaaaaaaaaaaaaaaaaaaaaaaaaaaaaaaaaaaaaaaaaaaaugcaucccccccccccccccccccccccccccccccaaaggcucuuuucagagccaccagaauu

SEQ ID NO: 11471 - RNA, 971 nt, Artificial Sequence
  mRNA product Design g-4 comprising derived and/or modified sequence from HRSV(A2)__P04545.1__M2-1 (opt11)
gggagacuccugucgggcggaaguaggaggaguagaguuuaaaaacaguacucuuuuuccgguucgggacguaguugaagcaacgacaagccggauaaccgcucuugagacaggaagcuuaccaugucacgacgcaaccccugcaaauucgaaauccgcggccacugccuaaacggcaaacgcugccacuucucccacaacuacuucgaauggcccccccacgcccuccuuguccgccaaaacuucaugcucaaccgcauccucaaauccauggacaaaagcaucgacacccucuccgaaaucuccggcgcagccgaacucgaccgcaccgaagaauacgcccucggcgucguaggcguccucgaauccuacaucggcucaaucaacaacaucaccaaacaauccgccugcgucgccauguccaaacuccucaccgaacucaacuccgacgacaucaaaaaacuccgcgacaacgaagaacucaacucccccaaaauccgagucuacaacaccguaaucuccuacaucgaauccaaccgcaaaaacaacaaacaaaccauccaccuacuaaaacgacuccccgccgacguccucaaaaaaacaaucaaaaacacccucgacauccacaaauccaucaccaucaacaaccccaaagaaucaaccgucuccgacaccaacgaccacgccaaaaacaacgacaccaccugaggacuaguaauaaggaaacuguaugaaugucugugggcaggaagugaagagauccuucuguaaagguuuuuggaauuaugucugcugaauaauaaacuuuuuugaaauaauaaaucugguagaaaaaugagaucuaaaaaaaaaaaaaaaaaaaaaaaaaaaaaaaaaaaaaaaaaaaaaaaaaaaaaaaaaaaaaaaaugcaucccccccccccccccccccccccccccccccaaaggcucuuuucagagccaccagaauu

SEQ ID NO: 11472 - RNA, 947 nt, Artificial Sequence
  mRNA product Design g-5 comprising derived and/or modified sequence from HRSV(A2)__P04545.1__M2-1 (wt)
gggagacccgugacccggaaguuguacggcuacgcgacuuucccucccacaaacccucgcgcccuuccuuuccuacuugggcccggcagaaagcuuaccaugucacgaaggaauccuugcaaauuugaaauucgaggucauugcuuaaaugguaagaggugucauuuuagucauaauuauuuugaauggccaccccaugcacugcuuguaagacaaaacuuuauguuaaacagaauacuuaagucuauggauaaaaguauagauaccuuaucagaaauaaguggagcugcagaguuggacagaacagaagaguaugcucuugguguaguuggagugcuagagaguuauauaggaucaauaaacaauauaacuaaacaaucagcauguguugccaugagcaaacuccucacugaacucaauagugaugauaucaaaaagcugagggacaaugaagagcuaaauucacccaagauaagaguguacaauacugucauaucauauauugaaagcaacaggaaaaacaauaaacaaacuauccaucuguuaaaaagauugccagcagacguauugaagaaaaccaucaaaaacacauuggauauccauaagagcauaaccaucaacaacccaaaagaaucaacuguuagugauacaaaugaccaugccaaaaauaaugauacuaccugaggacuaguaauaaggaaacuguaugaaugucugugggcaggaagugaagagauccuucuguaaagguuuuuggaauuaugucugcugaauaauaaacuuuuuugaaauaauaaaucugguagaaaaaugagaucuaaaaaaaaaaaaaaaaaaaaaaaaaaaaaaaaaaaaaaaaaaaaaaaaaaaaaaaaaaaaaaaaugcaucccccccccccccccccccccccccccccccaaaggcucuuuucagagccaccagaauu

SEQ ID NO: 11473 - RNA, 947 nt, Artificial Sequence
  mRNA product Design g-5 comprising derived and/or modified sequence from HRSV(A2)__P04545.1__M2-1 (opt1)
gggagacccgugacccggaaguuguacggcuacgcgacuuucccucccacaaacccucgcgcccuuccuuuccuacuugggcccggcagaaagcuuaccaugagccgccggaaccccugcaaguucgagauccgcggccacugccugaacgggaagcggugccacuucucccacaacuacuucgaguggccgccccacgcccuccuggugcgccagaacuucaugcugaaccggauccucaagagcauggacaaguccaucgacacccugagcgagaucuccggcgccgcggagcuggaccgcaccgaggaguacgcccucggggucgugggcgugcuggagagcuacaucggguccaucaacaacaucacgaagcagagcgccugcgucgccauguccaagcugcucaccgagcugaacagcgacgacaucaagaagcugcgggacaacgaggagcucaacucccccaagauccgcguguacaacaccgugaucagcuacaucgaguccaaccggaagaacaacaagcagaccauccaccuccugaagcgccugcccgccgacguccugaagaagacgaucaagaacacccuggacauccacaagagcaucaccaucaacaacccgaaggaguccaccgugagcgacacgaacgaccacgcgaagaacaacgacaccaccugaggacuaguaauaaggaaacuguaugaaugucugugggcaggaagugaagagauccuucuguaaagguuuuuggaauuaugucugcugaauaauaaacuuuuuugaaauaauaaaucugguagaaaaaugagaucuaaaaaaaaaaaaaaaaaaaaaaaaaaaaaaaaaaaaaaaaaaaaaaaaaaaaaaaaaaaaaaaaugcaucccccccccccccccccccccccccccccccaaaggcucuuuucagagccaccagaauu

SEQ ID NO: 11474 - RNA, 947 nt, Artificial Sequence
  mRNA product Design g-5 comprising derived and/or modified sequence from HRSV(A2)__P04545.1__M2-1 (opt2)
gggagacccgugacccggaaguuguacggcuacgcgacuuucccucccacaaacccucgcgcccuuccuuuccuacuugggcccggcagaaagcuuaccaugucccgccgcaaccccugcaaguucgagauccgcggccacugccucaacggcaagcgcugccacuucucccacaacuacuucgaguggcccccccacgcccuccucguccgccagaacuucaugcucaaccgcauccucaaguccauggacaaguccaucgacacccucuccgagaucuccggcgccgccgagcucgaccgcaccgaggaguacgcccucggcgucgucggcguccucgaguccuacaucggcuccaucaacaacaucaccaagcaguccgccugcgucgccauguccaagcuccucaccgagcucaacuccgacgacaucaagaagcuccgcgacaacgaggagcucaacucccccaagauccgcgucuacaacaccgucaucuccuacaucgaguccaaccgcaagaacaacaagcagaccauccaccuccucaagcgccuccccgccgacguccucaagaagaccaucaagaacacccucgacauccacaaguccaucaccaucaacaaccccaaggaguccaccgucuccgacaccaacgaccacgccaagaacaacgacaccaccugaggacuaguaauaaggaaacuguaugaaugucugugggcaggaagugaagagauccuucuguaaagguuuuuggaauuaugucugcugaauaauaaacuuuuuugaaauaauaaaucugguagaaaaaugagaucuaaaaaaaaaaaaaaaaaaaaaaaaaaaaaaaaaaaaaaaaaaaaaaaaaaaaaaaaaaaaaaaaugcaucccccccccccccccccccccccccccccccaaaggcucuuuucagagccaccagaauu

SEQ ID NO: 11475 - RNA, 947 nt, Artificial Sequence
  mRNA product Design g-5 comprising derived and/or modified sequence from HRSV(A2)__P04545.1__M2-1 (opt3)
gggagacccgugacccggaaguuguacggcuacgcgacuuucccucccacaaacccucgcgcccuuccuuuccuacuugggcccggcagaaagcuuaccaugagcagaaggaaccccugcaaguucgagauccggggccacugucugaaugggaaacgcugccauuuuucccacaacuacuucgaauggccuccacaugcacuccuugugcgacagaauuuuaugcugaaccguauuuugaagucuauggacaaaucaauagauaccuuaagugagaucagcggagcugcagaacuggacagaacagaggaauaugcccuaggugucguuggcgugcucgaguccuacauugggucuaucaauaacauuacuaagcaaucggcguguguagcuaugucaaaacugcuuacggagcugaauagcgaugacaucaagaaguugagggauaacgaagaguuaaauaguccgaaaauacggguguauaacaccgucaucuccuacauugaaucuaaucgcaagaacaauaaacagacaauccaucugcugaagagacuccccgccgacgugcucaaaaagacuauuaagaacacccuggauauccacaaaagcauaacaauuaauaacccuaaggaguccaccguuucagacacuaacgaucacgccaaaaauaacgacacaaccugaggacuaguaauaaggaaacuguaugaaugucugugggcaggaagugaagagauccuucuguaaagguuuuuggaauuaugucugcugaauaauaaacuuuuuugaaauaauaaaucugguagaaaaaugagaucuaaaaaaaaaaaaaaaaaaaaaaaaaaaaaaaaaaaaaaaaaaaaaaaaaaaaaaaaaaaaaaaaugcaucccccccccccccccccccccccccccccccaaaggcucuuuucagagccaccagaauu

SEQ ID NO: 11476 - RNA, 947 nt, Artificial Sequence
  mRNA product Design g-5 comprising derived and/or modified sequence from HRSV(A2)__P04545.1__M2-1 (opt4)
gggagacccgugacccggaaguuguacggcuacgcgacuuucccucccacaaacccucgcgcccuuccuuuccuacuugggcccggcagaaagcuuaccaugagcagaagaaaccccugcaaguucgagaucagaggccacugccugaacggcaagagaugccacuucagccacaacuacuucgaguggcccccccacgcccugcuggugagacagaacuucaugcugaacagaauccugaagagcauggacaagagcaucgacacccugagcgagaucagcggcgccgccgagcuggacagaaccgaggaguacgcccugggcguggugggcgugcuggagagcuacaucggcagcaucaacaacaucaccaagcagagcgccugcguggccaugagcaagcugcugaccgagcugaacagcgacgacaucaagaagcugagagacaacgaggagcugaacagccccaagaucagaguguacaacaccgugaucagcuacaucgagagcaacagaaagaacaacaagcagaccauccaccugcugaagagacugcccgccgacgugcugaagaagaccaucaagaacacccuggacauccacaagagcaucaccaucaacaaccccaaggagagcaccgugagcgacaccaacgaccacgccaagaacaacgacaccaccugaggacuaguaauaaggaaacuguaugaaugucugugggcaggaagugaagagauccuucuguaaagguuuuuggaauuaugucugcugaauaauaaacuuuuuugaaauaauaaaucugguagaaaaaugagaucuaaaaaaaaaaaaaaaaaaaaaaaaaaaaaaaaaaaaaaaaaaaaaaaaaaaaaaaaaaaaaaaaugcaucccccccccccccccccccccccccccccccaaaggcucuuuucagagccaccagaauu

SEQ ID NO: 11477 - RNA, 947 nt, Artificial Sequence
  mRNA product Design g-5 comprising derived and/or modified sequence from HRSV(A2)__P04545.1__M2-1 (opt5)
gggagacccgugacccggaaguuguacggcuacgcgacuuucccucccacaaacccucgcgcccuuccuuuccuacuugggcccggcagaaagcuuaccaugagcagacggaaccccugcaaguucgagauccgcggccacugucugaaugggaaaagaugccauuuuucccacaacuacuucgaauggccuccgcaugcccuccuggugcggcagaauuuuaugcuuaaccgcauucugaagucuauggacaaaagcaucgauacccucuccgagauuucuggagcugccgaacuggacagaacagaggaauaugcgcuuggcgucguuggggugcuggagagcuacaucggauccauuaauaacaucacgaagcaaucugcuuguguggccaugagcaaacuccugaccgagcucaauuccgaugacaucaagaagcugcgggauaacgaggaacugaauagccccaaaauucgcgucuauaacacagugaucucuuacauugaauccaauagaaagaacaauaaacagaccauccaccuucugaagcggcucccugccgacguucugaaaaagacaauuaagaacacccuugauauccauaaaagcauuacaaucaauaaccccaaggagucuaccguguccgacacgaacgaucacgcuaaaaauaacgacaccacaugaggacuaguaauaaggaaacuguaugaaugucugugggcaggaagugaagagauccuucuguaaagguuuuuggaauuaugucugcugaauaauaaacuuuuuugaaauaauaaaucugguagaaaaaugagaucuaaaaaaaaaaaaaaaaaaaaaaaaaaaaaaaaaaaaaaaaaaaaaaaaaaaaaaaaaaaaaaaaugcaucccccccccccccccccccccccccccccccaaaggcucuuuucagagccaccagaauu

SEQ ID NO: 11478 - RNA, 947 nt, Artificial Sequence
  mRNA product Design g-5 comprising derived and/or modified sequence from HRSV(A2)__P04545.1__M2-1 (opt6)
gggagacccgugacccggaaguuguacggcuacgcgacuuucccucccacaaacccucgcgcccuuccuuuccuacuugggcccggcagaaagcuuaccaugucaagaagaaacccaugcaaauucgaaauaagaggacacugccuaaacggaaaaagaugccacuucucacacaacuacuucgaauggccaccacacgcacuacuuguaagacaaaacuucaugcuaaacagaauacuaaaaucaauggacaaaucaauagacacauuaucagaaauaucaggagcagcagaacucgacagaacagaagaauacgcacuaggaguaguaggaguacuagaaucauacauaggaucaauaaacaacauaacaaaacaaucagcaugcguagccauguccaaacuacuaacagaacuaaacuccgacgacauaaaaaaacuaagagacaacgaagaacuaaacucaccaaaaauaagaguauacaacacaguaauaucauacauagaaucaaacagaaaaaacaauaaacaaacaauacaccuacuaaaaagacucccagcagacguacuaaaaaaaacaauaaaaaacacacuagacauccacaaaucaauaacaauaaacaacccaaaagaaucaacagucucagacaccaacgaccacgcaaaaaacaacgacacaacauaaggacuaguaauaaggaaacuguaugaaugucugugggcaggaagugaagagauccuucuguaaagguuuuuggaauuaugucugcugaauaauaaacuuuuuugaaauaauaaaucugguagaaaaaugagaucuaaaaaaaaaaaaaaaaaaaaaaaaaaaaaaaaaaaaaaaaaaaaaaaaaaaaaaaaaaaaaaaaugcaucccccccccccccccccccccccccccccccaaaggcucuuuucagagccaccagaauu

SEQ ID NO: 11479 - RNA, 947 nt, Artificial Sequence
  mRNA product Design g-5 comprising derived and/or modified sequence from HRSV(A2)__P04545.1__M2-1 (opt11)
gggagacccgugacccggaaguuguacggcuacgcgacuuucccucccacaaacccucgcgcccuuccuuuccuacuugggcccggcagaaagcuuaccaugucacgacgcaaccccugcaaauucgaaauccgcggccacugccuaaacggcaaacgcugccacuucucccacaacuacuucgaauggcccccccacgcccuccuuguccgccaaaacuucaugcucaaccgcauccucaaauccauggacaaaagcaucgacacccucuccgaaaucuccggcgcagccgaacucgaccgcaccgaagaauacgcccucggcgucguaggcguccucgaauccuacaucggcucaaucaacaacaucaccaaacaauccgccugcgucgccauguccaaacuccucaccgaacucaacuccgacgacaucaaaaaacuccgcgacaacgaagaacucaacucccccaaaauccgagucuacaacaccguaaucuccuacaucgaauccaaccgcaaaaacaacaaacaaaccauccaccuacuaaaacgacuccccgccgacguccucaaaaaaacaaucaaaaacacccucgacauccacaaauccaucaccaucaacaaccccaaagaaucaaccgucuccgacaccaacgaccacgccaaaaacaacgacaccaccugaggacuaguaauaaggaaacuguaugaaugucugugggcaggaagugaagagauccuucuguaaagguuuuuggaauuaugucugcugaauaauaaacuuuuuugaaauaauaaaucugguagaaaaaugagaucuaaaaaaaaaaaaaaaaaaaaaaaaaaaaaaaaaaaaaaaaaaaaaaaaaaaaaaaaaaaaaaaaugcaucccccccccccccccccccccccccccccccaaaggcucuuuucagagccaccagaauu

SEQ ID NO: 11480 - RNA, 963 nt, Artificial Sequence
  mRNA product Design h-1 comprising derived and/or modified sequence from HRSV(A2)__P04545.1__M2-1 (wt)
gggagacccgugacccggaaguuguacggcuacgcgacuuucccucccacaaacccucgcgcccuuccuuuccuacuugggcccggcagaaagcuuaccaugucacgaaggaauccuugcaaauuugaaauucgaggucauugcuuaaaugguaagaggugucauuuuagucauaauuauuuugaauggccaccccaugcacugcuuguaagacaaaacuuuauguuaaacagaauacuuaagucuauggauaaaaguauagauaccuuaucagaaauaaguggagcugcagaguuggacagaacagaagaguaugcucuugguguaguuggagugcuagagaguuauauaggaucaauaaacaauauaacuaaacaaucagcauguguugccaugagcaaacuccucacugaacucaauagugaugauaucaaaaagcugagggacaaugaagagcuaaauucacccaagauaagaguguacaauacugucauaucauauauugaaagcaacaggaaaaacaauaaacaaacuauccaucuguuaaaaagauugccagcagacguauugaagaaaaccaucaaaaacacauuggauauccauaagagcauaaccaucaacaacccaaaagaaucaacuguuagugauacaaaugaccaugccaaaaauaaugauacuaccugaggacuaguacuggcugcaucucccuuuccucuguccuccauccuucucccaggauggugaagggggaccugguacccagugauccccaccccaggauccuaaaucaugacuuaccugcuaauaaaaacucauuggaaaagugagaagaucuaaaaaaaaaaaaaaaaaaaaaaaaaaaaaaaaaaaaaaaaaaaaaaaaaaaaaaaaaaaaaaaaugcaucccccccccccccccccccccccccccccccaaaggcucuuuucagagccaccagaauu

SEQ ID NO: 11481 - RNA, 963 nt, Artificial Sequence
  mRNA product Design h-1 comprising derived and/or modified sequence from HRSV(A2)__P04545.1__M2-1 (opt1)
gggagacccgugacccggaaguuguacggcuacgcgacuuucccucccacaaacccucgcgcccuuccuuuccuacuugggcccggcagaaagcuuaccaugagccgccggaaccccugcaaguucgagauccgcggccacugccugaacgggaagcggugccacuucucccacaacuacuucgaguggccgccccacgcccuccuggugcgccagaacuucaugcugaaccggauccucaagagcauggacaaguccaucgacacccugagcgagaucuccggcgccgcggagcuggaccgcaccgaggaguacgcccucggggucgugggcgugcuggagagcuacaucggguccaucaacaacaucacgaagcagagcgccugcgucgccauguccaagcugcucaccgagcugaacagcgacgacaucaagaagcugcgggacaacgaggagcucaacucccccaagauccgcguguacaacaccgugaucagcuacaucgaguccaaccggaagaacaacaagcagaccauccaccuccugaagcgccugcccgccgacguccugaagaagacgaucaagaacacccuggacauccacaagagcaucaccaucaacaacccgaaggaguccaccgugagcgacacgaacgaccacgcgaagaacaacgacaccaccugaggacuaguacuggcugcaucucccuuuccucuguccuccauccuucucccaggauggugaagggggaccugguacccagugauccccaccccaggauccuaaaucaugacuuaccugcuaauaaaaacucauuggaaaagugagaagaucuaaaaaaaaaaaaaaaaaaaaaaaaaaaaaaaaaaaaaaaaaaaaaaaaaaaaaaaaaaaaaaaaugcaucccccccccccccccccccccccccccccccaaaggcucuuuucagagccaccagaauu

SEQ ID NO: 11482 - RNA, 963 nt, Artificial Sequence
  mRNA product Design h-1 comprising derived and/or modified sequence from HRSV(A2)__P04545.1__M2-1 (opt2)
gggagacccgugacccggaaguuguacggcuacgcgacuuucccucccacaaacccucgcgcccuuccuuuccuacuugggcccggcagaaagcuuaccaugucccgccgcaaccccugcaaguucgagauccgcggccacugccucaacggcaagcgcugccacuucucccacaacuacuucgaguggcccccccacgcccuccucguccgccagaacuucaugcucaaccgcauccucaaguccauggacaaguccaucgacacccucuccgagaucuccggcgccgccgagcucgaccgcaccgaggaguacgcccucggcgucgucggcguccucgaguccuacaucggcuccaucaacaacaucaccaagcaguccgccugcgucgccauguccaagcuccucaccgagcucaacuccgacgacaucaagaagcuccgcgacaacgaggagcucaacucccccaagauccgcgucuacaacaccgucaucuccuacaucgaguccaaccgcaagaacaacaagcagaccauccaccuccucaagcgccuccccgccgacguccucaagaagaccaucaagaacacccucgacauccacaaguccaucaccaucaacaaccccaaggaguccaccgucuccgacaccaacgaccacgccaagaacaacgacaccaccugaggacuaguacuggcugcaucucccuuuccucuguccuccauccuucucccaggauggugaagggggaccugguacccagugauccccaccccaggauccuaaaucaugacuuaccugcuaauaaaaacucauuggaaaagugagaagaucuaaaaaaaaaaaaaaaaaaaaaaaaaaaaaaaaaaaaaaaaaaaaaaaaaaaaaaaaaaaaaaaaugcaucccccccccccccccccccccccccccccccaaaggcucuuuucagagccaccagaauu

SEQ ID NO: 11483 - RNA, 963 nt, Artificial Sequence
  mRNA product Design h-1 comprising derived and/or modified sequence from HRSV(A2)__P04545.1__M2-1 (opt3)
gggagacccgugacccggaaguuguacggcuacgcgacuuucccucccacaaacccucgcgcccuuccuuuccuacuugggcccggcagaaagcuuaccaugagcagaaggaaccccugcaaguucgagauccggggccacugucugaaugggaaacgcugccauuuuucccacaacuacuucgaauggccuccacaugcacuccuugugcgacagaauuuuaugcugaaccguauuuugaagucuauggacaaaucaauagauaccuuaagugagaucagcggagcugcagaacuggacagaacagaggaauaugcccuaggugucguuggcgugcucgaguccuacauugggucuaucaauaacauuacuaagcaaucggcguguguagcuaugucaaaacugcuuacggagcugaauagcgaugacaucaagaaguugagggauaacgaagaguuaaauaguccgaaaauacggguguauaacaccgucaucuccuacauugaaucuaaucgcaagaacaauaaacagacaauccaucugcugaagagacuccccgccgacgugcucaaaaagacuauuaagaacacccuggauauccacaaaagcauaacaauuaauaacccuaaggaguccaccguuucagacacuaacgaucacgccaaaaauaacgacacaaccugaggacuaguacuggcugcaucucccuuuccucuguccuccauccuucucccaggauggugaagggggaccugguacccagugauccccaccccaggauccuaaaucaugacuuaccugcuaauaaaaacucauuggaaaagugagaagaucuaaaaaaaaaaaaaaaaaaaaaaaaaaaaaaaaaaaaaaaaaaaaaaaaaaaaaaaaaaaaaaaaugcaucccccccccccccccccccccccccccccccaaaggcucuuuucagagccaccagaauu

SEQ ID NO: 11484 - RNA, 963 nt, Artificial Sequence
  mRNA product Design h-1 comprising derived and/or modified sequence from HRSV(A2)__P04545.1__M2-1 (opt4)
gggagacccgugacccggaaguuguacggcuacgcgacuuucccucccacaaacccucgcgcccuuccuuuccuacuugggcccggcagaaagcuuaccaugagcagaagaaaccccugcaaguucgagaucagaggccacugccugaacggcaagagaugccacuucagccacaacuacuucgaguggcccccccacgcccugcuggugagacagaacuucaugcugaacagaauccugaagagcauggacaagagcaucgacacccugagcgagaucagcggcgccgccgagcuggacagaaccgaggaguacgcccugggcguggugggcgugcuggagagcuacaucggcagcaucaacaacaucaccaagcagagcgccugcguggccaugagcaagcugcugaccgagcugaacagcgacgacaucaagaagcugagagacaacgaggagcugaacagccccaagaucagaguguacaacaccgugaucagcuacaucgagagcaacagaaagaacaacaagcagaccauccaccugcugaagagacugcccgccgacgugcugaagaagaccaucaagaacacccuggacauccacaagagcaucaccaucaacaaccccaaggagagcaccgugagcgacaccaacgaccacgccaagaacaacgacaccaccugaggacuaguacuggcugcaucucccuuuccucuguccuccauccuucucccaggauggugaagggggaccugguacccagugauccccaccccaggauccuaaaucaugacuuaccugcuaauaaaaacucauuggaaaagugagaagaucuaaaaaaaaaaaaaaaaaaaaaaaaaaaaaaaaaaaaaaaaaaaaaaaaaaaaaaaaaaaaaaaaugcaucccccccccccccccccccccccccccccccaaaggcucuuuucagagccaccagaauu

SEQ ID NO: 11485 - RNA, 963 nt, Artificial Sequence
  mRNA product Design h-1 comprising derived and/or modified sequence from HRSV(A2)__P04545.1__M2-1 (opt5)
gggagacccgugacccggaaguuguacggcuacgcgacuuucccucccacaaacccucgcgcccuuccuuuccuacuugggcccggcagaaagcuuaccaugagcagacggaaccccugcaaguucgagauccgcggccacugucugaaugggaaaagaugccauuuuucccacaacuacuucgaauggccuccgcaugcccuccuggugcggcagaauuuuaugcuuaaccgcauucugaagucuauggacaaaagcaucgauacccucuccgagauuucuggagcugccgaacuggacagaacagaggaauaugcgcuuggcgucguuggggugcuggagagcuacaucggauccauuaauaacaucacgaagcaaucugcuuguguggccaugagcaaacuccugaccgagcucaauuccgaugacaucaagaagcugcgggauaacgaggaacugaauagccccaaaauucgcgucuauaacacagugaucucuuacauugaauccaauagaaagaacaauaaacagaccauccaccuucugaagcggcucccugccgacguucugaaaaagacaauuaagaacacccuugauauccauaaaagcauuacaaucaauaaccccaaggagucuaccguguccgacacgaacgaucacgcuaaaaauaacgacaccacaugaggacuaguacuggcugcaucucccuuuccucuguccuccauccuucucccaggauggugaagggggaccugguacccagugauccccaccccaggauccuaaaucaugacuuaccugcuaauaaaaacucauuggaaaagugagaagaucuaaaaaaaaaaaaaaaaaaaaaaaaaaaaaaaaaaaaaaaaaaaaaaaaaaaaaaaaaaaaaaaaugcaucccccccccccccccccccccccccccccccaaaggcucuuuucagagccaccagaauu

SEQ ID NO: 11486 - RNA, 963 nt, Artificial Sequence
  mRNA product Design h-1 comprising derived and/or modified sequence from HRSV(A2)__P04545.1__M2-1 (opt6)
gggagacccgugacccggaaguuguacggcuacgcgacuuucccucccacaaacccucgcgcccuuccuuuccuacuugggcccggcagaaagcuuaccaugucaagaagaaacccaugcaaauucgaaauaagaggacacugccuaaacggaaaaagaugccacuucucacacaacuacuucgaauggccaccacacgcacuacuuguaagacaaaacuucaugcuaaacagaauacuaaaaucaauggacaaaucaauagacacauuaucagaaauaucaggagcagcagaacucgacagaacagaagaauacgcacuaggaguaguaggaguacuagaaucauacauaggaucaauaaacaacauaacaaaacaaucagcaugcguagccauguccaaacuacuaacagaacuaaacuccgacgacauaaaaaaacuaagagacaacgaagaacuaaacucaccaaaaauaagaguauacaacacaguaauaucauacauagaaucaaacagaaaaaacaauaaacaaacaauacaccuacuaaaaagacucccagcagacguacuaaaaaaaacaauaaaaaacacacuagacauccacaaaucaauaacaauaaacaacccaaaagaaucaacagucucagacaccaacgaccacgcaaaaaacaacgacacaacauaaggacuaguacuggcugcaucucccuuuccucuguccuccauccuucucccaggauggugaagggggaccugguacccagugauccccaccccaggauccuaaaucaugacuuaccugcuaauaaaaacucauuggaaaagugagaagaucuaaaaaaaaaaaaaaaaaaaaaaaaaaaaaaaaaaaaaaaaaaaaaaaaaaaaaaaaaaaaaaaaugcaucccccccccccccccccccccccccccccccaaaggcucuuuucagagccaccagaauu

SEQ ID NO: 11487 - RNA, 963 nt, Artificial Sequence
  mRNA product Design h-1 comprising derived and/or modified sequence from HRSV(A2)__P04545.1__M2-1 (opt11)
gggagacccgugacccggaaguuguacggcuacgcgacuuucccucccacaaacccucgcgcccuuccuuuccuacuugggcccggcagaaagcuuaccaugucacgacgcaaccccugcaaauucgaaauccgcggccacugccuaaacggcaaacgcugccacuucucccacaacuacuucgaauggcccccccacgcccuccuuguccgccaaaacuucaugcucaaccgcauccucaaauccauggacaaaagcaucgacacccucuccgaaaucuccggcgcagccgaacucgaccgcaccgaagaauacgcccucggcgucguaggcguccucgaauccuacaucggcucaaucaacaacaucaccaaacaauccgccugcgucgccauguccaaacuccucaccgaacucaacuccgacgacaucaaaaaacuccgcgacaacgaagaacucaacucccccaaaauccgagucuacaacaccguaaucuccuacaucgaauccaaccgcaaaaacaacaaacaaaccauccaccuacuaaaacgacuccccgccgacguccucaaaaaaacaaucaaaaacacccucgacauccacaaauccaucaccaucaacaaccccaaagaaucaaccgucuccgacaccaacgaccacgccaaaaacaacgacaccaccugaggacuaguacuggcugcaucucccuuuccucuguccuccauccuucucccaggauggugaagggggaccugguacccagugauccccaccccaggauccuaaaucaugacuuaccugcuaauaaaaacucauuggaaaagugagaagaucuaaaaaaaaaaaaaaaaaaaaaaaaaaaaaaaaaaaaaaaaaaaaaaaaaaaaaaaaaaaaaaaaugcaucccccccccccccccccccccccccccccccaaaggcucuuuucagagccaccagaauu

SEQ ID NO: 11488 - RNA, 1179 nt, Artificial Sequence
  mRNA product Design h-2 comprising derived and/or modified sequence from HRSV(A2)__P04545.1__M2-1 (wt)
gggagacccgugacccggaaguuguacggcuacgcgacuuucccucccacaaacccucgcgcccuuccuuuccuacuugggcccggcagaaagcuuaccaugucacgaaggaauccuugcaaauuugaaauucgaggucauugcuuaaaugguaagaggugucauuuuagucauaauuauuuugaauggccaccccaugcacugcuuguaagacaaaacuuuauguuaaacagaauacuuaagucuauggauaaaaguauagauaccuuaucagaaauaaguggagcugcagaguuggacagaacagaagaguaugcucuugguguaguuggagugcuagagaguuauauaggaucaauaaacaauauaacuaaacaaucagcauguguugccaugagcaaacuccucacugaacucaauagugaugauaucaaaaagcugagggacaaugaagagcuaaauucacccaagauaagaguguacaauacugucauaucauauauugaaagcaacaggaaaaacaauaaacaaacuauccaucuguuaaaaagauugccagcagacguauugaagaaaaccaucaaaaacacauuggauauccauaagagcauaaccaucaacaacccaaaagaaucaacuguuagugauacaaaugaccaugccaaaaauaaugauacuaccugaggacuagugaagggaacacccaaauuuaauucagccuuaagcacaauuaauuaagagugaaacguaauuguacaagcaguuggucacccaccauagggcaugaucaacaccgcaaccuuuccuuuuucccccagugauucugaaaaaccccucuucccuucagcuugcuuagauguuccaaauuuaguaagcuuaaggcggccuacagaagaaaaagaaaaaaaaggccacaaaaguucccucucacuuucaguaaauaaaauaaaagcagcaacagaaauaaagaaauaaaugaaauucaaaaugaaauaaauauuguguugugcagcauuaaaaaaucaauaaaaauuaaaaaugagcaagaucuaaaaaaaaaaaaaaaaaaaaaaaaaaaaaaaaaaaaaaaaaaaaaaaaaaaaaaaaaaaaaaaaugcaucccccccccccccccccccccccccccccccaaaggcucuuuucagagccaccagaauu

SEQ ID NO: 11489 - RNA, 1179 nt, Artificial Sequence
  mRNA product Design h-2 comprising derived and/or modified sequence from HRSV(A2)__P04545.1__M2-1 (opt1)
gggagacccgugacccggaaguuguacggcuacgcgacuuucccucccacaaacccucgcgcccuuccuuuccuacuugggcccggcagaaagcuuaccaugagccgccggaaccccugcaaguucgagauccgcggccacugccugaacgggaagcggugccacuucucccacaacuacuucgaguggccgccccacgcccuccuggugcgccagaacuucaugcugaaccggauccucaagagcauggacaaguccaucgacacccugagcgagaucuccggcgccgcggagcuggaccgcaccgaggaguacgcccucggggucgugggcgugcuggagagcuacaucggguccaucaacaacaucacgaagcagagcgccugcgucgccauguccaagcugcucaccgagcugaacagcgacgacaucaagaagcugcgggacaacgaggagcucaacucccccaagauccgcguguacaacaccgugaucagcuacaucgaguccaaccggaagaacaacaagcagaccauccaccuccugaagcgccugcccgccgacguccugaagaagacgaucaagaacacccuggacauccacaagagcaucaccaucaacaacccgaaggaguccaccgugagcgacacgaacgaccacgcgaagaacaacgacaccaccugaggacuagugaagggaacacccaaauuuaauucagccuuaagcacaauuaauuaagagugaaacguaauuguacaagcaguuggucacccaccauagggcaugaucaacaccgcaaccuuuccuuuuucccccagugauucugaaaaaccccucuucccuucagcuugcuuagauguuccaaauuuaguaagcuuaaggcggccuacagaagaaaaagaaaaaaaaggccacaaaaguucccucucacuuucaguaaauaaaauaaaagcagcaacagaaauaaagaaauaaaugaaauucaaaaugaaauaaauauuguguugugcagcauuaaaaaaucaauaaaaauuaaaaaugagcaagaucuaaaaaaaaaaaaaaaaaaaaaaaaaaaaaaaaaaaaaaaaaaaaaaaaaaaaaaaaaaaaaaaaugcaucccccccccccccccccccccccccccccccaaaggcucuuuucagagccaccagaauu

SEQ ID NO: 11490 - RNA, 1179 nt, Artificial Sequence
  mRNA product Design h-2 comprising derived and/or modified sequence from HRSV(A2)__P04545.1__M2-1 (opt2)
gggagacccgugacccggaaguuguacggcuacgcgacuuucccucccacaaacccucgcgcccuuccuuuccuacuugggcccggcagaaagcuuaccaugucccgccgcaaccccugcaaguucgagauccgcggccacugccucaacggcaagcgcugccacuucucccacaacuacuucgaguggcccccccacgcccuccucguccgccagaacuucaugcucaaccgcauccucaaguccauggacaaguccaucgacacccucuccgagaucuccggcgccgccgagcucgaccgcaccgaggaguacgcccucggcgucgucggcguccucgaguccuacaucggcuccaucaacaacaucaccaagcaguccgccugcgucgccauguccaagcuccucaccgagcucaacuccgacgacaucaagaagcuccgcgacaacgaggagcucaacucccccaagauccgcgucuacaacaccgucaucuccuacaucgaguccaaccgcaagaacaacaagcagaccauccaccuccucaagcgccuccccgccgacguccucaagaagaccaucaagaacacccucgacauccacaaguccaucaccaucaacaaccccaaggaguccaccgucuccgacaccaacgaccacgccaagaacaacgacaccaccugaggacuagugaagggaacacccaaauuuaauucagccuuaagcacaauuaauuaagagugaaacguaauuguacaagcaguuggucacccaccauagggcaugaucaacaccgcaaccuuuccuuuuucccccagugauucugaaaaaccccucuucccuucagcuugcuuagauguuccaaauuuaguaagcuuaaggcggccuacagaagaaaaagaaaaaaaaggccacaaaaguucccucucacuuucaguaaauaaaauaaaagcagcaacagaaauaaagaaauaaaugaaauucaaaaugaaauaaauauuguguugugcagcauuaaaaaaucaauaaaaauuaaaaaugagcaagaucuaaaaaaaaaaaaaaaaaaaaaaaaaaaaaaaaaaaaaaaaaaaaaaaaaaaaaaaaaaaaaaaaugcaucccccccccccccccccccccccccccccccaaaggcucuuuucagagccaccagaauu

SEQ ID NO: 11491 - RNA, 1179 nt, Artificial Sequence
  mRNA product Design h-2 comprising derived and/or modified sequence from HRSV(A2)__P04545.1__M2-1 (opt3)
gggagacccgugacccggaaguuguacggcuacgcgacuuucccucccacaaacccucgcgcccuuccuuuccuacuugggcccggcagaaagcuuaccaugagcagaaggaaccccugcaaguucgagauccggggccacugucugaaugggaaacgcugccauuuuucccacaacuacuucgaauggccuccacaugcacuccuugugcgacagaauuuuaugcugaaccguauuuugaagucuauggacaaaucaauagauaccuuaagugagaucagcggagcugcagaacuggacagaacagaggaauaugcccuaggugucguuggcgugcucgaguccuacauugggucuaucaauaacauuacuaagcaaucggcguguguagcuaugucaaaacugcuuacggagcugaauagcgaugacaucaagaaguugagggauaacgaagaguuaaauaguccgaaaauacggguguauaacaccgucaucuccuacauugaaucuaaucgcaagaacaauaaacagacaauccaucugcugaagagacuccccgccgacgugcucaaaaagacuauuaagaacacccuggauauccacaaaagcauaacaauuaauaacccuaaggaguccaccguuucagacacuaacgaucacgccaaaaauaacgacacaaccugaggacuagugaagggaacacccaaauuuaauucagccuuaagcacaauuaauuaagagugaaacguaauuguacaagcaguuggucacccaccauagggcaugaucaacaccgcaaccuuuccuuuuucccccagugauucugaaaaaccccucuucccuucagcuugcuuagauguuccaaauuuaguaagcuuaaggcggccuacagaagaaaaagaaaaaaaaggccacaaaaguucccucucacuuucaguaaauaaaauaaaagcagcaacagaaauaaagaaauaaaugaaauucaaaaugaaauaaauauuguguugugcagcauuaaaaaaucaauaaaaauuaaaaaugagcaagaucuaaaaaaaaaaaaaaaaaaaaaaaaaaaaaaaaaaaaaaaaaaaaaaaaaaaaaaaaaaaaaaaaugcaucccccccccccccccccccccccccccccccaaaggcucuuuucagagccaccagaauu

SEQ ID NO: 11492 - RNA, 1179 nt, Artificial Sequence
  mRNA product Design h-2 comprising derived and/or modified sequence from HRSV(A2)__P04545.1__M2-1 (opt4)
gggagacccgugacccggaaguuguacggcuacgcgacuuucccucccacaaacccucgcgcccuuccuuuccuacuugggcccggcagaaagcuuaccaugagcagaagaaaccccugcaaguucgagaucagaggccacugccugaacggcaagagaugccacuucagccacaacuacuucgaguggcccccccacgcccugcuggugagacagaacuucaugcugaacagaauccugaagagcauggacaagagcaucgacacccugagcgagaucagcggcgccgccgagcuggacagaaccgaggaguacgcccugggcguggugggcgugcuggagagcuacaucggcagcaucaacaacaucaccaagcagagcgccugcguggccaugagcaagcugcugaccgagcugaacagcgacgacaucaagaagcugagagacaacgaggagcugaacagccccaagaucagaguguacaacaccgugaucagcuacaucgagagcaacagaaagaacaacaagcagaccauccaccugcugaagagacugcccgccgacgugcugaagaagaccaucaagaacacccuggacauccacaagagcaucaccaucaacaaccccaaggagagcaccgugagcgacaccaacgaccacgccaagaacaacgacaccaccugaggacuagugaagggaacacccaaauuuaauucagccuuaagcacaauuaauuaagagugaaacguaauuguacaagcaguuggucacccaccauagggcaugaucaacaccgcaaccuuuccuuuuucccccagugauucugaaaaaccccucuucccuucagcuugcuuagauguuccaaauuuaguaagcuuaaggcggccuacagaagaaaaagaaaaaaaaggccacaaaaguucccucucacuuucaguaaauaaaauaaaagcagcaacagaaauaaagaaauaaaugaaauucaaaaugaaauaaauauuguguugugcagcauuaaaaaaucaauaaaaauuaaaaaugagcaagaucuaaaaaaaaaaaaaaaaaaaaaaaaaaaaaaaaaaaaaaaaaaaaaaaaaaaaaaaaaaaaaaaaugcaucccccccccccccccccccccccccccccccaaaggcucuuuucagagccaccagaauu

SEQ ID NO: 11493 - RNA, 1179 nt, Artificial Sequence
  mRNA product Design h-2 comprising derived and/or modified sequence from HRSV(A2)__P04545.1__M2-1 (opt5)
gggagacccgugacccggaaguuguacggcuacgcgacuuucccucccacaaacccucgcgcccuuccuuuccuacuugggcccggcagaaagcuuaccaugagcagacggaaccccugcaaguucgagauccgcggccacugucugaaugggaaaagaugccauuuuucccacaacuacuucgaauggccuccgcaugcccuccuggugcggcagaauuuuaugcuuaaccgcauucugaagucuauggacaaaagcaucgauacccucuccgagauuucuggagcugccgaacuggacagaacagaggaauaugcgcuuggcgucguuggggugcuggagagcuacaucggauccauuaauaacaucacgaagcaaucugcuuguguggccaugagcaaacuccugaccgagcucaauuccgaugacaucaagaagcugcgggauaacgaggaacugaauagccccaaaauucgcgucuauaacacagugaucucuuacauugaauccaauagaaagaacaauaaacagaccauccaccuucugaagcggcucccugccgacguucugaaaaagacaauuaagaacacccuugauauccauaaaagcauuacaaucaauaaccccaaggagucuaccguguccgacacgaacgaucacgcuaaaaauaacgacaccacaugaggacuagugaagggaacacccaaauuuaauucagccuuaagcacaauuaauuaagagugaaacguaauuguacaagcaguuggucacccaccauagggcaugaucaacaccgcaaccuuuccuuuuucccccagugauucugaaaaaccccucuucccuucagcuugcuuagauguuccaaauuuaguaagcuuaaggcggccuacagaagaaaaagaaaaaaaaggccacaaaaguucccucucacuuucaguaaauaaaauaaaagcagcaacagaaauaaagaaauaaaugaaauucaaaaugaaauaaauauuguguugugcagcauuaaaaaaucaauaaaaauuaaaaaugagcaagaucuaaaaaaaaaaaaaaaaaaaaaaaaaaaaaaaaaaaaaaaaaaaaaaaaaaaaaaaaaaaaaaaaugcaucccccccccccccccccccccccccccccccaaaggcucuuuucagagccaccagaauu

SEQ ID NO: 11494 - RNA, 1179 nt, Artificial Sequence
  mRNA product Design h-2 comprising derived and/or modified sequence from HRSV(A2)__P04545.1__M2-1 (opt6)
gggagacccgugacccggaaguuguacggcuacgcgacuuucccucccacaaacccucgcgcccuuccuuuccuacuugggcccggcagaaagcuuaccaugucaagaagaaacccaugcaaauucgaaauaagaggacacugccuaaacggaaaaagaugccacuucucacacaacuacuucgaauggccaccacacgcacuacuuguaagacaaaacuucaugcuaaacagaauacuaaaaucaauggacaaaucaauagacacauuaucagaaauaucaggagcagcagaacucgacagaacagaagaauacgcacuaggaguaguaggaguacuagaaucauacauaggaucaauaaacaacauaacaaaacaaucagcaugcguagccauguccaaacuacuaacagaacuaaacuccgacgacauaaaaaaacuaagagacaacgaagaacuaaacucaccaaaaauaagaguauacaacacaguaauaucauacauagaaucaaacagaaaaaacaauaaacaaacaauacaccuacuaaaaagacucccagcagacguacuaaaaaaaacaauaaaaaacacacuagacauccacaaaucaauaacaauaaacaacccaaaagaaucaacagucucagacaccaacgaccacgcaaaaaacaacgacacaacauaaggacuagugaagggaacacccaaauuuaauucagccuuaagcacaauuaauuaagagugaaacguaauuguacaagcaguuggucacccaccauagggcaugaucaacaccgcaaccuuuccuuuuucccccagugauucugaaaaaccccucuucccuucagcuugcuuagauguuccaaauuuaguaagcuuaaggcggccuacagaagaaaaagaaaaaaaaggccacaaaaguucccucucacuuucaguaaauaaaauaaaagcagcaacagaaauaaagaaauaaaugaaauucaaaaugaaauaaauauuguguugugcagcauuaaaaaaucaauaaaaauuaaaaaugagcaagaucuaaaaaaaaaaaaaaaaaaaaaaaaaaaaaaaaaaaaaaaaaaaaaaaaaaaaaaaaaaaaaaaaugcaucccccccccccccccccccccccccccccccaaaggcucuuuucagagccaccagaauu

SEQ ID NO: 11495 - RNA, 1179 nt, Artificial Sequence
  mRNA product Design h-2 comprising derived and/or modified sequence from HRSV(A2)__P04545.1__M2-1 (opt11)
gggagacccgugacccggaaguuguacggcuacgcgacuuucccucccacaaacccucgcgcccuuccuuuccuacuugggcccggcagaaagcuuaccaugucacgacgcaaccccugcaaauucgaaauccgcggccacugccuaaacggcaaacgcugccacuucucccacaacuacuucgaauggcccccccacgcccuccuuguccgccaaaacuucaugcucaaccgcauccucaaauccauggacaaaagcaucgacacccucuccgaaaucuccggcgcagccgaacucgaccgcaccgaagaauacgcccucggcgucguaggcguccucgaauccuacaucggcucaaucaacaacaucaccaaacaauccgccugcgucgccauguccaaacuccucaccgaacucaacuccgacgacaucaaaaaacuccgcgacaacgaagaacucaacucccccaaaauccgagucuacaacaccguaaucuccuacaucgaauccaaccgcaaaaacaacaaacaaaccauccaccuacuaaaacgacuccccgccgacguccucaaaaaaacaaucaaaaacacccucgacauccacaaauccaucaccaucaacaaccccaaagaaucaaccgucuccgacaccaacgaccacgccaaaaacaacgacaccaccugaggacuagugaagggaacacccaaauuuaauucagccuuaagcacaauuaauuaagagugaaacguaauuguacaagcaguuggucacccaccauagggcaugaucaacaccgcaaccuuuccuuuuucccccagugauucugaaaaaccccucuucccuucagcuugcuuagauguuccaaauuuaguaagcuuaaggcggccuacagaagaaaaagaaaaaaaaggccacaaaaguucccucucacuuucaguaaauaaaauaaaagcagcaacagaaauaaagaaauaaaugaaauucaaaaugaaauaaauauuguguugugcagcauuaaaaaaucaauaaaaauuaaaaaugagcaagaucuaaaaaaaaaaaaaaaaaaaaaaaaaaaaaaaaaaaaaaaaaaaaaaaaaaaaaaaaaaaaaaaaugcaucccccccccccccccccccccccccccccccaaaggcucuuuucagagccaccagaauu

SEQ ID NO: 11496 - RNA, 959 nt, Artificial Sequence
  mRNA product Design h-3 comprising derived and/or modified sequence from HRSV(A2)__P04545.1__M2-1 (wt)
gggagacccgugacccggaaguuguacggcuacgcgacuuucccucccacaaacccucgcgcccuuccuuuccuacuugggcccggcagaaagcuuaccaugucacgaaggaauccuugcaaauuugaaauucgaggucauugcuuaaaugguaagaggugucauuuuagucauaauuauuuugaauggccaccccaugcacugcuuguaagacaaaacuuuauguuaaacagaauacuuaagucuauggauaaaaguauagauaccuuaucagaaauaaguggagcugcagaguuggacagaacagaagaguaugcucuugguguaguuggagugcuagagaguuauauaggaucaauaaacaauauaacuaaacaaucagcauguguugccaugagcaaacuccucacugaacucaauagugaugauaucaaaaagcugagggacaaugaagagcuaaauucacccaagauaagaguguacaauacugucauaucauauauugaaagcaacaggaaaaacaauaaacaaacuauccaucuguuaaaaagauugccagcagacguauugaagaaaaccaucaaaaacacauuggauauccauaagagcauaaccaucaacaacccaaaagaaucaacuguuagugauacaaaugaccaugccaaaaauaaugauacuaccugaggacuaguggaagcauuuuccuggcugauuaaaagaaauuacucagcuauggucaucuguuccuguuagaaggcuaugcagcauauuauauacuaugcgcauguuaugaaaugcauaauaaaaaauuuuaaaaaaucuaaaagaucuaaaaaaaaaaaaaaaaaaaaaaaaaaaaaaaaaaaaaaaaaaaaaaaaaaaaaaaaaaaaaaaaugcaucccccccccccccccccccccccccccccccaaaggcucuuuucagagccaccagaauu

SEQ ID NO: 11497 - RNA, 959 nt, Artificial Sequence
  mRNA product Design h-3 comprising derived and/or modified sequence from HRSV(A2)__P04545.1__M2-1 (opt1)
gggagacccgugacccggaaguuguacggcuacgcgacuuucccucccacaaacccucgcgcccuuccuuuccuacuugggcccggcagaaagcuuaccaugagccgccggaaccccugcaaguucgagauccgcggccacugccugaacgggaagcggugccacuucucccacaacuacuucgaguggccgccccacgcccuccuggugcgccagaacuucaugcugaaccggauccucaagagcauggacaaguccaucgacacccugagcgagaucuccggcgccgcggagcuggaccgcaccgaggaguacgcccucggggucgugggcgugcuggagagcuacaucggguccaucaacaacaucacgaagcagagcgccugcgucgccauguccaagcugcucaccgagcugaacagcgacgacaucaagaagcugcgggacaacgaggagcucaacucccccaagauccgcguguacaacaccgugaucagcuacaucgaguccaaccggaagaacaacaagcagaccauccaccuccugaagcgccugcccgccgacguccugaagaagacgaucaagaacacccuggacauccacaagagcaucaccaucaacaacccgaaggaguccaccgugagcgacacgaacgaccacgcgaagaacaacgacaccaccugaggacuaguggaagcauuuuccuggcugauuaaaagaaauuacucagcuauggucaucuguuccuguuagaaggcuaugcagcauauuauauacuaugcgcauguuaugaaaugcauaauaaaaaauuuuaaaaaaucuaaaagaucuaaaaaaaaaaaaaaaaaaaaaaaaaaaaaaaaaaaaaaaaaaaaaaaaaaaaaaaaaaaaaaaaugcaucccccccccccccccccccccccccccccccaaaggcucuuuucagagccaccagaauu

SEQ ID NO: 11498 - RNA, 959 nt, Artificial Sequence
  mRNA product Design h-3 comprising derived and/or modified sequence from HRSV(A2)__P04545.1__M2-1 (opt2)
gggagacccgugacccggaaguuguacggcuacgcgacuuucccucccacaaacccucgcgcccuuccuuuccuacuugggcccggcagaaagcuuaccaugucccgccgcaaccccugcaaguucgagauccgcggccacugccucaacggcaagcgcugccacuucucccacaacuacuucgaguggcccccccacgcccuccucguccgccagaacuucaugcucaaccgcauccucaaguccauggacaaguccaucgacacccucuccgagaucuccggcgccgccgagcucgaccgcaccgaggaguacgcccucggcgucgucggcguccucgaguccuacaucggcuccaucaacaacaucaccaagcaguccgccugcgucgccauguccaagcuccucaccgagcucaacuccgacgacaucaagaagcuccgcgacaacgaggagcucaacucccccaagauccgcgucuacaacaccgucaucuccuacaucgaguccaaccgcaagaacaacaagcagaccauccaccuccucaagcgccuccccgccgacguccucaagaagaccaucaagaacacccucgacauccacaaguccaucaccaucaacaaccccaaggaguccaccgucuccgacaccaacgaccacgccaagaacaacgacaccaccugaggacuaguggaagcauuuuccuggcugauuaaaagaaauuacucagcuauggucaucuguuccuguuagaaggcuaugcagcauauuauauacuaugcgcauguuaugaaaugcauaauaaaaaauuuuaaaaaaucuaaaagaucuaaaaaaaaaaaaaaaaaaaaaaaaaaaaaaaaaaaaaaaaaaaaaaaaaaaaaaaaaaaaaaaaugcaucccccccccccccccccccccccccccccccaaaggcucuuuucagagccaccagaauu

SEQ ID NO: 11499 - RNA, 959 nt, Artificial Sequence
  mRNA product Design h-3 comprising derived and/or modified sequence from HRSV(A2)__P04545.1__M2-1 (opt3)
gggagacccgugacccggaaguuguacggcuacgcgacuuucccucccacaaacccucgcgcccuuccuuuccuacuugggcccggcagaaagcuuaccaugagcagaaggaaccccugcaaguucgagauccggggccacugucugaaugggaaacgcugccauuuuucccacaacuacuucgaauggccuccacaugcacuccuugugcgacagaauuuuaugcugaaccguauuuugaagucuauggacaaaucaauagauaccuuaagugagaucagcggagcugcagaacuggacagaacagaggaauaugcccuaggugucguuggcgugcucgaguccuacauugggucuaucaauaacauuacuaagcaaucggcguguguagcuaugucaaaacugcuuacggagcugaauagcgaugacaucaagaaguugagggauaacgaagaguuaaauaguccgaaaauacggguguauaacaccgucaucuccuacauugaaucuaaucgcaagaacaauaaacagacaauccaucugcugaagagacuccccgccgacgugcucaaaaagacuauuaagaacacccuggauauccacaaaagcauaacaauuaauaacccuaaggaguccaccguuucagacacuaacgaucacgccaaaaauaacgacacaaccugaggacuaguggaagcauuuuccuggcugauuaaaagaaauuacucagcuauggucaucuguuccuguuagaaggcuaugcagcauauuauauacuaugcgcauguuaugaaaugcauaauaaaaaauuuuaaaaaaucuaaaagaucuaaaaaaaaaaaaaaaaaaaaaaaaaaaaaaaaaaaaaaaaaaaaaaaaaaaaaaaaaaaaaaaaugcaucccccccccccccccccccccccccccccccaaaggcucuuuucagagccaccagaauu

SEQ ID NO: 11500 - RNA, 959 nt, Artificial Sequence
  mRNA product Design h-3 comprising derived and/or modified sequence from HRSV(A2)__P04545.1__M2-1 (opt4)
gggagacccgugacccggaaguuguacggcuacgcgacuuucccucccacaaacccucgcgcccuuccuuuccuacuugggcccggcagaaagcuuaccaugagcagaagaaaccccugcaaguucgagaucagaggccacugccugaacggcaagagaugccacuucagccacaacuacuucgaguggcccccccacgcccugcuggugagacagaacuucaugcugaacagaauccugaagagcauggacaagagcaucgacacccugagcgagaucagcggcgccgccgagcuggacagaaccgaggaguacgcccugggcguggugggcgugcuggagagcuacaucggcagcaucaacaacaucaccaagcagagcgccugcguggccaugagcaagcugcugaccgagcugaacagcgacgacaucaagaagcugagagacaacgaggagcugaacagccccaagaucagaguguacaacaccgugaucagcuacaucgagagcaacagaaagaacaacaagcagaccauccaccugcugaagagacugcccgccgacgugcugaagaagaccaucaagaacacccuggacauccacaagagcaucaccaucaacaaccccaaggagagcaccgugagcgacaccaacgaccacgccaagaacaacgacaccaccugaggacuaguggaagcauuuuccuggcugauuaaaagaaauuacucagcuauggucaucuguuccuguuagaaggcuaugcagcauauuauauacuaugcgcauguuaugaaaugcauaauaaaaaauuuuaaaaaaucuaaaagaucuaaaaaaaaaaaaaaaaaaaaaaaaaaaaaaaaaaaaaaaaaaaaaaaaaaaaaaaaaaaaaaaaugcaucccccccccccccccccccccccccccccccaaaggcucuuuucagagccaccagaauu

SEQ ID NO: 11501 - RNA, 959 nt, Artificial Sequence
  mRNA product Design h-3 comprising derived and/or modified sequence from HRSV(A2)__P04545.1__M2-1 (opt5)
gggagacccgugacccggaaguuguacggcuacgcgacuuucccucccacaaacccucgcgcccuuccuuuccuacuugggcccggcagaaagcuuaccaugagcagacggaaccccugcaaguucgagauccgcggccacugucugaaugggaaaagaugccauuuuucccacaacuacuucgaauggccuccgcaugcccuccuggugcggcagaauuuuaugcuuaaccgcauucugaagucuauggacaaaagcaucgauacccucuccgagauuucuggagcugccgaacuggacagaacagaggaauaugcgcuuggcgucguuggggugcuggagagcuacaucggauccauuaauaacaucacgaagcaaucugcuuguguggccaugagcaaacuccugaccgagcucaauuccgaugacaucaagaagcugcgggauaacgaggaacugaauagccccaaaauucgcgucuauaacacagugaucucuuacauugaauccaauagaaagaacaauaaacagaccauccaccuucugaagcggcucccugccgacguucugaaaaagacaauuaagaacacccuugauauccauaaaagcauuacaaucaauaaccccaaggagucuaccguguccgacacgaacgaucacgcuaaaaauaacgacaccacaugaggacuaguggaagcauuuuccuggcugauuaaaagaaauuacucagcuauggucaucuguuccuguuagaaggcuaugcagcauauuauauacuaugcgcauguuaugaaaugcauaauaaaaaauuuuaaaaaaucuaaaagaucuaaaaaaaaaaaaaaaaaaaaaaaaaaaaaaaaaaaaaaaaaaaaaaaaaaaaaaaaaaaaaaaaugcaucccccccccccccccccccccccccccccccaaaggcucuuuucagagccaccagaauu

SEQ ID NO: 11502 - RNA, 959 nt, Artificial Sequence
  mRNA product Design h-3 comprising derived and/or modified sequence from HRSV(A2)__P04545.1__M2-1 (opt6)
gggagacccgugacccggaaguuguacggcuacgcgacuuucccucccacaaacccucgcgcccuuccuuuccuacuugggcccggcagaaagcuuaccaugucaagaagaaacccaugcaaauucgaaauaagaggacacugccuaaacggaaaaagaugccacuucucacacaacuacuucgaauggccaccacacgcacuacuuguaagacaaaacuucaugcuaaacagaauacuaaaaucaauggacaaaucaauagacacauuaucagaaauaucaggagcagcagaacucgacagaacagaagaauacgcacuaggaguaguaggaguacuagaaucauacauaggaucaauaaacaacauaacaaaacaaucagcaugcguagccauguccaaacuacuaacagaacuaaacuccgacgacauaaaaaaacuaagagacaacgaagaacuaaacucaccaaaaauaagaguauacaacacaguaauaucauacauagaaucaaacagaaaaaacaauaaacaaacaauacaccuacuaaaaagacucccagcagacguacuaaaaaaaacaauaaaaaacacacuagacauccacaaaucaauaacaauaaacaacccaaaagaaucaacagucucagacaccaacgaccacgcaaaaaacaacgacacaacauaaggacuaguggaagcauuuuccuggcugauuaaaagaaauuacucagcuauggucaucuguuccuguuagaaggcuaugcagcauauuauauacuaugcgcauguuaugaaaugcauaauaaaaaauuuuaaaaaaucuaaaagaucuaaaaaaaaaaaaaaaaaaaaaaaaaaaaaaaaaaaaaaaaaaaaaaaaaaaaaaaaaaaaaaaaugcaucccccccccccccccccccccccccccccccaaaggcucuuuucagagccaccagaauu

SEQ ID NO: 11503 - RNA, 959 nt, Artificial Sequence
  mRNA product Design h-3 comprising derived and/or modified sequence from HRSV(A2)__P04545.1__M2-1 (opt11)
gggagacccgugacccggaaguuguacggcuacgcgacuuucccucccacaaacccucgcgcccuuccuuuccuacuugggcccggcagaaagcuuaccaugucacgacgcaaccccugcaaauucgaaauccgcggccacugccuaaacggcaaacgcugccacuucucccacaacuacuucgaauggcccccccacgcccuccuuguccgccaaaacuucaugcucaaccgcauccucaaauccauggacaaaagcaucgacacccucuccgaaaucuccggcgcagccgaacucgaccgcaccgaagaauacgcccucggcgucguaggcguccucgaauccuacaucggcucaaucaacaacaucaccaaacaauccgccugcgucgccauguccaaacuccucaccgaacucaacuccgacgacaucaaaaaacuccgcgacaacgaagaacucaacucccccaaaauccgagucuacaacaccguaaucuccuacaucgaauccaaccgcaaaaacaacaaacaaaccauccaccuacuaaaacgacuccccgccgacguccucaaaaaaacaaucaaaaacacccucgacauccacaaauccaucaccaucaacaaccccaaagaaucaaccgucuccgacaccaacgaccacgccaaaaacaacgacaccaccugaggacuaguggaagcauuuuccuggcugauuaaaagaaauuacucagcuauggucaucuguuccuguuagaaggcuaugcagcauauuauauacuaugcgcauguuaugaaaugcauaauaaaaaauuuuaaaaaaucuaaaagaucuaaaaaaaaaaaaaaaaaaaaaaaaaaaaaaaaaaaaaaaaaaaaaaaaaaaaaaaaaaaaaaaaugcaucccccccccccccccccccccccccccccccaaaggcucuuuucagagccaccagaauu

SEQ ID NO: 11504 - RNA, 1022 nt, Artificial Sequence
  mRNA product Design h-4 comprising derived and/or modified sequence from HRSV(A2)__P04545.1__M2-1 (wt)
gggagagggcgcuuggcuugcaaggacccugagcugcggcauugaagcacacccaacccaacucgacugaagucagccucacugaaccggaucugagaaucuucucucucugggcuugccagggcucuccgaaccuagcuagcauccucuucaauuccaacuagaaagcuuaccaugucacgaaggaauccuugcaaauuugaaauucgaggucauugcuuaaaugguaagaggugucauuuuagucauaauuauuuugaauggccaccccaugcacugcuuguaagacaaaacuuuauguuaaacagaauacuuaagucuauggauaaaaguauagauaccuuaucagaaauaaguggagcugcagaguuggacagaacagaagaguaugcucuugguguaguuggagugcuagagaguuauauaggaucaauaaacaauauaacuaaacaaucagcauguguugccaugagcaaacuccucacugaacucaauagugaugauaucaaaaagcugagggacaaugaagagcuaaauucacccaagauaagaguguacaauacugucauaucauauauugaaagcaacaggaaaaacaauaaacaaacuauccaucuguuaaaaagauugccagcagacguauugaagaaaaccaucaaaaacacauuggauauccauaagagcauaaccaucaacaacccaaaagaaucaacuguuagugauacaaaugaccaugccaaaaauaaugauacuaccugaggacuaguaauaaggaaacuguaugaaugucugugggcaggaagugaagagauccuucuguaaagguuuuuggaauuaugucugcugaauaauaaacuuuuuugaaauaauaaaucugguagaaaaaugagaucuaaaaaaaaaaaaaaaaaaaaaaaaaaaaaaaaaaaaaaaaaaaaaaaaaaaaaaaaaaaaaaaaugcaucccccccccccccccccccccccccccccccaaaggcucuuuucagagccaccagaauu

SEQ ID NO: 11505 - RNA, 1022 nt, Artificial Sequence
  mRNA product Design h-4 comprising derived and/or modified sequence from HRSV(A2)__P04545.1__M2-1 (opt1)
gggagagggcgcuuggcuugcaaggacccugagcugcggcauugaagcacacccaacccaacucgacugaagucagccucacugaaccggaucugagaaucuucucucucugggcuugccagggcucuccgaaccuagcuagcauccucuucaauuccaacuagaaagcuuaccaugagccgccggaaccccugcaaguucgagauccgcggccacugccugaacgggaagcggugccacuucucccacaacuacuucgaguggccgccccacgcccuccuggugcgccagaacuucaugcugaaccggauccucaagagcauggacaaguccaucgacacccugagcgagaucuccggcgccgcggagcuggaccgcaccgaggaguacgcccucggggucgugggcgugcuggagagcuacaucggguccaucaacaacaucacgaagcagagcgccugcgucgccauguccaagcugcucaccgagcugaacagcgacgacaucaagaagcugcgggacaacgaggagcucaacucccccaagauccgcguguacaacaccgugaucagcuacaucgaguccaaccggaagaacaacaagcagaccauccaccuccugaagcgccugcccgccgacguccugaagaagacgaucaagaacacccuggacauccacaagagcaucaccaucaacaacccgaaggaguccaccgugagcgacacgaacgaccacgcgaagaacaacgacaccaccugaggacuaguaauaaggaaacuguaugaaugucugugggcaggaagugaagagauccuucuguaaagguuuuuggaauuaugucugcugaauaauaaacuuuuuugaaauaauaaaucugguagaaaaaugagaucuaaaaaaaaaaaaaaaaaaaaaaaaaaaaaaaaaaaaaaaaaaaaaaaaaaaaaaaaaaaaaaaaugcaucccccccccccccccccccccccccccccccaaaggcucuuuucagagccaccagaauu

SEQ ID NO: 11506 - RNA, 1022 nt, Artificial Sequence
  mRNA product Design h-4 comprising derived and/or modified sequence from HRSV(A2)__P04545.1__M2-1 (opt2)
gggagagggcgcuuggcuugcaaggacccugagcugcggcauugaagcacacccaacccaacucgacugaagucagccucacugaaccggaucugagaaucuucucucucugggcuugccagggcucuccgaaccuagcuagcauccucuucaauuccaacuagaaagcuuaccaugucccgccgcaaccccugcaaguucgagauccgcggccacugccucaacggcaagcgcugccacuucucccacaacuacuucgaguggcccccccacgcccuccucguccgccagaacuucaugcucaaccgcauccucaaguccauggacaaguccaucgacacccucuccgagaucuccggcgccgccgagcucgaccgcaccgaggaguacgcccucggcgucgucggcguccucgaguccuacaucggcuccaucaacaacaucaccaagcaguccgccugcgucgccauguccaagcuccucaccgagcucaacuccgacgacaucaagaagcuccgcgacaacgaggagcucaacucccccaagauccgcgucuacaacaccgucaucuccuacaucgaguccaaccgcaagaacaacaagcagaccauccaccuccucaagcgccuccccgccgacguccucaagaagaccaucaagaacacccucgacauccacaaguccaucaccaucaacaaccccaaggaguccaccgucuccgacaccaacgaccacgccaagaacaacgacaccaccugaggacuaguaauaaggaaacuguaugaaugucugugggcaggaagugaagagauccuucuguaaagguuuuuggaauuaugucugcugaauaauaaacuuuuuugaaauaauaaaucugguagaaaaaugagaucuaaaaaaaaaaaaaaaaaaaaaaaaaaaaaaaaaaaaaaaaaaaaaaaaaaaaaaaaaaaaaaaaugcaucccccccccccccccccccccccccccccccaaaggcucuuuucagagccaccagaauu

SEQ ID NO: 11507 - RNA, 1022 nt, Artificial Sequence
  mRNA product Design h-4 comprising derived and/or modified sequence from HRSV(A2)__P04545.1__M2-1 (opt3)
gggagagggcgcuuggcuugcaaggacccugagcugcggcauugaagcacacccaacccaacucgacugaagucagccucacugaaccggaucugagaaucuucucucucugggcuugccagggcucuccgaaccuagcuagcauccucuucaauuccaacuagaaagcuuaccaugagcagaaggaaccccugcaaguucgagauccggggccacugucugaaugggaaacgcugccauuuuucccacaacuacuucgaauggccuccacaugcacuccuugugcgacagaauuuuaugcugaaccguauuuugaagucuauggacaaaucaauagauaccuuaagugagaucagcggagcugcagaacuggacagaacagaggaauaugcccuaggugucguuggcgugcucgaguccuacauugggucuaucaauaacauuacuaagcaaucggcguguguagcuaugucaaaacugcuuacggagcugaauagcgaugacaucaagaaguugagggauaacgaagaguuaaauaguccgaaaauacggguguauaacaccgucaucuccuacauugaaucuaaucgcaagaacaauaaacagacaauccaucugcugaagagacuccccgccgacgugcucaaaaagacuauuaagaacacccuggauauccacaaaagcauaacaauuaauaacccuaaggaguccaccguuucagacacuaacgaucacgccaaaaauaacgacacaaccugaggacuaguaauaaggaaacuguaugaaugucugugggcaggaagugaagagauccuucuguaaagguuuuuggaauuaugucugcugaauaauaaacuuuuuugaaauaauaaaucugguagaaaaaugagaucuaaaaaaaaaaaaaaaaaaaaaaaaaaaaaaaaaaaaaaaaaaaaaaaaaaaaaaaaaaaaaaaaugcaucccccccccccccccccccccccccccccccaaaggcucuuuucagagccaccagaauu

SEQ ID NO: 11508 - RNA, 1022 nt, Artificial Sequence
  mRNA product Design h-4 comprising derived and/or modified sequence from HRSV(A2)__P04545.1__M2-1 (opt4)
gggagagggcgcuuggcuugcaaggacccugagcugcggcauugaagcacacccaacccaacucgacugaagucagccucacugaaccggaucugagaaucuucucucucugggcuugccagggcucuccgaaccuagcuagcauccucuucaauuccaacuagaaagcuuaccaugagcagaagaaaccccugcaaguucgagaucagaggccacugccugaacggcaagagaugccacuucagccacaacuacuucgaguggcccccccacgcccugcuggugagacagaacuucaugcugaacagaauccugaagagcauggacaagagcaucgacacccugagcgagaucagcggcgccgccgagcuggacagaaccgaggaguacgcccugggcguggugggcgugcuggagagcuacaucggcagcaucaacaacaucaccaagcagagcgccugcguggccaugagcaagcugcugaccgagcugaacagcgacgacaucaagaagcugagagacaacgaggagcugaacagccccaagaucagaguguacaacaccgugaucagcuacaucgagagcaacagaaagaacaacaagcagaccauccaccugcugaagagacugcccgccgacgugcugaagaagaccaucaagaacacccuggacauccacaagagcaucaccaucaacaaccccaaggagagcaccgugagcgacaccaacgaccacgccaagaacaacgacaccaccugaggacuaguaauaaggaaacuguaugaaugucugugggcaggaagugaagagauccuucuguaaagguuuuuggaauuaugucugcugaauaauaaacuuuuuugaaauaauaaaucugguagaaaaaugagaucuaaaaaaaaaaaaaaaaaaaaaaaaaaaaaaaaaaaaaaaaaaaaaaaaaaaaaaaaaaaaaaaaugcaucccccccccccccccccccccccccccccccaaaggcucuuuucagagccaccagaauu

SEQ ID NO: 11509 - RNA, 1022 nt, Artificial Sequence
  mRNA product Design h-4 comprising derived and/or modified sequence from HRSV(A2)__P04545.1__M2-1 (opt5)
gggagagggcgcuuggcuugcaaggacccugagcugcggcauugaagcacacccaacccaacucgacugaagucagccucacugaaccggaucugagaaucuucucucucugggcuugccagggcucuccgaaccuagcuagcauccucuucaauuccaacuagaaagcuuaccaugagcagacggaaccccugcaaguucgagauccgcggccacugucugaaugggaaaagaugccauuuuucccacaacuacuucgaauggccuccgcaugcccuccuggugcggcagaauuuuaugcuuaaccgcauucugaagucuauggacaaaagcaucgauacccucuccgagauuucuggagcugccgaacuggacagaacagaggaauaugcgcuuggcgucguuggggugcuggagagcuacaucggauccauuaauaacaucacgaagcaaucugcuuguguggccaugagcaaacuccugaccgagcucaauuccgaugacaucaagaagcugcgggauaacgaggaacugaauagccccaaaauucgcgucuauaacacagugaucucuuacauugaauccaauagaaagaacaauaaacagaccauccaccuucugaagcggcucccugccgacguucugaaaaagacaauuaagaacacccuugauauccauaaaagcauuacaaucaauaaccccaaggagucuaccguguccgacacgaacgaucacgcuaaaaauaacgacaccacaugaggacuaguaauaaggaaacuguaugaaugucugugggcaggaagugaagagauccuucuguaaagguuuuuggaauuaugucugcugaauaauaaacuuuuuugaaauaauaaaucugguagaaaaaugagaucuaaaaaaaaaaaaaaaaaaaaaaaaaaaaaaaaaaaaaaaaaaaaaaaaaaaaaaaaaaaaaaaaugcaucccccccccccccccccccccccccccccccaaaggcucuuuucagagccaccagaauu

SEQ ID NO: 11510 - RNA, 1022 nt, Artificial Sequence
  mRNA product Design h-4 comprising derived and/or modified sequence from HRSV(A2)__P04545.1__M2-1 (opt6)
gggagagggcgcuuggcuugcaaggacccugagcugcggcauugaagcacacccaacccaacucgacugaagucagccucacugaaccggaucugagaaucuucucucucugggcuugccagggcucuccgaaccuagcuagcauccucuucaauuccaacuagaaagcuuaccaugucaagaagaaacccaugcaaauucgaaauaagaggacacugccuaaacggaaaaagaugccacuucucacacaacuacuucgaauggccaccacacgcacuacuuguaagacaaaacuucaugcuaaacagaauacuaaaaucaauggacaaaucaauagacacauuaucagaaauaucaggagcagcagaacucgacagaacagaagaauacgcacuaggaguaguaggaguacuagaaucauacauaggaucaauaaacaacauaacaaaacaaucagcaugcguagccauguccaaacuacuaacagaacuaaacuccgacgacauaaaaaaacuaagagacaacgaagaacuaaacucaccaaaaauaagaguauacaacacaguaauaucauacauagaaucaaacagaaaaaacaauaaacaaacaauacaccuacuaaaaagacucccagcagacguacuaaaaaaaacaauaaaaaacacacuagacauccacaaaucaauaacaauaaacaacccaaaagaaucaacagucucagacaccaacgaccacgcaaaaaacaacgacacaacauaaggacuaguaauaaggaaacuguaugaaugucugugggcaggaagugaagagauccuucuguaaagguuuuuggaauuaugucugcugaauaauaaacuuuuuugaaauaauaaaucugguagaaaaaugagaucuaaaaaaaaaaaaaaaaaaaaaaaaaaaaaaaaaaaaaaaaaaaaaaaaaaaaaaaaaaaaaaaaugcaucccccccccccccccccccccccccccccccaaaggcucuuuucagagccaccagaauu

SEQ ID NO: 11511 - RNA, 1022 nt, Artificial Sequence
  mRNA product Design h-4 comprising derived and/or modified sequence from HRSV(A2)__P04545.1__M2-1 (opt11)
gggagagggcgcuuggcuugcaaggacccugagcugcggcauugaagcacacccaacccaacucgacugaagucagccucacugaaccggaucugagaaucuucucucucugggcuugccagggcucuccgaaccuagcuagcauccucuucaauuccaacuagaaagcuuaccaugucacgacgcaaccccugcaaauucgaaauccgcggccacugccuaaacggcaaacgcugccacuucucccacaacuacuucgaauggcccccccacgcccuccuuguccgccaaaacuucaugcucaaccgcauccucaaauccauggacaaaagcaucgacacccucuccgaaaucuccggcgcagccgaacucgaccgcaccgaagaauacgcccucggcgucguaggcguccucgaauccuacaucggcucaaucaacaacaucaccaaacaauccgccugcgucgccauguccaaacuccucaccgaacucaacuccgacgacaucaaaaaacuccgcgacaacgaagaacucaacucccccaaaauccgagucuacaacaccguaaucuccuacaucgaauccaaccgcaaaaacaacaaacaaaccauccaccuacuaaaacgacuccccgccgacguccucaaaaaaacaaucaaaaacacccucgacauccacaaauccaucaccaucaacaaccccaaagaaucaaccgucuccgacaccaacgaccacgccaaaaacaacgacaccaccugaggacuaguaauaaggaaacuguaugaaugucugugggcaggaagugaagagauccuucuguaaagguuuuuggaauuaugucugcugaauaauaaacuuuuuugaaauaauaaaucugguagaaaaaugagaucuaaaaaaaaaaaaaaaaaaaaaaaaaaaaaaaaaaaaaaaaaaaaaaaaaaaaaaaaaaaaaaaaugcaucccccccccccccccccccccccccccccccaaaggcucuuuucagagccaccagaauu

SEQ ID NO: 11512 - RNA, 1038 nt, Artificial Sequence
  mRNA product Design h-5 comprising derived and/or modified sequence from HRSV(A2)__P04545.1__M2-1 (wt)
gggagagggcgcuuggcuugcaaggacccugagcugcggcauugaagcacacccaacccaacucgacugaagucagccucacugaaccggaucugagaaucuucucucucugggcuugccagggcucuccgaaccuagcuagcauccucuucaauuccaacuagaaagcuuaccaugucacgaaggaauccuugcaaauuugaaauucgaggucauugcuuaaaugguaagaggugucauuuuagucauaauuauuuugaauggccaccccaugcacugcuuguaagacaaaacuuuauguuaaacagaauacuuaagucuauggauaaaaguauagauaccuuaucagaaauaaguggagcugcagaguuggacagaacagaagaguaugcucuugguguaguuggagugcuagagaguuauauaggaucaauaaacaauauaacuaaacaaucagcauguguugccaugagcaaacuccucacugaacucaauagugaugauaucaaaaagcugagggacaaugaagagcuaaauucacccaagauaagaguguacaauacugucauaucauauauugaaagcaacaggaaaaacaauaaacaaacuauccaucuguuaaaaagauugccagcagacguauugaagaaaaccaucaaaaacacauuggauauccauaagagcauaaccaucaacaacccaaaagaaucaacuguuagugauacaaaugaccaugccaaaaauaaugauacuaccugaggacuaguacuggcugcaucucccuuuccucuguccuccauccuucucccaggauggugaagggggaccugguacccagugauccccaccccaggauccuaaaucaugacuuaccugcuaauaaaaacucauuggaaaagugagaagaucuaaaaaaaaaaaaaaaaaaaaaaaaaaaaaaaaaaaaaaaaaaaaaaaaaaaaaaaaaaaaaaaaugcaucccccccccccccccccccccccccccccccaaaggcucuuuucagagccaccagaauu

SEQ ID NO: 11513 - RNA, 1038 nt, Artificial Sequence
  mRNA product Design h-5 comprising derived and/or modified sequence from HRSV(A2)__P04545.1__M2-1 (opt1)
gggagagggcgcuuggcuugcaaggacccugagcugcggcauugaagcacacccaacccaacucgacugaagucagccucacugaaccggaucugagaaucuucucucucugggcuugccagggcucuccgaaccuagcuagcauccucuucaauuccaacuagaaagcuuaccaugagccgccggaaccccugcaaguucgagauccgcggccacugccugaacgggaagcggugccacuucucccacaacuacuucgaguggccgccccacgcccuccuggugcgccagaacuucaugcugaaccggauccucaagagcauggacaaguccaucgacacccugagcgagaucuccggcgccgcggagcuggaccgcaccgaggaguacgcccucggggucgugggcgugcuggagagcuacaucggguccaucaacaacaucacgaagcagagcgccugcgucgccauguccaagcugcucaccgagcugaacagcgacgacaucaagaagcugcgggacaacgaggagcucaacucccccaagauccgcguguacaacaccgugaucagcuacaucgaguccaaccggaagaacaacaagcagaccauccaccuccugaagcgccugcccgccgacguccugaagaagacgaucaagaacacccuggacauccacaagagcaucaccaucaacaacccgaaggaguccaccgugagcgacacgaacgaccacgcgaagaacaacgacaccaccugaggacuaguacuggcugcaucucccuuuccucuguccuccauccuucucccaggauggugaagggggaccugguacccagugauccccaccccaggauccuaaaucaugacuuaccugcuaauaaaaacucauuggaaaagugagaagaucuaaaaaaaaaaaaaaaaaaaaaaaaaaaaaaaaaaaaaaaaaaaaaaaaaaaaaaaaaaaaaaaaugcaucccccccccccccccccccccccccccccccaaaggcucuuuucagagccaccagaauu

SEQ ID NO: 11514 - RNA, 1038 nt, Artificial Sequence
  mRNA product Design h-5 comprising derived and/or modified sequence from HRSV(A2)__P04545.1__M2-1 (opt2)
gggagagggcgcuuggcuugcaaggacccugagcugcggcauugaagcacacccaacccaacucgacugaagucagccucacugaaccggaucugagaaucuucucucucugggcuugccagggcucuccgaaccuagcuagcauccucuucaauuccaacuagaaagcuuaccaugucccgccgcaaccccugcaaguucgagauccgcggccacugccucaacggcaagcgcugccacuucucccacaacuacuucgaguggcccccccacgcccuccucguccgccagaacuucaugcucaaccgcauccucaaguccauggacaaguccaucgacacccucuccgagaucuccggcgccgccgagcucgaccgcaccgaggaguacgcccucggcgucgucggcguccucgaguccuacaucggcuccaucaacaacaucaccaagcaguccgccugcgucgccauguccaagcuccucaccgagcucaacuccgacgacaucaagaagcuccgcgacaacgaggagcucaacucccccaagauccgcgucuacaacaccgucaucuccuacaucgaguccaaccgcaagaacaacaagcagaccauccaccuccucaagcgccuccccgccgacguccucaagaagaccaucaagaacacccucgacauccacaaguccaucaccaucaacaaccccaaggaguccaccgucuccgacaccaacgaccacgccaagaacaacgacaccaccugaggacuaguacuggcugcaucucccuuuccucuguccuccauccuucucccaggauggugaagggggaccugguacccagugauccccaccccaggauccuaaaucaugacuuaccugcuaauaaaaacucauuggaaaagugagaagaucuaaaaaaaaaaaaaaaaaaaaaaaaaaaaaaaaaaaaaaaaaaaaaaaaaaaaaaaaaaaaaaaaugcaucccccccccccccccccccccccccccccccaaaggcucuuuucagagccaccagaauu

SEQ ID NO: 11515 - RNA, 1038 nt, Artificial Sequence
  mRNA product Design h-5 comprising derived and/or modified sequence from HRSV(A2)__P04545.1__M2-1 (opt3)
gggagagggcgcuuggcuugcaaggacccugagcugcggcauugaagcacacccaacccaacucgacugaagucagccucacugaaccggaucugagaaucuucucucucugggcuugccagggcucuccgaaccuagcuagcauccucuucaauuccaacuagaaagcuuaccaugagcagaaggaaccccugcaaguucgagauccggggccacugucugaaugggaaacgcugccauuuuucccacaacuacuucgaauggccuccacaugcacuccuugugcgacagaauuuuaugcugaaccguauuuugaagucuauggacaaaucaauagauaccuuaagugagaucagcggagcugcagaacuggacagaacagaggaauaugcccuaggugucguuggcgugcucgaguccuacauugggucuaucaauaacauuacuaagcaaucggcguguguagcuaugucaaaacugcuuacggagcugaauagcgaugacaucaagaaguugagggauaacgaagaguuaaauaguccgaaaauacggguguauaacaccgucaucuccuacauugaaucuaaucgcaagaacaauaaacagacaauccaucugcugaagagacuccccgccgacgugcucaaaaagacuauuaagaacacccuggauauccacaaaagcauaacaauuaauaacccuaaggaguccaccguuucagacacuaacgaucacgccaaaaauaacgacacaaccugaggacuaguacuggcugcaucucccuuuccucuguccuccauccuucucccaggauggugaagggggaccugguacccagugauccccaccccaggauccuaaaucaugacuuaccugcuaauaaaaacucauuggaaaagugagaagaucuaaaaaaaaaaaaaaaaaaaaaaaaaaaaaaaaaaaaaaaaaaaaaaaaaaaaaaaaaaaaaaaaugcaucccccccccccccccccccccccccccccccaaaggcucuuuucagagccaccagaauu

SEQ ID NO: 11516 - RNA, 1038 nt, Artificial Sequence
  mRNA product Design h-5 comprising derived and/or modified sequence from HRSV(A2)__P04545.1__M2-1 (opt4)
gggagagggcgcuuggcuugcaaggacccugagcugcggcauugaagcacacccaacccaacucgacugaagucagccucacugaaccggaucugagaaucuucucucucugggcuugccagggcucuccgaaccuagcuagcauccucuucaauuccaacuagaaagcuuaccaugagcagaagaaaccccugcaaguucgagaucagaggccacugccugaacggcaagagaugccacuucagccacaacuacuucgaguggcccccccacgcccugcuggugagacagaacuucaugcugaacagaauccugaagagcauggacaagagcaucgacacccugagcgagaucagcggcgccgccgagcuggacagaaccgaggaguacgcccugggcguggugggcgugcuggagagcuacaucggcagcaucaacaacaucaccaagcagagcgccugcguggccaugagcaagcugcugaccgagcugaacagcgacgacaucaagaagcugagagacaacgaggagcugaacagccccaagaucagaguguacaacaccgugaucagcuacaucgagagcaacagaaagaacaacaagcagaccauccaccugcugaagagacugcccgccgacgugcugaagaagaccaucaagaacacccuggacauccacaagagcaucaccaucaacaaccccaaggagagcaccgugagcgacaccaacgaccacgccaagaacaacgacaccaccugaggacuaguacuggcugcaucucccuuuccucuguccuccauccuucucccaggauggugaagggggaccugguacccagugauccccaccccaggauccuaaaucaugacuuaccugcuaauaaaaacucauuggaaaagugagaagaucuaaaaaaaaaaaaaaaaaaaaaaaaaaaaaaaaaaaaaaaaaaaaaaaaaaaaaaaaaaaaaaaaugcaucccccccccccccccccccccccccccccccaaaggcucuuuucagagccaccagaauu

SEQ ID NO: 11517 - RNA, 1038 nt, Artificial Sequence
  mRNA product Design h-5 comprising derived and/or modified sequence from HRSV(A2)__P04545.1__M2-1 (opt5)
gggagagggcgcuuggcuugcaaggacccugagcugcggcauugaagcacacccaacccaacucgacugaagucagccucacugaaccggaucugagaaucuucucucucugggcuugccagggcucuccgaaccuagcuagcauccucuucaauuccaacuagaaagcuuaccaugagcagacggaaccccugcaaguucgagauccgcggccacugucugaaugggaaaagaugccauuuuucccacaacuacuucgaauggccuccgcaugcccuccuggugcggcagaauuuuaugcuuaaccgcauucugaagucuauggacaaaagcaucgauacccucuccgagauuucuggagcugccgaacuggacagaacagaggaauaugcgcuuggcgucguuggggugcuggagagcuacaucggauccauuaauaacaucacgaagcaaucugcuuguguggccaugagcaaacuccugaccgagcucaauuccgaugacaucaagaagcugcgggauaacgaggaacugaauagccccaaaauucgcgucuauaacacagugaucucuuacauugaauccaauagaaagaacaauaaacagaccauccaccuucugaagcggcucccugccgacguucugaaaaagacaauuaagaacacccuugauauccauaaaagcauuacaaucaauaaccccaaggagucuaccguguccgacacgaacgaucacgcuaaaaauaacgacaccacaugaggacuaguacuggcugcaucucccuuuccucuguccuccauccuucucccaggauggugaagggggaccugguacccagugauccccaccccaggauccuaaaucaugacuuaccugcuaauaaaaacucauuggaaaagugagaagaucuaaaaaaaaaaaaaaaaaaaaaaaaaaaaaaaaaaaaaaaaaaaaaaaaaaaaaaaaaaaaaaaaugcaucccccccccccccccccccccccccccccccaaaggcucuuuucagagccaccagaauu

SEQ ID NO: 11518 - RNA, 1038 nt, Artificial Sequence
  mRNA product Design h-5 comprising derived and/or modified sequence from HRSV(A2)__P04545.1__M2-1 (opt6)
gggagagggcgcuuggcuugcaaggacccugagcugcggcauugaagcacacccaacccaacucgacugaagucagccucacugaaccggaucugagaaucuucucucucugggcuugccagggcucuccgaaccuagcuagcauccucuucaauuccaacuagaaagcuuaccaugucaagaagaaacccaugcaaauucgaaauaagaggacacugccuaaacggaaaaagaugccacuucucacacaacuacuucgaauggccaccacacgcacuacuuguaagacaaaacuucaugcuaaacagaauacuaaaaucaauggacaaaucaauagacacauuaucagaaauaucaggagcagcagaacucgacagaacagaagaauacgcacuaggaguaguaggaguacuagaaucauacauaggaucaauaaacaacauaacaaaacaaucagcaugcguagccauguccaaacuacuaacagaacuaaacuccgacgacauaaaaaaacuaagagacaacgaagaacuaaacucaccaaaaauaagaguauacaacacaguaauaucauacauagaaucaaacagaaaaaacaauaaacaaacaauacaccuacuaaaaagacucccagcagacguacuaaaaaaaacaauaaaaaacacacuagacauccacaaaucaauaacaauaaacaacccaaaagaaucaacagucucagacaccaacgaccacgcaaaaaacaacgacacaacauaaggacuaguacuggcugcaucucccuuuccucuguccuccauccuucucccaggauggugaagggggaccugguacccagugauccccaccccaggauccuaaaucaugacuuaccugcuaauaaaaacucauuggaaaagugagaagaucuaaaaaaaaaaaaaaaaaaaaaaaaaaaaaaaaaaaaaaaaaaaaaaaaaaaaaaaaaaaaaaaaugcaucccccccccccccccccccccccccccccccaaaggcucuuuucagagccaccagaauu

SEQ ID NO: 11519 - RNA, 1038 nt, Artificial Sequence
  mRNA product Design h-5 comprising derived and/or modified sequence from HRSV(A2)__P04545.1__M2-1 (opt11)
gggagagggcgcuuggcuugcaaggacccugagcugcggcauugaagcacacccaacccaacucgacugaagucagccucacugaaccggaucugagaaucuucucucucugggcuugccagggcucuccgaaccuagcuagcauccucuucaauuccaacuagaaagcuuaccaugucacgacgcaaccccugcaaauucgaaauccgcggccacugccuaaacggcaaacgcugccacuucucccacaacuacuucgaauggcccccccacgcccuccuuguccgccaaaacuucaugcucaaccgcauccucaaauccauggacaaaagcaucgacacccucuccgaaaucuccggcgcagccgaacucgaccgcaccgaagaauacgcccucggcgucguaggcguccucgaauccuacaucggcucaaucaacaacaucaccaaacaauccgccugcgucgccauguccaaacuccucaccgaacucaacuccgacgacaucaaaaaacuccgcgacaacgaagaacucaacucccccaaaauccgagucuacaacaccguaaucuccuacaucgaauccaaccgcaaaaacaacaaacaaaccauccaccuacuaaaacgacuccccgccgacguccucaaaaaaacaaucaaaaacacccucgacauccacaaauccaucaccaucaacaaccccaaagaaucaaccgucuccgacaccaacgaccacgccaaaaacaacgacaccaccugaggacuaguacuggcugcaucucccuuuccucuguccuccauccuucucccaggauggugaagggggaccugguacccagugauccccaccccaggauccuaaaucaugacuuaccugcuaauaaaaacucauuggaaaagugagaagaucuaaaaaaaaaaaaaaaaaaaaaaaaaaaaaaaaaaaaaaaaaaaaaaaaaaaaaaaaaaaaaaaaugcaucccccccccccccccccccccccccccccccaaaggcucuuuucagagccaccagaauu

SEQ ID NO: 11520 - RNA, 971 nt, Artificial Sequence
  mRNA product Design i-1 comprising derived and/or modified sequence from HRSV(A2)__P04545.1__M2-1 (wt)
gggagagggcgcuuggcuugcaaggacccugagcugcggcauugaagcacacccaacccaacucgacugaagucagccucacugaaccggaucugagaaucuucucucucugggcuugccagggcucuccgaaccuagcuagcauccucuucaauuccaacuagaaagcuuaccaugucacgaaggaauccuugcaaauuugaaauucgaggucauugcuuaaaugguaagaggugucauuuuagucauaauuauuuugaauggccaccccaugcacugcuuguaagacaaaacuuuauguuaaacagaauacuuaagucuauggauaaaaguauagauaccuuaucagaaauaaguggagcugcagaguuggacagaacagaagaguaugcucuugguguaguuggagugcuagagaguuauauaggaucaauaaacaauauaacuaaacaaucagcauguguugccaugagcaaacuccucacugaacucaauagugaugauaucaaaaagcugagggacaaugaagagcuaaauucacccaagauaagaguguacaauacugucauaucauauauugaaagcaacaggaaaaacaauaaacaaacuauccaucuguuaaaaagauugccagcagacguauugaagaaaaccaucaaaaacacauuggauauccauaagagcauaaccaucaacaacccaaaagaaucaacuguuagugauacaaaugaccaugccaaaaauaaugauacuaccugaggacuaguguccaccugucccuccugggcugcuggauugucucguuuuccugccaaauaaacaggaucagcgcuuuacagaucuaaaaaaaaaaaaaaaaaaaaaaaaaaaaaaaaaaaaaaaaaaaaaaaaaaaaaaaaaaaaaaaaugcaucccccccccccccccccccccccccccccccaaaggcucuuuucagagccaccagaauu

SEQ ID NO: 11521 - RNA, 971 nt, Artificial Sequence
  mRNA product Design i-1 comprising derived and/or modified sequence from HRSV(A2)__P04545.1__M2-1 (opt1)
gggagagggcgcuuggcuugcaaggacccugagcugcggcauugaagcacacccaacccaacucgacugaagucagccucacugaaccggaucugagaaucuucucucucugggcuugccagggcucuccgaaccuagcuagcauccucuucaauuccaacuagaaagcuuaccaugagccgccggaaccccugcaaguucgagauccgcggccacugccugaacgggaagcggugccacuucucccacaacuacuucgaguggccgccccacgcccuccuggugcgccagaacuucaugcugaaccggauccucaagagcauggacaaguccaucgacacccugagcgagaucuccggcgccgcggagcuggaccgcaccgaggaguacgcccucggggucgugggcgugcuggagagcuacaucggguccaucaacaacaucacgaagcagagcgccugcgucgccauguccaagcugcucaccgagcugaacagcgacgacaucaagaagcugcgggacaacgaggagcucaacucccccaagauccgcguguacaacaccgugaucagcuacaucgaguccaaccggaagaacaacaagcagaccauccaccuccugaagcgccugcccgccgacguccugaagaagacgaucaagaacacccuggacauccacaagagcaucaccaucaacaacccgaaggaguccaccgugagcgacacgaacgaccacgcgaagaacaacgacaccaccugaggacuaguguccaccugucccuccugggcugcuggauugucucguuuuccugccaaauaaacaggaucagcgcuuuacagaucuaaaaaaaaaaaaaaaaaaaaaaaaaaaaaaaaaaaaaaaaaaaaaaaaaaaaaaaaaaaaaaaaugcaucccccccccccccccccccccccccccccccaaaggcucuuuucagagccaccagaauu

SEQ ID NO: 11522 - RNA, 971 nt, Artificial Sequence
  mRNA product Design i-1 comprising derived and/or modified sequence from HRSV(A2)__P04545.1__M2-1 (opt2)
gggagagggcgcuuggcuugcaaggacccugagcugcggcauugaagcacacccaacccaacucgacugaagucagccucacugaaccggaucugagaaucuucucucucugggcuugccagggcucuccgaaccuagcuagcauccucuucaauuccaacuagaaagcuuaccaugucccgccgcaaccccugcaaguucgagauccgcggccacugccucaacggcaagcgcugccacuucucccacaacuacuucgaguggcccccccacgcccuccucguccgccagaacuucaugcucaaccgcauccucaaguccauggacaaguccaucgacacccucuccgagaucuccggcgccgccgagcucgaccgcaccgaggaguacgcccucggcgucgucggcguccucgaguccuacaucggcuccaucaacaacaucaccaagcaguccgccugcgucgccauguccaagcuccucaccgagcucaacuccgacgacaucaagaagcuccgcgacaacgaggagcucaacucccccaagauccgcgucuacaacaccgucaucuccuacaucgaguccaaccgcaagaacaacaagcagaccauccaccuccucaagcgccuccccgccgacguccucaagaagaccaucaagaacacccucgacauccacaaguccaucaccaucaacaaccccaaggaguccaccgucuccgacaccaacgaccacgccaagaacaacgacaccaccugaggacuaguguccaccugucccuccugggcugcuggauugucucguuuuccugccaaauaaacaggaucagcgcuuuacagaucuaaaaaaaaaaaaaaaaaaaaaaaaaaaaaaaaaaaaaaaaaaaaaaaaaaaaaaaaaaaaaaaaugcaucccccccccccccccccccccccccccccccaaaggcucuuuucagagccaccagaauu

SEQ ID NO: 11523 - RNA, 971 nt, Artificial Sequence
  mRNA product Design i-1 comprising derived and/or modified sequence from HRSV(A2)__P04545.1__M2-1 (opt3)
gggagagggcgcuuggcuugcaaggacccugagcugcggcauugaagcacacccaacccaacucgacugaagucagccucacugaaccggaucugagaaucuucucucucugggcuugccagggcucuccgaaccuagcuagcauccucuucaauuccaacuagaaagcuuaccaugagcagaaggaaccccugcaaguucgagauccggggccacugucugaaugggaaacgcugccauuuuucccacaacuacuucgaauggccuccacaugcacuccuugugcgacagaauuuuaugcugaaccguauuuugaagucuauggacaaaucaauagauaccuuaagugagaucagcggagcugcagaacuggacagaacagaggaauaugcccuaggugucguuggcgugcucgaguccuacauugggucuaucaauaacauuacuaagcaaucggcguguguagcuaugucaaaacugcuuacggagcugaauagcgaugacaucaagaaguugagggauaacgaagaguuaaauaguccgaaaauacggguguauaacaccgucaucuccuacauugaaucuaaucgcaagaacaauaaacagacaauccaucugcugaagagacuccccgccgacgugcucaaaaagacuauuaagaacacccuggauauccacaaaagcauaacaauuaauaacccuaaggaguccaccguuucagacacuaacgaucacgccaaaaauaacgacacaaccugaggacuaguguccaccugucccuccugggcugcuggauugucucguuuuccugccaaauaaacaggaucagcgcuuuacagaucuaaaaaaaaaaaaaaaaaaaaaaaaaaaaaaaaaaaaaaaaaaaaaaaaaaaaaaaaaaaaaaaaugcaucccccccccccccccccccccccccccccccaaaggcucuuuucagagccaccagaauu

SEQ ID NO: 11524 - RNA, 971 nt, Artificial Sequence
  mRNA product Design i-1 comprising derived and/or modified sequence from HRSV(A2)__P04545.1__M2-1 (opt4)
gggagagggcgcuuggcuugcaaggacccugagcugcggcauugaagcacacccaacccaacucgacugaagucagccucacugaaccggaucugagaaucuucucucucugggcuugccagggcucuccgaaccuagcuagcauccucuucaauuccaacuagaaagcuuaccaugagcagaagaaaccccugcaaguucgagaucagaggccacugccugaacggcaagagaugccacuucagccacaacuacuucgaguggcccccccacgcccugcuggugagacagaacuucaugcugaacagaauccugaagagcauggacaagagcaucgacacccugagcgagaucagcggcgccgccgagcuggacagaaccgaggaguacgcccugggcguggugggcgugcuggagagcuacaucggcagcaucaacaacaucaccaagcagagcgccugcguggccaugagcaagcugcugaccgagcugaacagcgacgacaucaagaagcugagagacaacgaggagcugaacagccccaagaucagaguguacaacaccgugaucagcuacaucgagagcaacagaaagaacaacaagcagaccauccaccugcugaagagacugcccgccgacgugcugaagaagaccaucaagaacacccuggacauccacaagagcaucaccaucaacaaccccaaggagagcaccgugagcgacaccaacgaccacgccaagaacaacgacaccaccugaggacuaguguccaccugucccuccugggcugcuggauugucucguuuuccugccaaauaaacaggaucagcgcuuuacagaucuaaaaaaaaaaaaaaaaaaaaaaaaaaaaaaaaaaaaaaaaaaaaaaaaaaaaaaaaaaaaaaaaugcaucccccccccccccccccccccccccccccccaaaggcucuuuucagagccaccagaauu

SEQ ID NO: 11525 - RNA, 971 nt, Artificial Sequence
  mRNA product Design i-1 comprising derived and/or modified sequence from HRSV(A2)__P04545.1__M2-1 (opt5)
gggagagggcgcuuggcuugcaaggacccugagcugcggcauugaagcacacccaacccaacucgacugaagucagccucacugaaccggaucugagaaucuucucucucugggcuugccagggcucuccgaaccuagcuagcauccucuucaauuccaacuagaaagcuuaccaugagcagacggaaccccugcaaguucgagauccgcggccacugucugaaugggaaaagaugccauuuuucccacaacuacuucgaauggccuccgcaugcccuccuggugcggcagaauuuuaugcuuaaccgcauucugaagucuauggacaaaagcaucgauacccucuccgagauuucuggagcugccgaacuggacagaacagaggaauaugcgcuuggcgucguuggggugcuggagagcuacaucggauccauuaauaacaucacgaagcaaucugcuuguguggccaugagcaaacuccugaccgagcucaauuccgaugacaucaagaagcugcgggauaacgaggaacugaauagccccaaaauucgcgucuauaacacagugaucucuuacauugaauccaauagaaagaacaauaaacagaccauccaccuucugaagcggcucccugccgacguucugaaaaagacaauuaagaacacccuugauauccauaaaagcauuacaaucaauaaccccaaggagucuaccguguccgacacgaacgaucacgcuaaaaauaacgacaccacaugaggacuaguguccaccugucccuccugggcugcuggauugucucguuuuccugccaaauaaacaggaucagcgcuuuacagaucuaaaaaaaaaaaaaaaaaaaaaaaaaaaaaaaaaaaaaaaaaaaaaaaaaaaaaaaaaaaaaaaaugcaucccccccccccccccccccccccccccccccaaaggcucuuuucagagccaccagaauu

SEQ ID NO: 11526 - RNA, 971 nt, Artificial Sequence
  mRNA product Design i-1 comprising derived and/or modified sequence from HRSV(A2)__P04545.1__M2-1 (opt6)
gggagagggcgcuuggcuugcaaggacccugagcugcggcauugaagcacacccaacccaacucgacugaagucagccucacugaaccggaucugagaaucuucucucucugggcuugccagggcucuccgaaccuagcuagcauccucuucaauuccaacuagaaagcuuaccaugucaagaagaaacccaugcaaauucgaaauaagaggacacugccuaaacggaaaaagaugccacuucucacacaacuacuucgaauggccaccacacgcacuacuuguaagacaaaacuucaugcuaaacagaauacuaaaaucaauggacaaaucaauagacacauuaucagaaauaucaggagcagcagaacucgacagaacagaagaauacgcacuaggaguaguaggaguacuagaaucauacauaggaucaauaaacaacauaacaaaacaaucagcaugcguagccauguccaaacuacuaacagaacuaaacuccgacgacauaaaaaaacuaagagacaacgaagaacuaaacucaccaaaaauaagaguauacaacacaguaauaucauacauagaaucaaacagaaaaaacaauaaacaaacaauacaccuacuaaaaagacucccagcagacguacuaaaaaaaacaauaaaaaacacacuagacauccacaaaucaauaacaauaaacaacccaaaagaaucaacagucucagacaccaacgaccacgcaaaaaacaacgacacaacauaaggacuaguguccaccugucccuccugggcugcuggauugucucguuuuccugccaaauaaacaggaucagcgcuuuacagaucuaaaaaaaaaaaaaaaaaaaaaaaaaaaaaaaaaaaaaaaaaaaaaaaaaaaaaaaaaaaaaaaaugcaucccccccccccccccccccccccccccccccaaaggcucuuuucagagccaccagaauu

SEQ ID NO: 11527 - RNA, 971 nt, Artificial Sequence
  mRNA product Design i-1 comprising derived and/or modified sequence from HRSV(A2)__P04545.1__M2-1 (opt11)
gggagagggcgcuuggcuugcaaggacccugagcugcggcauugaagcacacccaacccaacucgacugaagucagccucacugaaccggaucugagaaucuucucucucugggcuugccagggcucuccgaaccuagcuagcauccucuucaauuccaacuagaaagcuuaccaugucacgacgcaaccccugcaaauucgaaauccgcggccacugccuaaacggcaaacgcugccacuucucccacaacuacuucgaauggcccccccacgcccuccuuguccgccaaaacuucaugcucaaccgcauccucaaauccauggacaaaagcaucgacacccucuccgaaaucuccggcgcagccgaacucgaccgcaccgaagaauacgcccucggcgucguaggcguccucgaauccuacaucggcucaaucaacaacaucaccaaacaauccgccugcgucgccauguccaaacuccucaccgaacucaacuccgacgacaucaaaaaacuccgcgacaacgaagaacucaacucccccaaaauccgagucuacaacaccguaaucuccuacaucgaauccaaccgcaaaaacaacaaacaaaccauccaccuacuaaaacgacuccccgccgacguccucaaaaaaacaaucaaaaacacccucgacauccacaaauccaucaccaucaacaaccccaaagaaucaaccgucuccgacaccaacgaccacgccaaaaacaacgacaccaccugaggacuaguguccaccugucccuccugggcugcuggauugucucguuuuccugccaaauaaacaggaucagcgcuuuacagaucuaaaaaaaaaaaaaaaaaaaaaaaaaaaaaaaaaaaaaaaaaaaaaaaaaaaaaaaaaaaaaaaaugcaucccccccccccccccccccccccccccccccaaaggcucuuuucagagccaccagaauu

SEQ ID NO: 11528 - RNA, 971 nt, Artificial Sequence
  mRNA product Design i-2 comprising derived and/or modified sequence from HRSV(A2)__P04545.1__M2-1 (wt)
gggagaggcgcugccuacggagguggcagccaucuccuucucggcaucaagcuuaccaugucacgaaggaauccuugcaaauuugaaauucgaggucauugcuuaaaugguaagaggugucauuuuagucauaauuauuuugaauggccaccccaugcacugcuuguaagacaaaacuuuauguuaaacagaauacuuaagucuauggauaaaaguauagauaccuuaucagaaauaaguggagcugcagaguuggacagaacagaagaguaugcucuugguguaguuggagugcuagagaguuauauaggaucaauaaacaauauaacuaaacaaucagcauguguugccaugagcaaacuccucacugaacucaauagugaugauaucaaaaagcugagggacaaugaagagcuaaauucacccaagauaagaguguacaauacugucauaucauauauugaaagcaacaggaaaaacaauaaacaaacuauccaucuguuaaaaagauugccagcagacguauugaagaaaaccaucaaaaacacauuggauauccauaagagcauaaccaucaacaacccaaaagaaucaacuguuagugauacaaaugaccaugccaaaaauaaugauacuaccugaggacuagugcaucacauuuaaaagcaucucagccuaccaugagaauaagagaaagaaaaugaagaucaauagcuuauucaucucuuuuucuuuuucguugguguaaagccaacacccugucuaaaaaacauaaauuucuuuaaucauuuugccucuuuucucugugcuucaauuaauaaaaaauggaaagaaccuagaucuaaaaaaaaaaaaaaaaaaaaaaaaaaaaaaaaaaaaaaaaaaaaaaaaaaaaaaaaaaaaaaaaugcaucccccccccccccccccccccccccccccccaaaggcucuuuucagagccaccagaauu

SEQ ID NO: 11529 - RNA, 971 nt, Artificial Sequence
  mRNA product Design i-2 comprising derived and/or modified sequence from HRSV(A2)__P04545.1__M2-1 (opt1)
gggagaggcgcugccuacggagguggcagccaucuccuucucggcaucaagcuuaccaugagccgccggaaccccugcaaguucgagauccgcggccacugccugaacgggaagcggugccacuucucccacaacuacuucgaguggccgccccacgcccuccuggugcgccagaacuucaugcugaaccggauccucaagagcauggacaaguccaucgacacccugagcgagaucuccggcgccgcggagcuggaccgcaccgaggaguacgcccucggggucgugggcgugcuggagagcuacaucggguccaucaacaacaucacgaagcagagcgccugcgucgccauguccaagcugcucaccgagcugaacagcgacgacaucaagaagcugcgggacaacgaggagcucaacucccccaagauccgcguguacaacaccgugaucagcuacaucgaguccaaccggaagaacaacaagcagaccauccaccuccugaagcgccugcccgccgacguccugaagaagacgaucaagaacacccuggacauccacaagagcaucaccaucaacaacccgaaggaguccaccgugagcgacacgaacgaccacgcgaagaacaacgacaccaccugaggacuagugcaucacauuuaaaagcaucucagccuaccaugagaauaagagaaagaaaaugaagaucaauagcuuauucaucucuuuuucuuuuucguugguguaaagccaacacccugucuaaaaaacauaaauuucuuuaaucauuuugccucuuuucucugugcuucaauuaauaaaaaauggaaagaaccuagaucuaaaaaaaaaaaaaaaaaaaaaaaaaaaaaaaaaaaaaaaaaaaaaaaaaaaaaaaaaaaaaaaaugcaucccccccccccccccccccccccccccccccaaaggcucuuuucagagccaccagaauu

SEQ ID NO: 11530 - RNA, 971 nt, Artificial Sequence
  mRNA product Design i-2 comprising derived and/or modified sequence from HRSV(A2)__P04545.1__M2-1 (opt2)
gggagaggcgcugccuacggagguggcagccaucuccuucucggcaucaagcuuaccaugucccgccgcaaccccugcaaguucgagauccgcggccacugccucaacggcaagcgcugccacuucucccacaacuacuucgaguggcccccccacgcccuccucguccgccagaacuucaugcucaaccgcauccucaaguccauggacaaguccaucgacacccucuccgagaucuccggcgccgccgagcucgaccgcaccgaggaguacgcccucggcgucgucggcguccucgaguccuacaucggcuccaucaacaacaucaccaagcaguccgccugcgucgccauguccaagcuccucaccgagcucaacuccgacgacaucaagaagcuccgcgacaacgaggagcucaacucccccaagauccgcgucuacaacaccgucaucuccuacaucgaguccaaccgcaagaacaacaagcagaccauccaccuccucaagcgccuccccgccgacguccucaagaagaccaucaagaacacccucgacauccacaaguccaucaccaucaacaaccccaaggaguccaccgucuccgacaccaacgaccacgccaagaacaacgacaccaccugaggacuagugcaucacauuuaaaagcaucucagccuaccaugagaauaagagaaagaaaaugaagaucaauagcuuauucaucucuuuuucuuuuucguugguguaaagccaacacccugucuaaaaaacauaaauuucuuuaaucauuuugccucuuuucucugugcuucaauuaauaaaaaauggaaagaaccuagaucuaaaaaaaaaaaaaaaaaaaaaaaaaaaaaaaaaaaaaaaaaaaaaaaaaaaaaaaaaaaaaaaaugcaucccccccccccccccccccccccccccccccaaaggcucuuuucagagccaccagaauu

SEQ ID NO: 11531 - RNA, 971 nt, Artificial Sequence
  mRNA product Design i-2 comprising derived and/or modified sequence from HRSV(A2)__P04545.1__M2-1 (opt3)
gggagaggcgcugccuacggagguggcagccaucuccuucucggcaucaagcuuaccaugagcagaaggaaccccugcaaguucgagauccggggccacugucugaaugggaaacgcugccauuuuucccacaacuacuucgaauggccuccacaugcacuccuugugcgacagaauuuuaugcugaaccguauuuugaagucuauggacaaaucaauagauaccuuaagugagaucagcggagcugcagaacuggacagaacagaggaauaugcccuaggugucguuggcgugcucgaguccuacauugggucuaucaauaacauuacuaagcaaucggcguguguagcuaugucaaaacugcuuacggagcugaauagcgaugacaucaagaaguugagggauaacgaagaguuaaauaguccgaaaauacggguguauaacaccgucaucuccuacauugaaucuaaucgcaagaacaauaaacagacaauccaucugcugaagagacuccccgccgacgugcucaaaaagacuauuaagaacacccuggauauccacaaaagcauaacaauuaauaacccuaaggaguccaccguuucagacacuaacgaucacgccaaaaauaacgacacaaccugaggacuagugcaucacauuuaaaagcaucucagccuaccaugagaauaagagaaagaaaaugaagaucaauagcuuauucaucucuuuuucuuuuucguugguguaaagccaacacccugucuaaaaaacauaaauuucuuuaaucauuuugccucuuuucucugugcuucaauuaauaaaaaauggaaagaaccuagaucuaaaaaaaaaaaaaaaaaaaaaaaaaaaaaaaaaaaaaaaaaaaaaaaaaaaaaaaaaaaaaaaaugcaucccccccccccccccccccccccccccccccaaaggcucuuuucagagccaccagaauu

SEQ ID NO: 11532 - RNA, 971 nt, Artificial Sequence
  mRNA product Design i-2 comprising derived and/or modified sequence from HRSV(A2)__P04545.1__M2-1 (opt4)
gggagaggcgcugccuacggagguggcagccaucuccuucucggcaucaagcuuaccaugagcagaagaaaccccugcaaguucgagaucagaggccacugccugaacggcaagagaugccacuucagccacaacuacuucgaguggcccccccacgcccugcuggugagacagaacuucaugcugaacagaauccugaagagcauggacaagagcaucgacacccugagcgagaucagcggcgccgccgagcuggacagaaccgaggaguacgcccugggcguggugggcgugcuggagagcuacaucggcagcaucaacaacaucaccaagcagagcgccugcguggccaugagcaagcugcugaccgagcugaacagcgacgacaucaagaagcugagagacaacgaggagcugaacagccccaagaucagaguguacaacaccgugaucagcuacaucgagagcaacagaaagaacaacaagcagaccauccaccugcugaagagacugcccgccgacgugcugaagaagaccaucaagaacacccuggacauccacaagagcaucaccaucaacaaccccaaggagagcaccgugagcgacaccaacgaccacgccaagaacaacgacaccaccugaggacuagugcaucacauuuaaaagcaucucagccuaccaugagaauaagagaaagaaaaugaagaucaauagcuuauucaucucuuuuucuuuuucguugguguaaagccaacacccugucuaaaaaacauaaauuucuuuaaucauuuugccucuuuucucugugcuucaauuaauaaaaaauggaaagaaccuagaucuaaaaaaaaaaaaaaaaaaaaaaaaaaaaaaaaaaaaaaaaaaaaaaaaaaaaaaaaaaaaaaaaugcaucccccccccccccccccccccccccccccccaaaggcucuuuucagagccaccagaauu

SEQ ID NO: 11533 - RNA, 971 nt, Artificial Sequence
  mRNA product Design i-2 comprising derived and/or modified sequence from HRSV(A2)__P04545.1__M2-1 (opt5)
gggagaggcgcugccuacggagguggcagccaucuccuucucggcaucaagcuuaccaugagcagacggaaccccugcaaguucgagauccgcggccacugucugaaugggaaaagaugccauuuuucccacaacuacuucgaauggccuccgcaugcccuccuggugcggcagaauuuuaugcuuaaccgcauucugaagucuauggacaaaagcaucgauacccucuccgagauuucuggagcugccgaacuggacagaacagaggaauaugcgcuuggcgucguuggggugcuggagagcuacaucggauccauuaauaacaucacgaagcaaucugcuuguguggccaugagcaaacuccugaccgagcucaauuccgaugacaucaagaagcugcgggauaacgaggaacugaauagccccaaaauucgcgucuauaacacagugaucucuuacauugaauccaauagaaagaacaauaaacagaccauccaccuucugaagcggcucccugccgacguucugaaaaagacaauuaagaacacccuugauauccauaaaagcauuacaaucaauaaccccaaggagucuaccguguccgacacgaacgaucacgcuaaaaauaacgacaccacaugaggacuagugcaucacauuuaaaagcaucucagccuaccaugagaauaagagaaagaaaaugaagaucaauagcuuauucaucucuuuuucuuuuucguugguguaaagccaacacccugucuaaaaaacauaaauuucuuuaaucauuuugccucuuuucucugugcuucaauuaauaaaaaauggaaagaaccuagaucuaaaaaaaaaaaaaaaaaaaaaaaaaaaaaaaaaaaaaaaaaaaaaaaaaaaaaaaaaaaaaaaaugcaucccccccccccccccccccccccccccccccaaaggcucuuuucagagccaccagaauu

SEQ ID NO: 11534 - RNA, 971 nt, Artificial Sequence
  mRNA product Design i-2 comprising derived and/or modified sequence from HRSV(A2)__P04545.1__M2-1 (opt6)
gggagaggcgcugccuacggagguggcagccaucuccuucucggcaucaagcuuaccaugucaagaagaaacccaugcaaauucgaaauaagaggacacugccuaaacggaaaaagaugccacuucucacacaacuacuucgaauggccaccacacgcacuacuuguaagacaaaacuucaugcuaaacagaauacuaaaaucaauggacaaaucaauagacacauuaucagaaauaucaggagcagcagaacucgacagaacagaagaauacgcacuaggaguaguaggaguacuagaaucauacauaggaucaauaaacaacauaacaaaacaaucagcaugcguagccauguccaaacuacuaacagaacuaaacuccgacgacauaaaaaaacuaagagacaacgaagaacuaaacucaccaaaaauaagaguauacaacacaguaauaucauacauagaaucaaacagaaaaaacaauaaacaaacaauacaccuacuaaaaagacucccagcagacguacuaaaaaaaacaauaaaaaacacacuagacauccacaaaucaauaacaauaaacaacccaaaagaaucaacagucucagacaccaacgaccacgcaaaaaacaacgacacaacauaaggacuagugcaucacauuuaaaagcaucucagccuaccaugagaauaagagaaagaaaaugaagaucaauagcuuauucaucucuuuuucuuuuucguugguguaaagccaacacccugucuaaaaaacauaaauuucuuuaaucauuuugccucuuuucucugugcuucaauuaauaaaaaauggaaagaaccuagaucuaaaaaaaaaaaaaaaaaaaaaaaaaaaaaaaaaaaaaaaaaaaaaaaaaaaaaaaaaaaaaaaaugcaucccccccccccccccccccccccccccccccaaaggcucuuuucagagccaccagaauu

SEQ ID NO: 11535 - RNA, 971 nt, Artificial Sequence
  mRNA product Design i-2 comprising derived and/or modified sequence from HRSV(A2)__P04545.1__M2-1 (opt11)
gggagaggcgcugccuacggagguggcagccaucuccuucucggcaucaagcuuaccaugucacgacgcaaccccugcaaauucgaaauccgcggccacugccuaaacggcaaacgcugccacuucucccacaacuacuucgaauggcccccccacgcccuccuuguccgccaaaacuucaugcucaaccgcauccucaaauccauggacaaaagcaucgacacccucuccgaaaucuccggcgcagccgaacucgaccgcaccgaagaauacgcccucggcgucguaggcguccucgaauccuacaucggcucaaucaacaacaucaccaaacaauccgccugcgucgccauguccaaacuccucaccgaacucaacuccgacgacaucaaaaaacuccgcgacaacgaagaacucaacucccccaaaauccgagucuacaacaccguaaucuccuacaucgaauccaaccgcaaaaacaacaaacaaaccauccaccuacuaaaacgacuccccgccgacguccucaaaaaaacaaucaaaaacacccucgacauccacaaauccaucaccaucaacaaccccaaagaaucaaccgucuccgacaccaacgaccacgccaaaaacaacgacaccaccugaggacuagugcaucacauuuaaaagcaucucagccuaccaugagaauaagagaaagaaaaugaagaucaauagcuuauucaucucuuuuucuuuuucguugguguaaagccaacacccugucuaaaaaacauaaauuucuuuaaucauuuugccucuuuucucugugcuucaauuaauaaaaaauggaaagaaccuagaucuaaaaaaaaaaaaaaaaaaaaaaaaaaaaaaaaaaaaaaaaaaaaaaaaaaaaaaaaaaaaaaaaugcaucccccccccccccccccccccccccccccccaaaggcucuuuucagagccaccagaauu

SEQ ID NO: 11536 - RNA, 967 nt, Artificial Sequence
  mRNA product Design i-2 comprising derived and/or modified sequence from HRSV(A2)__P04545.1__M2-1 (wt)
ggggcgcugccuacggagguggcagccaucuccuucucggcaucaagcuuaccaugucacgaaggaauccuugcaaauuugaaauucgaggucauugcuuaaaugguaagaggugucauuuuagucauaauuauuuugaauggccaccccaugcacugcuuguaagacaaaacuuuauguuaaacagaauacuuaagucuauggauaaaaguauagauaccuuaucagaaauaaguggagcugcagaguuggacagaacagaagaguaugcucuugguguaguuggagugcuagagaguuauauaggaucaauaaacaauauaacuaaacaaucagcauguguugccaugagcaaacuccucacugaacucaauagugaugauaucaaaaagcugagggacaaugaagagcuaaauucacccaagauaagaguguacaauacugucauaucauauauugaaagcaacaggaaaaacaauaaacaaacuauccaucuguuaaaaagauugccagcagacguauugaagaaaaccaucaaaaacacauuggauauccauaagagcauaaccaucaacaacccaaaagaaucaacuguuagugauacaaaugaccaugccaaaaauaaugauacuaccugaggacuagugcaucacauuuaaaagcaucucagccuaccaugagaauaagagaaagaaaaugaagaucaauagcuuauucaucucuuuuucuuuuucguugguguaaagccaacacccugucuaaaaaacauaaauuucuuuaaucauuuugccucuuuucucugugcuucaauuaauaaaaaauggaaagaaccuagaucuaaaaaaaaaaaaaaaaaaaaaaaaaaaaaaaaaaaaaaaaaaaaaaaaaaaaaaaaaaaaaaaaugcaucccccccccccccccccccccccccccccccaaaggcucuuuucagagccaccagaauu

SEQ ID NO: 11537 - RNA, 967 nt, Artificial Sequence
  mRNA product Design i-2 comprising derived and/or modified sequence from HRSV(A2)__P04545.1__M2-1 (opt1)
ggggcgcugccuacggagguggcagccaucuccuucucggcaucaagcuuaccaugagccgccggaaccccugcaaguucgagauccgcggccacugccugaacgggaagcggugccacuucucccacaacuacuucgaguggccgccccacgcccuccuggugcgccagaacuucaugcugaaccggauccucaagagcauggacaaguccaucgacacccugagcgagaucuccggcgccgcggagcuggaccgcaccgaggaguacgcccucggggucgugggcgugcuggagagcuacaucggguccaucaacaacaucacgaagcagagcgccugcgucgccauguccaagcugcucaccgagcugaacagcgacgacaucaagaagcugcgggacaacgaggagcucaacucccccaagauccgcguguacaacaccgugaucagcuacaucgaguccaaccggaagaacaacaagcagaccauccaccuccugaagcgccugcccgccgacguccugaagaagacgaucaagaacacccuggacauccacaagagcaucaccaucaacaacccgaaggaguccaccgugagcgacacgaacgaccacgcgaagaacaacgacaccaccugaggacuagugcaucacauuuaaaagcaucucagccuaccaugagaauaagagaaagaaaaugaagaucaauagcuuauucaucucuuuuucuuuuucguugguguaaagccaacacccugucuaaaaaacauaaauuucuuuaaucauuuugccucuuuucucugugcuucaauuaauaaaaaauggaaagaaccuagaucuaaaaaaaaaaaaaaaaaaaaaaaaaaaaaaaaaaaaaaaaaaaaaaaaaaaaaaaaaaaaaaaaugcaucccccccccccccccccccccccccccccccaaaggcucuuuucagagccaccagaauu

SEQ ID NO: 11538 - RNA, 967 nt, Artificial Sequence
  mRNA product Design i-2 comprising derived and/or modified sequence from HRSV(A2)__P04545.1__M2-1 (opt2)
ggggcgcugccuacggagguggcagccaucuccuucucggcaucaagcuuaccaugucccgccgcaaccccugcaaguucgagauccgcggccacugccucaacggcaagcgcugccacuucucccacaacuacuucgaguggcccccccacgcccuccucguccgccagaacuucaugcucaaccgcauccucaaguccauggacaaguccaucgacacccucuccgagaucuccggcgccgccgagcucgaccgcaccgaggaguacgcccucggcgucgucggcguccucgaguccuacaucggcuccaucaacaacaucaccaagcaguccgccugcgucgccauguccaagcuccucaccgagcucaacuccgacgacaucaagaagcuccgcgacaacgaggagcucaacucccccaagauccgcgucuacaacaccgucaucuccuacaucgaguccaaccgcaagaacaacaagcagaccauccaccuccucaagcgccuccccgccgacguccucaagaagaccaucaagaacacccucgacauccacaaguccaucaccaucaacaaccccaaggaguccaccgucuccgacaccaacgaccacgccaagaacaacgacaccaccugaggacuagugcaucacauuuaaaagcaucucagccuaccaugagaauaagagaaagaaaaugaagaucaauagcuuauucaucucuuuuucuuuuucguugguguaaagccaacacccugucuaaaaaacauaaauuucuuuaaucauuuugccucuuuucucugugcuucaauuaauaaaaaauggaaagaaccuagaucuaaaaaaaaaaaaaaaaaaaaaaaaaaaaaaaaaaaaaaaaaaaaaaaaaaaaaaaaaaaaaaaaugcaucccccccccccccccccccccccccccccccaaaggcucuuuucagagccaccagaauu

SEQ ID NO: 11539 - RNA, 967 nt, Artificial Sequence
  mRNA product Design i-2 comprising derived and/or modified sequence from HRSV(A2)__P04545.1__M2-1 (opt3)
ggggcgcugccuacggagguggcagccaucuccuucucggcaucaagcuuaccaugagcagaaggaaccccugcaaguucgagauccggggccacugucugaaugggaaacgcugccauuuuucccacaacuacuucgaauggccuccacaugcacuccuugugcgacagaauuuuaugcugaaccguauuuugaagucuauggacaaaucaauagauaccuuaagugagaucagcggagcugcagaacuggacagaacagaggaauaugcccuaggugucguuggcgugcucgaguccuacauugggucuaucaauaacauuacuaagcaaucggcguguguagcuaugucaaaacugcuuacggagcugaauagcgaugacaucaagaaguugagggauaacgaagaguuaaauaguccgaaaauacggguguauaacaccgucaucuccuacauugaaucuaaucgcaagaacaauaaacagacaauccaucugcugaagagacuccccgccgacgugcucaaaaagacuauuaagaacacccuggauauccacaaaagcauaacaauuaauaacccuaaggaguccaccguuucagacacuaacgaucacgccaaaaauaacgacacaaccugaggacuagugcaucacauuuaaaagcaucucagccuaccaugagaauaagagaaagaaaaugaagaucaauagcuuauucaucucuuuuucuuuuucguugguguaaagccaacacccugucuaaaaaacauaaauuucuuuaaucauuuugccucuuuucucugugcuucaauuaauaaaaaauggaaagaaccuagaucuaaaaaaaaaaaaaaaaaaaaaaaaaaaaaaaaaaaaaaaaaaaaaaaaaaaaaaaaaaaaaaaaugcaucccccccccccccccccccccccccccccccaaaggcucuuuucagagccaccagaauu

SEQ ID NO: 11540 - RNA, 967 nt, Artificial Sequence
  mRNA product Design i-2 comprising derived and/or modified sequence from HRSV(A2)__P04545.1__M2-1 (opt4)
ggggcgcugccuacggagguggcagccaucuccuucucggcaucaagcuuaccaugagcagaagaaaccccugcaaguucgagaucagaggccacugccugaacggcaagagaugccacuucagccacaacuacuucgaguggcccccccacgcccugcuggugagacagaacuucaugcugaacagaauccugaagagcauggacaagagcaucgacacccugagcgagaucagcggcgccgccgagcuggacagaaccgaggaguacgcccugggcguggugggcgugcuggagagcuacaucggcagcaucaacaacaucaccaagcagagcgccugcguggccaugagcaagcugcugaccgagcugaacagcgacgacaucaagaagcugagagacaacgaggagcugaacagccccaagaucagaguguacaacaccgugaucagcuacaucgagagcaacagaaagaacaacaagcagaccauccaccugcugaagagacugcccgccgacgugcugaagaagaccaucaagaacacccuggacauccacaagagcaucaccaucaacaaccccaaggagagcaccgugagcgacaccaacgaccacgccaagaacaacgacaccaccugaggacuagugcaucacauuuaaaagcaucucagccuaccaugagaauaagagaaagaaaaugaagaucaauagcuuauucaucucuuuuucuuuuucguugguguaaagccaacacccugucuaaaaaacauaaauuucuuuaaucauuuugccucuuuucucugugcuucaauuaauaaaaaauggaaagaaccuagaucuaaaaaaaaaaaaaaaaaaaaaaaaaaaaaaaaaaaaaaaaaaaaaaaaaaaaaaaaaaaaaaaaugcaucccccccccccccccccccccccccccccccaaaggcucuuuucagagccaccagaauu

SEQ ID NO: 11541 - RNA, 967 nt, Artificial Sequence
  mRNA product Design i-2 comprising derived and/or modified sequence from HRSV(A2)__P04545.1__M2-1 (opt5)
ggggcgcugccuacggagguggcagccaucuccuucucggcaucaagcuuaccaugagcagacggaaccccugcaaguucgagauccgcggccacugucugaaugggaaaagaugccauuuuucccacaacuacuucgaauggccuccgcaugcccuccuggugcggcagaauuuuaugcuuaaccgcauucugaagucuauggacaaaagcaucgauacccucuccgagauuucuggagcugccgaacuggacagaacagaggaauaugcgcuuggcgucguuggggugcuggagagcuacaucggauccauuaauaacaucacgaagcaaucugcuuguguggccaugagcaaacuccugaccgagcucaauuccgaugacaucaagaagcugcgggauaacgaggaacugaauagccccaaaauucgcgucuauaacacagugaucucuuacauugaauccaauagaaagaacaauaaacagaccauccaccuucugaagcggcucccugccgacguucugaaaaagacaauuaagaacacccuugauauccauaaaagcauuacaaucaauaaccccaaggagucuaccguguccgacacgaacgaucacgcuaaaaauaacgacaccacaugaggacuagugcaucacauuuaaaagcaucucagccuaccaugagaauaagagaaagaaaaugaagaucaauagcuuauucaucucuuuuucuuuuucguugguguaaagccaacacccugucuaaaaaacauaaauuucuuuaaucauuuugccucuuuucucugugcuucaauuaauaaaaaauggaaagaaccuagaucuaaaaaaaaaaaaaaaaaaaaaaaaaaaaaaaaaaaaaaaaaaaaaaaaaaaaaaaaaaaaaaaaugcaucccccccccccccccccccccccccccccccaaaggcucuuuucagagccaccagaauu

SEQ ID NO: 11542 - RNA, 967 nt, Artificial Sequence
  mRNA product Design i-2 comprising derived and/or modified sequence from HRSV(A2)__P04545.1__M2-1 (opt6)
ggggcgcugccuacggagguggcagccaucuccuucucggcaucaagcuuaccaugucaagaagaaacccaugcaaauucgaaauaagaggacacugccuaaacggaaaaagaugccacuucucacacaacuacuucgaauggccaccacacgcacuacuuguaagacaaaacuucaugcuaaacagaauacuaaaaucaauggacaaaucaauagacacauuaucagaaauaucaggagcagcagaacucgacagaacagaagaauacgcacuaggaguaguaggaguacuagaaucauacauaggaucaauaaacaacauaacaaaacaaucagcaugcguagccauguccaaacuacuaacagaacuaaacuccgacgacauaaaaaaacuaagagacaacgaagaacuaaacucaccaaaaauaagaguauacaacacaguaauaucauacauagaaucaaacagaaaaaacaauaaacaaacaauacaccuacuaaaaagacucccagcagacguacuaaaaaaaacaauaaaaaacacacuagacauccacaaaucaauaacaauaaacaacccaaaagaaucaacagucucagacaccaacgaccacgcaaaaaacaacgacacaacauaaggacuagugcaucacauuuaaaagcaucucagccuaccaugagaauaagagaaagaaaaugaagaucaauagcuuauucaucucuuuuucuuuuucguugguguaaagccaacacccugucuaaaaaacauaaauuucuuuaaucauuuugccucuuuucucugugcuucaauuaauaaaaaauggaaagaaccuagaucuaaaaaaaaaaaaaaaaaaaaaaaaaaaaaaaaaaaaaaaaaaaaaaaaaaaaaaaaaaaaaaaaugcaucccccccccccccccccccccccccccccccaaaggcucuuuucagagccaccagaauu

SEQ ID NO: 11543 - RNA, 967 nt, Artificial Sequence
  mRNA product Design i-2 comprising derived and/or modified sequence from HRSV(A2)__P04545.1__M2-1 (opt11)
ggggcgcugccuacggagguggcagccaucuccuucucggcaucaagcuuaccaugucacgacgcaaccccugcaaauucgaaauccgcggccacugccuaaacggcaaacgcugccacuucucccacaacuacuucgaauggcccccccacgcccuccuuguccgccaaaacuucaugcucaaccgcauccucaaauccauggacaaaagcaucgacacccucuccgaaaucuccggcgcagccgaacucgaccgcaccgaagaauacgcccucggcgucguaggcguccucgaauccuacaucggcucaaucaacaacaucaccaaacaauccgccugcgucgccauguccaaacuccucaccgaacucaacuccgacgacaucaaaaaacuccgcgacaacgaagaacucaacucccccaaaauccgagucuacaacaccguaaucuccuacaucgaauccaaccgcaaaaacaacaaacaaaccauccaccuacuaaaacgacuccccgccgacguccucaaaaaaacaaucaaaaacacccucgacauccacaaauccaucaccaucaacaaccccaaagaaucaaccgucuccgacaccaacgaccacgccaaaaacaacgacaccaccugaggacuagugcaucacauuuaaaagcaucucagccuaccaugagaauaagagaaagaaaaugaagaucaauagcuuauucaucucuuuuucuuuuucguugguguaaagccaacacccugucuaaaaaacauaaauuucuuuaaucauuuugccucuuuucucugugcuucaauuaauaaaaaauggaaagaaccuagaucuaaaaaaaaaaaaaaaaaaaaaaaaaaaaaaaaaaaaaaaaaaaaaaaaaaaaaaaaaaaaaaaaugcaucccccccccccccccccccccccccccccccaaaggcucuuuucagagccaccagaauu

SEQ ID NO: 11544 - RNA, 802 nt, Artificial Sequence
  mRNA product Design i-3 comprising derived and/or modified sequence from HRSV(A2)__P04545.1__M2-1 (wt)
gggagaaagcuuaccaugucacgaaggaauccuugcaaauuugaaauucgaggucauugcuuaaaugguaagaggugucauuuuagucauaauuauuuugaauggccaccccaugcacugcuuguaagacaaaacuuuauguuaaacagaauacuuaagucuauggauaaaaguauagauaccuuaucagaaauaaguggagcugcagaguuggacagaacagaagaguaugcucuugguguaguuggagugcuagagaguuauauaggaucaauaaacaauauaacuaaacaaucagcauguguugccaugagcaaacuccucacugaacucaauagugaugauaucaaaaagcugagggacaaugaagagcuaaauucacccaagauaagaguguacaauacugucauaucauauauugaaagcaacaggaaaaacaauaaacaaacuauccaucuguuaaaaagauugccagcagacguauugaagaaaaccaucaaaaacacauuggauauccauaagagcauaaccaucaacaacccaaaagaaucaacuguuagugauacaaaugaccaugccaaaaauaaugauacuaccugaggacuaguuauaagacugacuagcccgaugggccucccaacgggcccuccuccccuccuugcaccgagauuaauaaaaaaaaaaaaaaaaaaaaaaaaaaaaaaaaaaaaaaaaaaaaaaaaaaaaaaaaaaaaaaaaugcaucccccccccccccccccccccccccccccccaaaggcucuuuucagagccaccagaauu

SEQ ID NO: 11545 - RNA, 802 nt, Artificial Sequence
  mRNA product Design i-3 comprising derived and/or modified sequence from HRSV(A2)__P04545.1__M2-1 (opt1) R7598
gggagaaagcuuaccaugagccgccggaaccccugcaaguucgagauccgcggccacugccugaacgggaagcggugccacuucucccacaacuacuucgaguggccgccccacgcccuccuggugcgccagaacuucaugcugaaccggauccucaagagcauggacaaguccaucgacacccugagcgagaucuccggcgccgcggagcuggaccgcaccgaggaguacgcccucggggucgugggcgugcuggagagcuacaucggguccaucaacaacaucacgaagcagagcgccugcgucgccauguccaagcugcucaccgagcugaacagcgacgacaucaagaagcugcgggacaacgaggagcucaacucccccaagauccgcguguacaacaccgugaucagcuacaucgaguccaaccggaagaacaacaagcagaccauccaccuccugaagcgccugcccgccgacguccugaagaagacgaucaagaacacccuggacauccacaagagcaucaccaucaacaacccgaaggaguccaccgugagcgacacgaacgaccacgcgaagaacaacgacaccaccugaggacuaguuauaagacugacuagcccgaugggccucccaacgggcccuccuccccuccuugcaccgagauuaauaaaaaaaaaaaaaaaaaaaaaaaaaaaaaaaaaaaaaaaaaaaaaaaaaaaaaaaaaaaaaaaaugcaucccccccccccccccccccccccccccccccaaaggcucuuuucagagccaccagaauu

SEQ ID NO: 11546 - RNA, 802 nt, Artificial Sequence
  mRNA product Design i-3 comprising derived and/or modified sequence from HRSV(A2)__P04545.1__M2-1 (opt2)
gggagaaagcuuaccaugucccgccgcaaccccugcaaguucgagauccgcggccacugccucaacggcaagcgcugccacuucucccacaacuacuucgaguggcccccccacgcccuccucguccgccagaacuucaugcucaaccgcauccucaaguccauggacaaguccaucgacacccucuccgagaucuccggcgccgccgagcucgaccgcaccgaggaguacgcccucggcgucgucggcguccucgaguccuacaucggcuccaucaacaacaucaccaagcaguccgccugcgucgccauguccaagcuccucaccgagcucaacuccgacgacaucaagaagcuccgcgacaacgaggagcucaacucccccaagauccgcgucuacaacaccgucaucuccuacaucgaguccaaccgcaagaacaacaagcagaccauccaccuccucaagcgccuccccgccgacguccucaagaagaccaucaagaacacccucgacauccacaaguccaucaccaucaacaaccccaaggaguccaccgucuccgacaccaacgaccacgccaagaacaacgacaccaccugaggacuaguuauaagacugacuagcccgaugggccucccaacgggcccuccuccccuccuugcaccgagauuaauaaaaaaaaaaaaaaaaaaaaaaaaaaaaaaaaaaaaaaaaaaaaaaaaaaaaaaaaaaaaaaaaugcaucccccccccccccccccccccccccccccccaaaggcucuuuucagagccaccagaauu

SEQ ID NO: 11547 - RNA, 802 nt, Artificial Sequence
  mRNA product Design i-3 comprising derived and/or modified sequence from HRSV(A2)__P04545.1__M2-1 (opt3)
gggagaaagcuuaccaugagcagaaggaaccccugcaaguucgagauccggggccacugucugaaugggaaacgcugccauuuuucccacaacuacuucgaauggccuccacaugcacuccuugugcgacagaauuuuaugcugaaccguauuuugaagucuauggacaaaucaauagauaccuuaagugagaucagcggagcugcagaacuggacagaacagaggaauaugcccuaggugucguuggcgugcucgaguccuacauugggucuaucaauaacauuacuaagcaaucggcguguguagcuaugucaaaacugcuuacggagcugaauagcgaugacaucaagaaguugagggauaacgaagaguuaaauaguccgaaaauacggguguauaacaccgucaucuccuacauugaaucuaaucgcaagaacaauaaacagacaauccaucugcugaagagacuccccgccgacgugcucaaaaagacuauuaagaacacccuggauauccacaaaagcauaacaauuaauaacccuaaggaguccaccguuucagacacuaacgaucacgccaaaaauaacgacacaaccugaggacuaguuauaagacugacuagcccgaugggccucccaacgggcccuccuccccuccuugcaccgagauuaauaaaaaaaaaaaaaaaaaaaaaaaaaaaaaaaaaaaaaaaaaaaaaaaaaaaaaaaaaaaaaaaaugcaucccccccccccccccccccccccccccccccaaaggcucuuuucagagccaccagaauu

SEQ ID NO: 11548 - RNA, 802 nt, Artificial Sequence
  mRNA product Design i-3 comprising derived and/or modified sequence from HRSV(A2)__P04545.1__M2-1 (opt4)
gggagaaagcuuaccaugagcagaagaaaccccugcaaguucgagaucagaggccacugccugaacggcaagagaugccacuucagccacaacuacuucgaguggcccccccacgcccugcuggugagacagaacuucaugcugaacagaauccugaagagcauggacaagagcaucgacacccugagcgagaucagcggcgccgccgagcuggacagaaccgaggaguacgcccugggcguggugggcgugcuggagagcuacaucggcagcaucaacaacaucaccaagcagagcgccugcguggccaugagcaagcugcugaccgagcugaacagcgacgacaucaagaagcugagagacaacgaggagcugaacagccccaagaucagaguguacaacaccgugaucagcuacaucgagagcaacagaaagaacaacaagcagaccauccaccugcugaagagacugcccgccgacgugcugaagaagaccaucaagaacacccuggacauccacaagagcaucaccaucaacaaccccaaggagagcaccgugagcgacaccaacgaccacgccaagaacaacgacaccaccugaggacuaguuauaagacugacuagcccgaugggccucccaacgggcccuccuccccuccuugcaccgagauuaauaaaaaaaaaaaaaaaaaaaaaaaaaaaaaaaaaaaaaaaaaaaaaaaaaaaaaaaaaaaaaaaaugcaucccccccccccccccccccccccccccccccaaaggcucuuuucagagccaccagaauu

SEQ ID NO: 11549 - RNA, 802 nt, Artificial Sequence
  mRNA product Design i-3 comprising derived and/or modified sequence from HRSV(A2)__P04545.1__M2-1 (opt5)
gggagaaagcuuaccaugagcagacggaaccccugcaaguucgagauccgcggccacugucugaaugggaaaagaugccauuuuucccacaacuacuucgaauggccuccgcaugcccuccuggugcggcagaauuuuaugcuuaaccgcauucugaagucuauggacaaaagcaucgauacccucuccgagauuucuggagcugccgaacuggacagaacagaggaauaugcgcuuggcgucguuggggugcuggagagcuacaucggauccauuaauaacaucacgaagcaaucugcuuguguggccaugagcaaacuccugaccgagcucaauuccgaugacaucaagaagcugcgggauaacgaggaacugaauagccccaaaauucgcgucuauaacacagugaucucuuacauugaauccaauagaaagaacaauaaacagaccauccaccuucugaagcggcucccugccgacguucugaaaaagacaauuaagaacacccuugauauccauaaaagcauuacaaucaauaaccccaaggagucuaccguguccgacacgaacgaucacgcuaaaaauaacgacaccacaugaggacuaguuauaagacugacuagcccgaugggccucccaacgggcccuccuccccuccuugcaccgagauuaauaaaaaaaaaaaaaaaaaaaaaaaaaaaaaaaaaaaaaaaaaaaaaaaaaaaaaaaaaaaaaaaaugcaucccccccccccccccccccccccccccccccaaaggcucuuuucagagccaccagaauu

SEQ ID NO: 11550 - RNA, 802 nt, Artificial Sequence
  mRNA product Design i-3 comprising derived and/or modified sequence from HRSV(A2)__P04545.1__M2-1 (opt6)
gggagaaagcuuaccaugucaagaagaaacccaugcaaauucgaaauaagaggacacugccuaaacggaaaaagaugccacuucucacacaacuacuucgaauggccaccacacgcacuacuuguaagacaaaacuucaugcuaaacagaauacuaaaaucaauggacaaaucaauagacacauuaucagaaauaucaggagcagcagaacucgacagaacagaagaauacgcacuaggaguaguaggaguacuagaaucauacauaggaucaauaaacaacauaacaaaacaaucagcaugcguagccauguccaaacuacuaacagaacuaaacuccgacgacauaaaaaaacuaagagacaacgaagaacuaaacucaccaaaaauaagaguauacaacacaguaauaucauacauagaaucaaacagaaaaaacaauaaacaaacaauacaccuacuaaaaagacucccagcagacguacuaaaaaaaacaauaaaaaacacacuagacauccacaaaucaauaacaauaaacaacccaaaagaaucaacagucucagacaccaacgaccacgcaaaaaacaacgacacaacauaaggacuaguuauaagacugacuagcccgaugggccucccaacgggcccuccuccccuccuugcaccgagauuaauaaaaaaaaaaaaaaaaaaaaaaaaaaaaaaaaaaaaaaaaaaaaaaaaaaaaaaaaaaaaaaaaugcaucccccccccccccccccccccccccccccccaaaggcucuuuucagagccaccagaauu

SEQ ID NO: 11551 - RNA, 802 nt, Artificial Sequence
  mRNA product Design i-3 comprising derived and/or modified sequence from HRSV(A2)__P04545.1__M2-1 (opt11)
gggagaaagcuuaccaugucacgacgcaaccccugcaaauucgaaauccgcggccacugccuaaacggcaaacgcugccacuucucccacaacuacuucgaauggcccccccacgcccuccuuguccgccaaaacuucaugcucaaccgcauccucaaauccauggacaaaagcaucgacacccucuccgaaaucuccggcgcagccgaacucgaccgcaccgaagaauacgcccucggcgucguaggcguccucgaauccuacaucggcucaaucaacaacaucaccaaacaauccgccugcgucgccauguccaaacuccucaccgaacucaacuccgacgacaucaaaaaacuccgcgacaacgaagaacucaacucccccaaaauccgagucuacaacaccguaaucuccuacaucgaauccaaccgcaaaaacaacaaacaaaccauccaccuacuaaaacgacuccccgccgacguccucaaaaaaacaaucaaaaacacccucgacauccacaaauccaucaccaucaacaaccccaaagaaucaaccgucuccgacaccaacgaccacgccaaaaacaacgacaccaccugaggacuaguuauaagacugacuagcccgaugggccucccaacgggcccuccuccccuccuugcaccgagauuaauaaaaaaaaaaaaaaaaaaaaaaaaaaaaaaaaaaaaaaaaaaaaaaaaaaaaaaaaaaaaaaaaugcaucccccccccccccccccccccccccccccccaaaggcucuuuucagagccaccagaauu

SEQ ID NO: 11552 - protein, 194 aa, Artificial Sequence
  derived and/or modified protein sequence (wt) from HRSV(Memphis-37)__AIY60641.1__M2-1
MSRRNPCKFEIRGHCLNGKRCHFSHNYFEWPPHALLVRQNFMLNRILKSMDKSIDTLSEISGAAELDRTEEYALGVVGVLESYIGSINNITKQSACVAMSKLLTELNSDDIKKLRDNEEPNSPKIRVYNTVISYIESNRKNNKQTIHLLKRLPADVLKKTIKNTLDIHKSITINNPKESTVNDTNDHAKNNDTT

SEQ ID NO: 11553 - protein, 195 aa, Artificial Sequence
  derived and/or modified protein sequence (wt) from HRSV__O42050.1__M2-1
MSRRNPCKFEIRGHCLNGRRCHYSHNYFEWPPHALLVRQNFMLNKILKSMDKSIDTLSEISGAAELDRTEEYALGIVGVLESYIGSINNITKQSACVAMSKLLIEINSDDIKKLRDNEEPNSPKIRVYNTVISYIESNRKNNKQTIHLLKRLPADVLKKTIKNTLDIHKSIIISNPKESTVNDQNDQTKNNDITG

SEQ ID NO: 11554 - protein, 194 aa, Artificial Sequence
  derived and/or modified protein sequence (wt) from HRSV__AAR14267.1__M2-1
MSRRNPCKFEIRGHCLNGRRCHYSHNYFEWPPHALLVRQNFMLNKILKSMDKSIDTLSEISGAAELDRTEEYALGIVGVLESYIGSINNITKQSACVAMSKLLIEINSDDIKKLRDNEEPNSPKIRVYNTVISYIESNRKNNKQTIHLLKRLPADVLKKTIKNTLDIHKSITISNPKESTVNDQNDQTKNNDIT

SEQ ID NO: 11555 - protein, 194 aa, Artificial Sequence
  derived and/or modified protein sequence (wt) from HRSV__AAX23995.1__M2-1
MSRRNPCKFEIRGHCLNGKRCHFSHNYFEWPPHALLVRQNFMLNRILKSMDKSIDTLSEISGAAELDRTEEYALGVVGVLESYIGSINNITKQSACVAMSKLLTELNSDDIKKLRDNEELNSPKIRVYNTVISYIESNRKNNKQTIHLLKRLPADVLKKTIKNTLDIHKSITINNPKELTVSDTNDHAKNNDTT

SEQ ID NO: 11556 - protein, 194 aa, Artificial Sequence
  derived and/or modified protein sequence (wt) from HRSV__ACY68436.1__M2-1
MSRRNPCKFEIRGHCLNGKRCHFSHNYFEWPPHALLVRQNFMLNRILKSMDKSIDTLSEISGAAELDRTEEYALGVVGVLESYIGSINNITKQSACVAMSKLLTELNSDDIKKLRDNEEPNSPKIRVYNTVISYIESNRKNNKQTIHLLKRLPADVLKKTIKNTLDIHKSITINNPKESTVSDTNDHAKNNDTT

SEQ ID NO: 11557 - protein, 194 aa, Artificial Sequence
  derived and/or modified protein sequence (wt) from HRSV__AEO45831.1__M2-1
MSRRNPCKFEIRGHCLNGKRCHFSHNYFEWPPHALLVRQNFMLNRILKSMDKSIDTLSEISGAAELDRTEEYALGVVGVLESYIGSINNITKQSACVAMSKLLTELNGDDIKKLRDNEEPNSPKIRVYNTVISYIESNRKNNKQTIHLLKRLPADVLKKTIKNTLDIHKSITINNPKESTVNDTNDHAKNNDTT

SEQ ID NO: 11558 - protein, 194 aa, Artificial Sequence
  derived and/or modified protein sequence (wt) from HRSV__AEO45900.1__M2-1
MSRRNPCKFEIRGHCLNGKRCHFSHNYFEWPPHALLVRQNFMLNRILKSMDKSIDTSSEISGAAELDRTEEYALGVVGVLESYIGSINNITKQSACVAMSKLLTELNSDDIKKLRDNEELNSPKVRVYNTVISYIESNRKNNKQTIHLLKRLPADVLKKTIKNTLDIHKSITINNPKESTVNDTNDHAKNNDTT

SEQ ID NO: 11559 - protein, 194 aa, Artificial Sequence
  derived and/or modified protein sequence (wt) from HRSV__AEO45910.1__M2-1
MSRRNPCKFEIRGHCLNGKRCHFSHNYFEWPPHALLVRQNFMLNRILKSMDKSIDTLSEISGAAELDRTEEYALGVVGVLESYIGSINNITKQSACVAMSKLLTELNSDDIKKLRDTEEPNSPKIRVYNTVISYIESNRKNNKQTIHLLKRLPADVLKKTMKNTLDIHKSITINNPKESTVSDTNYHAKNNDTT

SEQ ID NO: 11560 - protein, 194 aa, Artificial Sequence
  derived and/or modified protein sequence (wt) from HRSV__AEO45920.1__M2-1
MSRRNPCKFEIRGHCLNGKRCHFSHNYFEWPPHALLVRQNFMLNRILKSMDKSIDTLSEISGAAELDRTEEYALGVVGVLESYIGSINNITKQSACVAMSKLLTELNSDDIKKLRDTEEPNSPKIRVYNTVISYIESNRKNNKQTIHLLKRLPADVLKKTIKNTLDIHKSITINNPKESTVSDTDYHAKNNDTT

SEQ ID NO: 11561 - protein, 194 aa, Artificial Sequence
  derived and/or modified protein sequence (wt) from HRSV__AEO45930.1__M2-1
MSRRNPCKFEIRGHCLNGRRCHFSHNYFEWPPHALLVRQNFMLNRILKSMDRSIDTLSEISGAAELDRTEEYALGVVGVLESYIGSLNNITKQSACVAMSKLLTELNSDDIKKLRDSEEPNSPKVRVYNTVTSYIESNRKNNKQTIHLLKRLPADVLKKTIKNTLDIHKSITINNPKESTVSDTNDHAKNNDTT

SEQ ID NO: 11562 - protein, 194 aa, Artificial Sequence
  derived and/or modified protein sequence (wt) from HRSV__AEO45940.1__M2-1
MSRRNPCKFEIRGHCLNGRRCHFSHNYFEWPPHALLVRQNFMLNRILKSMDRSIDTLSEISGAAELDRTEEYALGVVGVLESYIGSLNNITKQSACVAMSKLLTELNSDDIKKLRDSEEPNSPKVRVYNTVTSYIESNRKNNKQTIHLLKRVPADVLKKTIKNTLDIHKSITINNPKESTVSDTNDHAKNNDTT

SEQ ID NO: 11563 - protein, 194 aa, Artificial Sequence
  derived and/or modified protein sequence (wt) from HRSV__AEQ63313.1__M2-1
MSRRNPCKFEIRGHCLNGKRCHFSHNYFEWPPHALLVRQNFMLNRILKSMDKSIDTLSEISGAAELDRTEEYALGVVGVLESYIGSINNITKQSACVAMSKLLTELNSDDIKKLRDNEEPNSPKVRVYNTVISYIESNRKNNKQTIHLLKRLPADVLKKTIKNTLDIHKSITINNPKESTVSDTNDHAKNNDTT

SEQ ID NO: 11564 - protein, 194 aa, Artificial Sequence
  derived and/or modified protein sequence (wt) from HRSV__AEQ63401.1__M2-1
MSRRNPCKFEIRGHCLNGKRCHFSHNYFEWPPHALLVRQNFMLNRILKSMDKSIDTLSEISGAAELDRTEEYALGVVGVLESYIGSINNITKQSACVAMSKLLTELNSDDIKKLRDHEEPNSPKVRVYNTVISYIESNRKNNKQTIHLLKRLPADVLKKTIKNTLDIHKSITINNPKESTVSDTNDHAKNNDTT

SEQ ID NO: 11565 - protein, 194 aa, Artificial Sequence
  derived and/or modified protein sequence (wt) from HRSV__AEQ63423.1__M2-1
MSRRNPCKFEIRGHCLNGKRCHFSHNYFEWPPHALLVRQNFMLNRILKSMDKSIDTLSEISGAAELDRTEEYALGVVGVLESYIGSINNITKQSACVAMSKLLTELNSDDIKRLRDNEEPNSPKVRVYNTVISYIESNRKNNKQTIHLLKRLPADVLKKTIKNTLDIHKSITINNPKESTVSDTNDHAKNNDTT

SEQ ID NO: 11566 - protein, 194 aa, Artificial Sequence
  derived and/or modified protein sequence (wt) from HRSV__AEQ63434.1__M2-1
MSRRNPCKFEIRGHCLNGKRCHFSHNYFEWPPHALLVRQNFMLNRILKSMDRSIDTLSEISGAAELDRTEEYALGVVGVLESYIGSINNITKQSACVAMSKLLTELNSDDIKKLRDNEEPNSPKVRVYNTVISYIESNRKNNKQTIHLLKRLPADVLKKTIKNTLDIHKSITINNPKESTVSDTNDHAKNNDTT

SEQ ID NO: 11567 - protein, 194 aa, Artificial Sequence
  derived and/or modified protein sequence (wt) from HRSV__AEQ63488.1__M2-1
MSRRNPCKFEIRGHCLNGKRCHFSHNYFEWPPHALLVRQNFMLNRILKSMDKSIDTLSEISGAAELDRTEEYALGVVGVLESYIGSINNITKQSACVAMSKLLTELNSDDIKKLRDTEEPNSPKIRVYNTVISYIESNRKNNKQTIHLLKRLPADVLKKTIKNTLDIHKSITINNPKESTASDTDDHAKNNDTT

SEQ ID NO: 11568 - protein, 194 aa, Artificial Sequence
  derived and/or modified protein sequence (wt) from HRSV__AEQ63521.1__M2-1
MSRRNPCKFEIRGHCLNGKRCHFSHNYFEWPPHALLVRQNFMLNRILKSMDKSIDTLSEISGAAELDRTEEYALGVVGVLESYIGSINNITKQSACVAMSKLLTELNSDDIKKLRDTEEPNSPKIRVYNTVISYIESNRKNNKQTIHLLKRLPADVLKKTIKNTLDIHKSITINNPKESTVSDTDDHAKNNDTT

SEQ ID NO: 11569 - protein, 194 aa, Artificial Sequence
  derived and/or modified protein sequence (wt) from HRSV__AEQ63587.1__M2-1
MSRRNPCKFEIRGHCLNGRRCHYSHNYFEWPPHALLVRQNFMLNKILKSMDKSIDTLSEISGAAELDRTEEYALGIVGVLESYIGSINNITKQSACVAMSKLLIEINSDDIKKLRDNEEPNSPKIRVYNTVISYIESNRKNSKQTIHLLKRLPADVLKKTIKNTLDIHKSITISNPKESTASDQNDQTKNNDIT

SEQ ID NO: 11570 - protein, 194 aa, Artificial Sequence
  derived and/or modified protein sequence (wt) from HRSV__AEQ63598.1__M2-1
MSRRNPCKFEIRGHCLNGRRCHYSHNYFEWPPHALLVRQNFMLNKILKSMDKSIDTLSEISGAAELDRTEEYALGIVGVLESYIGSINNITKQSACVAMSKLLIEINSDDIKKLRDNEEPNSPKIRVYNTVISYIESNRKNSKQTIHLLKRLPADVLKKTIKNTLDIHKSITISNPKESTISDQNDQTKNNDIT

SEQ ID NO: 11571 - protein, 194 aa, Artificial Sequence
  derived and/or modified protein sequence (wt) from HRSV__AEQ63609.1__M2-1
MSRRNPCKFEIRGHCLNGRRCHYSHNYFEWPPHALLVRQNFMLNKILKSMDKSIDTLSEISGAAELDRTEEYALGIVGVLESYIGSINNITKQSACVAMSKLLIEINSDDIKKLRDNEEPNSPKIRVYNTVISYIESNRKNSKQTIHLLKRLPADVLKKTIKNTLDIHKSITISNPKESTVNDQNDQTKNNDIT

SEQ ID NO: 11572 - protein, 194 aa, Artificial Sequence
  derived and/or modified protein sequence (wt) from HRSV__AEQ63620.1__M2-1
MSRRNPCKFEIRGHCLNGRRCHYSHNYFEWPPHALLVRQNFMLNKILKSMDKSIDTLSEISGAAELDRTEEYALGIVGVLESYIGSINNITKQSACVAMSKLLIEINSDDIKKLRDNEEPNSPKIRVYNTVISYIESNRKNNKQTIHLLQRLPADVLKKTIKNTLDIHKSITISNPKESTISDQNDQTKNNDIT

SEQ ID NO: 11573 - protein, 194 aa, Artificial Sequence
  derived and/or modified protein sequence (wt) from HRSV__AEQ63642.1__M2-1
MSRRNPCKFEIRGHCLNGRRCHYSHNYFEWPPHALLVRQNFMLNKILKSMDKSIDTLSEISGAAELDRTEEYALGIVGVLESYIGSINNITKQSACVAMSKLLIEINSDDIKKLRDNEEPNSPKIRVYNTVISYIESNRKNSKQTIHLLKRLPADVLKKTIKNTLDIHKSITISNPKESIASDQNDQTKNNDIT

SEQ ID NO: 11574 - protein, 194 aa, Artificial Sequence
  derived and/or modified protein sequence (wt) from HRSV__AEQ63653.1__M2-1
MSRRNPCKFEIRGHCLNGRRCHYSHNYFEWPPHALLVRQNFMLNKILKSMDKSIDTLSEISGAAELDRTEEYALGIVGVLESYIGSITNITKQSACVAMSKLLIEISSDDIKKLRDNEEPNSPKIRVYNTVISYIESNRKNNKQTIHLLKRLPADVLKKTIKNTLDIHKSITISNPKESTISDQNDQTKNNDIT

SEQ ID NO: 11575 - protein, 194 aa, Artificial Sequence
  derived and/or modified protein sequence (wt) from HRSV__AEQ63664.1__M2-1
MSRRNPCKFEIRGHCLNGRRCHYSHNYFEWPPHALLVRQNFMLNKILKSMDKSIDTLSEISGAAELDRTEEYALGIVGVLESYIGSINNITKQSACVAMSKLLIEINSDDIKKLRDNEEPNSPKIRVYNTVISYIESNRKNSKQTIHLLKRLPADVLKKTIKNTLDIHKSITISNPKESTVSDQNDQTKNNDIT

SEQ ID NO: 11576 - protein, 194 aa, Artificial Sequence
  derived and/or modified protein sequence (wt) from HRSV__AFI25252.1__M2-1
MSRRNPCKFEIRGHCLNGRRCHYSHNYFEWPPHALLVRQNFMLNKILKSMDKSIDTLSEISGAAELDRTEEYALGIVGVLESYIGSINNITKQSACVAMSKLLIEINSDDIKKLRDNEEPNSPKIRVYNTVISYIESNRKNNKQTIHLLKRLPADVLKKTIKNTLDIHKSITISNPKESTVSDQNDQTKNNDIT

SEQ ID NO: 11577 - protein, 194 aa, Artificial Sequence
  derived and/or modified protein sequence (wt) from HRSV__AFI25263.1__M2-1
MSRRNPCKFEIRGHCLNGRRCHYSHNYFEWPPHALLVRQNFMLNKILKSMDKSIDTLSEISGAAELDRTEEYALGIVGVLESYIGSINNITKQSACVAMSKLLIEINSDDIKKLRDNEEPNSPKIRVYNTVISYIESNRKNSKQTIHLLKRLPADVLKKTIKNTLDIHKSITISNPKESAVSDQNDQTKNNDIT

SEQ ID NO: 11578 - protein, 194 aa, Artificial Sequence
  derived and/or modified protein sequence (wt) from HRSV__AFM55212.1__M2-1
MSRRNPCKFEIRGHCLNGKRCHFSHNYFEWPPHALLVRQNFMLNRILKSMDRSIDTLSEISGAAELDRTEEYALGVVGVLESYIGSINNITKQSACVAMSKLLTELNSDDIKKLRDNEEPNSPKVRVYNTVISYIESNRKNNKQTIHLLKRLPADVLKKTIKNTLDIHKSITINNPKESTVGDTNDHAKNNDTT

SEQ ID NO: 11579 - protein, 194 aa, Artificial Sequence
  derived and/or modified protein sequence (wt) from HRSV__AFM55223.1__M2-1
MSRRNPCKFEIRGHCLNGKRCHFSHNYFEWPPHALLVRQNFMLNRILKSMDKSIDTLSEISGAAELDRTEEYALGVVGVLESYIGSINNITKQSACVAMSKLLTELNSDDIKKLRDNEEPNSPKVRVYNTVISYIESNRKNNKQTIHLLKRLPADVLKKTIKNTLDIHKSITINNPKESTVSDTNNHAKNNDTT

SEQ ID NO: 11580 - protein, 194 aa, Artificial Sequence
  derived and/or modified protein sequence (wt) from HRSV__AFM55234.1__M2-1
MSRRNPCKFEIRGHCLNGKRCHFSHNYFEWPPHALLVRQNFMLNRILKSMDKSIDTLSEISGAAELDRTEEYALGVVGVLESYIGSINNITKQSACVAMSKLLTELNSDDIKKLKDNEEPNSPKIRVYNTVISYIESNRKNNKQTIHLLKRLPADVLKKTIKNTLDIHKSITINNPKESTVNDTNDHAKNNDTT

SEQ ID NO: 11581 - protein, 194 aa, Artificial Sequence
  derived and/or modified protein sequence (wt) from HRSV__AFM55256.1__M2-1
MSRRNPCKFEIRGHCLNGKRCHFSHNYFEWPPHALLVRQNFMLNRILKSMDKSIDTLSEISGAAELDRTEEYALGVVGVLESYIGSINNITKQSACVAMSKLLTELNSDDIKKLRDNEEPNSPKIRVYNTVISYIESNRKNNKQTIHLLKRLPADVLKKTIKNTLDIHKNITINNPKESTVNDTNDHAKNNDTT

SEQ ID NO: 11582 - protein, 194 aa, Artificial Sequence
  derived and/or modified protein sequence (wt) from HRSV__AFM55333.1__M2-1
MSRRNPCKFEIRGHCLNGKRCHFSHNYFEWPPHALLVRQNFMLNRILKSMDKSIDTLSEISGAAELDRTEEYALGVVGVLESYIGSINNITKQSACVAMSKLLTELNSDDIKKLRDNEEPNSPKVRVYNTVTSYIESNRKNNKQTIHLLKRLPADVLKKTIKNTLDIHKSITINNPKESTVSDTNDHAKNNDTT

SEQ ID NO: 11583 - protein, 194 aa, Artificial Sequence
  derived and/or modified protein sequence (wt) from HRSV__AFM55355.1__M2-1
MSRRNPCKFEIRGHCLNGKRCHFSHNYFEWPPHALLVRQNFMLNRILKSMDKSIDTLSEISGAAELDRTEEYALGVVGVLESYIGSINNITKQSACVAMSKLLIELNSDDIKKLRDNEEPNSPKVRVYNTVISYIESNRKNNKQTIHLLKRLPADVLKKTIKNTLDIHKSITINNPKESTVSDTNDHAKNNDTT

SEQ ID NO: 11584 - protein, 194 aa, Artificial Sequence
  derived and/or modified protein sequence (wt) from HRSV__AFM55410.1__M2-1
MSRRNPCKFEIRGHCLNGKRCHFSHNYFEWPPHALLVRQNFMLNRILKSMDKSIDTLSEISGAAELDRTEEYALGVVGVLESYIGSINNITKQSACVAMSKLLTELNSDDIKKLRDNEEPNSPKIRVYNTVISYIESNRKNNKQTIHLLKRLPADVLKKTIKNTLDIHKSITINNPKESTVNDTTDHAKNNDTT

SEQ ID NO: 11585 - protein, 194 aa, Artificial Sequence
  derived and/or modified protein sequence (wt) from HRSV__AFM55421.1__M2-1
MSRRNPCKFEIRGHCLNGKRCHFSHNYFEWPPHALLVRQNFMLNRILKSMDRSIDTLSEISGAAELDRTEEYALGVVGVLESYIGSINNITKQSACVAMSKLLTELNSDDIKKLRDNEEPNSPKVRVYNTVISYIESNRKNNKQTIHLLKRLPADVLKKTIKNTLDIHKSITINNPKESTVSDTNNHAKNNDTT

SEQ ID NO: 11586 - protein, 194 aa, Artificial Sequence
  derived and/or modified protein sequence (wt) from HRSV__AGN28452.1__M2-1
MSRRNPCKFEIRGHCLNGRRCHYSHNYFEWPPHALLVRQNFMLNKILKSMDKSIDTLSEISGAAELDRTEEYALGIVGVLESYIGSINNITKQSACVAMSKLLIEINSDDIKKLRDNEEPNSSKIRVYNTVISYIESNRKNSKQTIHLLKRLPADVLKKTIKNTLDIHKSITISNPKESTASDQNDQTKNNDIT

SEQ ID NO: 11587 - protein, 194 aa, Artificial Sequence
  derived and/or modified protein sequence (wt) from HRSV__AGN28562.1__M2-1
MSRRNPCKFEIRGHCLNGRRCHYSHNYFEWPPHALLVRQNFMLNKILKSMDKSIDTLSEISGAAELDRTEEYALGIVGVLESYIGSINNITKQSACVAMSKLLIEISSDDIKKLRDNEEPNSPKIRVYNTVISYIESNRKNNKQTIHLLKRLPADVLKKTIKNTLDIHKSITISNPKESTISDQNDQTKNNDIT

SEQ ID NO: 11588 - protein, 194 aa, Artificial Sequence
  derived and/or modified protein sequence (wt) from HRSV__AGN28749.1__M2-1
MSRRNPCKFEIRGHCLNGRRCHYSHNYFEWPPHALLVRQNFMLNKILKSMDKSIDTLSEISGAAELDRTEEYALGIVGVLESYIGSINNITKQSACVAMSKLLIEINSDDIKKLRDNEEPNSPKIRVYNTVISYIESNRKNSKQTIHLLKRLPADVLKKTIKNTLDIHKSITISNPKESTVSDQNDQTENNDIT

SEQ ID NO: 11589 - protein, 194 aa, Artificial Sequence
  derived and/or modified protein sequence (wt) from HRSV__AGT28737.1__M2-1
MSRRNPCKFEIRGHCLNGKRCHFSHNYFEWPPHALLVRQNFMLNKILKSMDKSIDTLSEISGAAELDRTEEYALGVVGVLESYIGSINNITKQSACVAMSKLLTELNSDDIKKLRDNEEPNSPKIRVYNTVISYIESNRKNNKQTIHLLKRLPADVLKKTIKNTLDIHKSITINNPKESTVSDTNDHAKNNDTT

SEQ ID NO: 11590 - protein, 194 aa, Artificial Sequence
  derived and/or modified protein sequence (wt) from HRSV__AGT75380.1__M2-1
MSRRNPCKFEIRGHCLNGKRCHFSHNYFEWPPHALLVRQNFMLNRILKSMDKSIDTLSEISGAAELDRTEEYALGVVGVLESYIGSINNITKQSACVAMSKLLTELNSDDIKKLRDNEEPNSPKIRVYNTVISYIESNRKNNKQTIHLLKRLPADVLKKTIKNTLDSRESITINNPKESTVNDTNDHAKNNDTT

SEQ ID NO: 11591 - protein, 194 aa, Artificial Sequence
  derived and/or modified protein sequence (wt) from HRSV__AHA83684.1__M2-1
MSRKNPCKFEIRGHCLNGKRCHFSHNYFEWPPHALLVRQNFMLNRILKSMDKSIDTLSEISGAAELDRTEEYALGVVGVLESYIGSINNITKQSACVAMSKLLTELNSDDIKKLRDNEEPNSPKIRVYNTVISYIESNRKNNKQTIHLLKRLPADVLKKTIKNTLDIHKSITINNPKESTVNDTNDHAKNNDTT

SEQ ID NO: 11592 - protein, 194 aa, Artificial Sequence
  derived and/or modified protein sequence (wt) from HRSV__AHA83706.1__M2-1
MSRRNPCKFEIRGHCLNGRRCHYSHNYFEWPPHALLVRQNFMLNKILKSMDKSIDTLSEISGAAELDRTEEYALGIVGVLESYIGSVNNITKQSACVAMSKLLIEINSDDIKKLRDNEEPNSPKIRVYNTVISYIESNRKNSKQTIHLLKRLPADVLKKTIKNTLDIHKSITISNPKESTVNDQNDQTKNNDIT

SEQ ID NO: 11593 - protein, 194 aa, Artificial Sequence
  derived and/or modified protein sequence (wt) from HRSV__AHA83750.1__M2-1
MSRRNPCKFEIRGHCLNGRRCHYSHNYFEWPPHALLVRQNFMLNKILKSMDKSIDTLSEISGAAELDRTEEYALGIVGVLESYIGSINNITKQSACVAMSKLLIEINSDDIKKLRDNEEPNSPKIRVYNTVISYIESNRKNSKQTIHLLKRLPADVLKKTIKNTLDIHKSITISNPKESTVNDQDDQTKNNDIT

SEQ ID NO: 11594 - protein, 194 aa, Artificial Sequence
  derived and/or modified protein sequence (wt) from HRSV__AHA83761.1__M2-1
MSRRNPCKFEIRGHCLNGKRCHFSHNYFEWPPHALLVRQNFMLNRILKSMDKSIDTLSEISGAAELDRTEEYALGVVGVLESYIGSINNITKQSACVAMSKLLTELNSDDIKKLRDNEEPNSPKVRVYNTVISYIESNRKNNKQTIHLLKRLPADVLKKTIKNTLDIHKSITINNPKESTVSDTKDHAKNNDTT

SEQ ID NO: 11595 - protein, 194 aa, Artificial Sequence
  derived and/or modified protein sequence (wt) from HRSV__AHA83783.1__M2-1
MSRRNPCKFEIRGHCLNGKRCHFSHNYFEWPPHALLVRQNFMLNRILKSMDKSIDTLSEISGAAELDRTEEYALGVVGVLESYIGSINNITKQSACVAMSKLLTELNSDDIKKLRDNEEPNSPKIRVYNTVISYIESNRKNNKQTIHLLKRLPADVLKKTIKNTLDIHKSITINNPKESIVNDTTDHAKNNDTT

SEQ ID NO: 11596 - protein, 194 aa, Artificial Sequence
  derived and/or modified protein sequence (wt) from HRSV__AHA83991.1__M2-1
MSRRNPCKFEIRGHCLNGRRCHYSHNYFEWPPHALLVRQNFMLNKILKSMDKSIDTLSEISGAAELDRTEEYALGIVGVLESYIGSINNITKQSACVAMSKLLIEISSDDIKKLRDNEEPNSPKIRVYNTVISYIESNRKNNKQTIHLLKRLPADVLKKTIKNTLDIHKSITISNPKEPTISDQNDQTKNNDIT

SEQ ID NO: 11597 - protein, 194 aa, Artificial Sequence
  derived and/or modified protein sequence (wt) from HRSV__AHA84046.1__M2-1
MSRKNPCKFEIRGHCLNGKRCHFSHNYFEWPPHALLVRQNFMLNRILKSMDKSIDTLSEISGAAELDRTEEYALGVVGVLESYIGSINNITKQSACVAMSKLLTELNSDDIKKLRDHEEPNSPKVRVYNTVISYIESNRKNNKQTIHLLKRLPADVLKKTIKNTLDIHKSITINNPKESTVSDTNDHAKNNDTT

SEQ ID NO: 11598 - protein, 194 aa, Artificial Sequence
  derived and/or modified protein sequence (wt) from HRSV__AHA84079.1__M2-1
MSRRNPCKFEIRGHCLNGRRCHYSHNYFEWPPHALLVRQNFMLNKILKSMDKSIDTLSEISGAAELDRTEEYALGIVGVLESYIGSINNITKQSACVAMSKLLIEINSDDIKKLRDNEEPNSPKIRVYNTVISYIESNRKNSKQTIHLLKRLPADVLKKTIKNTLDIHKSITISNPKESTTSDQNDQTKNNDIT

SEQ ID NO: 11599 - protein, 194 aa, Artificial Sequence
  derived and/or modified protein sequence (wt) from HRSV__AHE57805.1__M2-1
MSRRNPCKFEIRGHCLNGKRCHFSHNYFEWSPHALLVRQNFMLNRILKSMDKSIDTLSEISGAAELDRTEEYALGVVGVLESYIGSINNITKQSACVAMSKLLTELNSDDIKKLRDNEEPNSPKIRVYNTVISYIESNRKNNKQTIHLLKRLPADVLKKTIKNTLDIHKSITINNPKESTVNDTNDHAKNNDTT

SEQ ID NO: 11600 - protein, 194 aa, Artificial Sequence
  derived and/or modified protein sequence (wt) from HRSV__AHV80770.1__M2-1
MSRRNPCKFEIRGHCLNGKRCHFSHNYFEWPPHALLVRQNFMLNRILKSMDRSIDTLSEISGAAELDRTEEYALGVVGVLESYIGSLNNITKQSACVAMSKLLTELSSDDIKKLRDSEEPNSPKVRVYNTVTSYIESNRKNNKQTIHLLKRLPADVLKKTIKNTLDIHKSITINNPKESTVSDTNDHAKNNDTT

SEQ ID NO: 11601 - protein, 194 aa, Artificial Sequence
  derived and/or modified protein sequence (wt) from HRSV__AHV80781.1__M2-1
MSRRNPCKFEIRGHCLNGRRCHYSHNYFEWPPHALLVRQNFMLNKILKSMDKSIDTLSEISGAAELDRTEEYALGIVGVLESYIGSINNITKQSACVAMSKLLIEINSDDIKKLRDNEEPNSPKIRVYNTVTSYIESNRKNSKQTIHLLKRLPADVLKKTIKNTLDIHKSITISNPKESTVSDQNDQTKNNDIT

SEQ ID NO: 11602 - protein, 194 aa, Artificial Sequence
  derived and/or modified protein sequence (wt) from HRSV__AHV80804.1__M2-1
MSRRNPCKFEIRGHCLNGRRCHYSHNYFEWPPHALLVRQNFMLNKILKSMDKSIDTLSEISGAAELDRTEEYALGIVGVLESYIGSINNITKQSACVAMSKLLIEISSDDIKKLRDNEEPNSPKIRVYNTVISYIESNRKNNKQTIHLLKRLPADVLKKTIKNTLDIHKSITISNPKESTISDQNDQTKNDDIT

SEQ ID NO: 11603 - protein, 194 aa, Artificial Sequence
  derived and/or modified protein sequence (wt) from HRSV__AHV80815.1__M2-1
MSRRNPCKFEIRGHCLNGKRCHFSHNYFEWPPHALLVRQNFMLNRILKSMDKSIDTLSEISGAAELDRTEEYALGVVGVLESYIGSINNITKQSACVAMSKLLTELNSDDIKKLRDHEEPNSPKVRVYNTVISYIESNRKNNKQTIHLLKRLPADVLKKTIKNTLDIHKSITINNPRESTVSDTNDHAKNNDTT

SEQ ID NO: 11604 - protein, 194 aa, Artificial Sequence
  derived and/or modified protein sequence (wt) from HRSV__AHV80848.1__M2-1
MSRRNPCKFEIRGHCLNGKRCHFSHNYFEWPPHALLVRQNFMLNRILKSMDRSIDTLSEISGAAELDRTEEYALGVVGVLESYIGSLNNITKQSACVAMSKLLTELSSDDIKKLRDSEEPNSPKIRVYNTVTSYIESNRKNNKQTIHLLKRLPADVLKKTIKNTLDIHKSITINNPKESTVSDTNDHAKNNDTT

SEQ ID NO: 11605 - protein, 194 aa, Artificial Sequence
  derived and/or modified protein sequence (wt) from HRSV__AHV80925.1__M2-1
MSRRNPCKFEIRGHCLNGRRCHYSHNYFEWPPHALLVRQNFMLNKILKSMDKSIDTLSEISGAAELDRTEEYALGIVGVLESYIGSINNITKQSACVAMSKLFIEINSDDIKKLRDNEEPNSPKIRVYNTVISYIESNRKNSKQTIHLLKRLPADVLKKTIKNTLDIHKSITISNPKESTVSDQNDQTKNNDIT

SEQ ID NO: 11606 - protein, 194 aa, Artificial Sequence
  derived and/or modified protein sequence (wt) from HRSV__AHV81024.1__M2-1
MSRRNPCKFEIRGHCLNGKRCHFSHNYFEWPPHALLVRQNFMLNRILKSMDKSIDTLSEISGAAELDRTEEYALGVVGVLESYIGSINNITKQSACVAMSKLLTELNSDDIKKLRDHEEPNSPKVRVYNTVISYIESNRKNNKQTIHLLKRLPADVLRKTIKNTLDIHKSITINNPKESTVSDTNDHAKNNDTT

SEQ ID NO: 11607 - protein, 194 aa, Artificial Sequence
  derived and/or modified protein sequence (wt) from HRSV__AHV81090.1__M2-1
MSRRNPCKFEIRGHCLNGRRCHYSHNYFEWPPHALLVRQNFMLNKILKSMDKSIDTLSEISGAAELDRTEEYALGIVGVLESYIGSINNITKQSACVAMSKLLIEINSDDIKKLRDNEELNSPKIRVYNTVISYIESNRKNSKQTIHLLKRLPADVLKKTIKNTLDIHKSITISNPKESTISDQNDQTKNNDIT

SEQ ID NO: 11608 - protein, 194 aa, Artificial Sequence
  derived and/or modified protein sequence (wt) from HRSV__AHV81320.1__M2-1
MSRRNPCKFEIRGHCLNGRRCHYSHNYFEWPPHALLVRQNFMLNKILKSMDKSIDTLSEISGAAELDRTEEYALGIVGVLESYIGSINNITKQSACVAMSKLLIEINSDDIKKLRDNEELNSPKIRVYNTVISYIESNRKNSKQTIHLLKRLPADVLKKTIKNTLDIHKSITISNPKESTVSDQNDQTKNNDIT

SEQ ID NO: 11609 - protein, 194 aa, Artificial Sequence
  derived and/or modified protein sequence (wt) from HRSV__AHV81353.1__M2-1
MSRRNPCKFEIRGHCLNGRRCHYSHNYFEWPPHALLVRQNFMLNKILKSMDKSIDTLSEISGAAELDRTEEYALGIVGVLESYIGSINNITKQSACVAMSKLLIEINSDDIKKLRDSEEPNSPKIRVYNTVISYIESNRKNSKQTIHLLKRLPADVLKKTIKNTLDIHKSITISNPKESTVSDQNDQTKNNDIT

SEQ ID NO: 11610 - protein, 194 aa, Artificial Sequence
  derived and/or modified protein sequence (wt) from HRSV__AHV81386.1__M2-1
MSRRNPCKFEIRGHCLNGKRCHFSHNYFEWPPHALLVRQNFMLNRILKSMDKSIDTLSEISGAAELDRTEEYALGIVGVLESYIGSINNITKQSACVAMSKLLTELNSDDIKKLRDNEEPNSPKVRVYNTVISYIESNRKNNKQTIHLLKRLPADVLKKTIKNTLDIHKSITINNPKESTVSDTNDHAKNNDTT

SEQ ID NO: 11611 - protein, 194 aa, Artificial Sequence
  derived and/or modified protein sequence (wt) from HRSV__AHV81485.1__M2-1
MSRRNPCKFEIRGHCLNGKRCHFSHNYFEWPPHALLVRQNFMLNRILKSMDRSIDTLSEISGAAELDRTEEYALGVVGVLESYIGSLNNITKQSACVAMSKLLTELSSDDIKKLRDSEEPNSPKVKVYNTVTSYIESNRKNNKQTIHLLKRLPADVLKKTIKNTLDIHKSITINNPKESTVSDTNDHAKNNDTT

SEQ ID NO: 11612 - protein, 194 aa, Artificial Sequence
  derived and/or modified protein sequence (wt) from HRSV__AHV81650.1__M2-1
MSRRNPCKFEIRGHCLNGRRCHYSHNYLEWPPHALLVRQNFMLNKILKSMDKSIDTLSEISGAAELDRTEEYALGIVGVLESYIGSINNITKQSACVAMSKLLIEINSDDIKKLRDNEEPNSPKIRVYNTVISYIESNRKNSKQTIHLLKRLPADVLKKTIKNTLDIHKSITISNPKESTISDQNDQTKNNDIT

SEQ ID NO: 11613 - protein, 194 aa, Artificial Sequence
  derived and/or modified protein sequence (wt) from HRSV__AHV81815.1__M2-1
MSRRNPCKFEIRGHCLNGKRCHFSHNYFEWPPHALLVRQNFMLNRILKSMDKSIDTLSEISGAAELDRTEEYALGVVGVLESYIGSINNITKQSACVAMSKLLTELNSDDIKKLRDNEEPNSPKVRVYNTVISYIESNRKNNKQTIHLLKRLPAEVLKKTIKNTLDIHKSITINNPKESTVSDTNDHAKNNDTT

SEQ ID NO: 11614 - protein, 194 aa, Artificial Sequence
  derived and/or modified protein sequence (wt) from HRSV__AHV81837.1__M2-1
MSRRNPCKFEIRGHCLNGRRCHYSHNYFEWPSHALLVRQNFMLNKILKSMDKSIDTLSEISGAAELDRTEEYALGIVGVLESYIGSINNITKQSACVAMSKLLIEISSDDIKKLRDNEEPNSPKIRVYNTVISYIESNRKNNKQTIHLLKRLPADVLKKTIKNTLDIHKSITISNPKESTISDQNDQTKNNDIT

SEQ ID NO: 11615 - protein, 194 aa, Artificial Sequence
  derived and/or modified protein sequence (wt) from HRSV__AHW80891.1__M2-1
MSRRNPCKFEIRGHCLNGKRCHFSHNYFEWPPHALLVRQNFMLNRILKSMDKSIDTLSEISGAAELDRTEEYALGVVGVLESYIGSINNITKQSACVAMSKLLTELNSDDIKKLRDNEEPNSPKIRVYNTVISYIESNRKNNKQTIHLLKRLPADVLKKTIKNTLDIHKGITINNPKESTVNDTNDHAKNNDTT

SEQ ID NO: 11616 - protein, 194 aa, Artificial Sequence
  derived and/or modified protein sequence (wt) from HRSV__AHW80951.1__M2-1
MSRRNPCKFEIRGHCLNGKRCHFSHNYFEWPPHALLVRQNFMLNRILKSMDKSIDTLSEISGAAELDRTEEYALGVVGVLESYIGSINNITKQSACVAMSKLLTELSSDDIKKLRDNEEPNSPKIRVYNTVISYIESNRKNNKQTIHLLKRLPADVLKKTIKNTLDIHKSITINNPKESTVNDTNDHAKNNDTT

SEQ ID NO: 11617 - protein, 194 aa, Artificial Sequence
  derived and/or modified protein sequence (wt) from HRSV__AHW80971.1__M2-1
MSRRNPCKFEIRGHCLNGKRCHFSHNYFEWPPHALLVRQNFMLNRILKSMDKSIDTLSEISGAAELDRTEEYALGVVGVLESYIGSINNITKQSACVAMSKLLTELNSDDIKKLRDNEEPNSPKVRVYNTVISYIESNRKNNKQTIHLLKRLPADVLKKTIKNTLDIHKSITINNPKESTVNDTNDHAKNNDTT

SEQ ID NO: 11618 - protein, 194 aa, Artificial Sequence
  derived and/or modified protein sequence (wt) from HRSV__AHW80991.1__M2-1
MSRRNPCKFEIRGHCLNGKRCHFSHNYFEWPPHALLVRQNFMLNRILKSMDKSIDTLSEISGAAELDRTEEYALGVVGVLESYIGSINNITKQSACVAMSKLLTELNSDDIKKLRDNEEPNSPKIRVYNTVTSYIESNRKNNKQTIHLLKRLPADVLKKTIKNTLDIHKSITINNPKESTVNDTNDHAKNNDTT

SEQ ID NO: 11619 - protein, 194 aa, Artificial Sequence
  derived and/or modified protein sequence (wt) from HRSV__AHW81241.1__M2-1
MSRRNPCKFEIRGHCLNGKRCHFSHNYFEWPPHALLVRQNFMLNRILKSMDKSIDTLSEISGAAELDRTEEYALGVVGVLESYIGSINNITKQSACVAMSKLLTELNSDDIKKLRDNEEPNSPKIRVYNTVISYIESNRKNNKQTIHLLKRLPADVLKKTIKNTLDIHKSITINNPKESTVNDTNDHAKNNDTA

SEQ ID NO: 11620 - protein, 194 aa, Artificial Sequence
  derived and/or modified protein sequence (wt) from HRSV__AHW81381.1__M2-1
MSRRNPCKFEIRGHCLNGKRCHFSHNYFEWPPHALLVRQNFMLNRILKSMDKSIDTLSEISGAAELDRTEEYALGVVGVLESYIGSINNITKQSACVAMSKLLTELNSDDIKKLRDNEEPNSPKVRVYNTVISYIESNRKNNKQTIHLLKRLPADVLKKTIKNTLDIHKIITINNPKESTVSDTNDHAKNNDTT

SEQ ID NO: 11621 - protein, 194 aa, Artificial Sequence
  derived and/or modified protein sequence (wt) from HRSV__AHX56988.1__M2-1
MSRRNPCKFEIRGHCLNGRRCHYSHNYFEWPPHALLVRQNFMLNKILKSMDKSIDTLSEISGAAELDRTEEYALGIVGVLESYIGSINNITKQSACVAMSKLLIEINSDDIKKLRDNEEPNSPKIRVYNTVISYIESNRKNSKQTIHLLKRLPADVLKKTIKNTLDIHKSITISNSKESTVSDQNDQTKNNDIT

SEQ ID NO: 11622 - protein, 194 aa, Artificial Sequence
  derived and/or modified protein sequence (wt) from HRSV__AHX57044.1__M2-1
MSRRNPCKFEIRGHCLNGRRCHYSHNYFEWPPHALLVRQNFILNKILKSMDKSIDTLSEISGAAELDRTEEYALGIVGVLESYIGSINNITKQSACVAMSKLLIEINSDDIKKLRDNEEPNSPKIRVYNTVISYIESNRKNSKQTIHLLKRLPADVLKKTIKNTLDIHKSITISNPKESTVSDQNDQTKNNDIT

SEQ ID NO: 11623 - protein, 194 aa, Artificial Sequence
  derived and/or modified protein sequence (wt) from HRSV__AHX57241.1__M2-1
MSRRNPCKFEIRGHCLNGKRCHFSHNYFEWPPHALLVRQNFMLNRILKSMDKSIDTLSEISGAAELDRTEEYALGVVGVLESYIGSINNITKQSACVAMSKLLTELNSDDIKKLRDNEEPNSPKVRVYNTVISYIESNRKNNKQTIHLLKRLPADVLKKTIKNTLDIHKSITINNSKESTVSDTNDHAKNNDTT

SEQ ID NO: 11624 - protein, 194 aa, Artificial Sequence
  derived and/or modified protein sequence (wt) from HRSV__AHX57615.1__M2-1
MSRRNPCKFEIRGHCLNGKRCHFSHNYFEWPPHALLVRQNFMLNRILKSMDKSIDTLSEISGAAELDRTEEYALGVVGVLESYIGSINNITKQSACVAMSKLLTELNSNDIKKLRDNEEPNSPKVRVYNTVISYIESNRKNNKQTIHLLKRLPADVLKKTIKNTLDIHKSITINNPKESTVSDTNDHAKNNDTT

SEQ ID NO: 11625 - protein, 194 aa, Artificial Sequence
  derived and/or modified protein sequence (wt) from HRSV__AHY21156.1__M2-1
MSRRNPCKFEIRGHCLNGKRCHFSHNYFEWPPHALLVRQNFMLNRILKSMDKSIDTLSEISGAAELDRTEEYALGVVGVLESYIGSINNITKQSACVAMSKLLTELNSDDIKRLRDNEEPNSPKIRVYNTVISYIESNRKNNKQTIHLLKRLPADVLKKTIKNTLDIHKSITINNPKESTVNDTNDHAKNNDTT

SEQ ID NO: 11626 - protein, 194 aa, Artificial Sequence
  derived and/or modified protein sequence (wt) from HRSV__AHY21201.1__M2-1
MSRRNPCKFEIRGHCLNGRRCHYSHNYFEWPHHALLVRQNFMLNKILKSMDKSIDTLSEISGAAELDRTEEYALGIVGVLESYIGSINNITKQSACVAMSKLLIEINSDDIKKLRDNEEPNSPKIRVYNTVISYIESNRKNNKQTIHLLKRLPADVLKKTIKNTLDIHKSITISNPKESTVSDQNDQTKNNDIT

SEQ ID NO: 11627 - protein, 194 aa, Artificial Sequence
  derived and/or modified protein sequence (wt) from HRSV__AHY21223.1__M2-1
MSRRNPCKFEIRGHCLNGKRCHFSHNYFEWPPHALLVRQNFMLNRILKSMDKSIDTLSEISGAAELDRTEEYALGVVGVLESYIGSINNITKQSACVAMSKLLTELNSDDIKKLRDNEEPNSPKIRVYNTVTSYIESNRKNNKQTIHLLKRLPADVLKKTIKNTLDIHKSITINNPKESADSDTNDHAKNNDTT

SEQ ID NO: 11628 - protein, 194 aa, Artificial Sequence
  derived and/or modified protein sequence (wt) from HRSV__AHY21255.1__M2-1
MSRRNPCKFEIRGHCLNGKRCHFSHNYFEWPPHALLVRQNFMLNRILKSMDKSIDTLSEISGAAELDRTEEYALGVVGVLESYIGSINNITKQSACVAMSKLLTELNSDDIKRLRDNEEPNSPKIRVYNTVISYIESNRKNNKQTIHLLKRLPADVLKKTIKNTLDIHKSITINNPKESTVSDTNDHAKNNDTT

SEQ ID NO: 11629 - protein, 194 aa, Artificial Sequence
  derived and/or modified protein sequence (wt) from HRSV__AHY21354.1__M2-1
MSRRNPCKFEIRGHCLNGRRCHYSHNYFEWPSHALLVRQNFILNKILKSMDKSIDTLSEISGAAELDRTEEYALGIVGVLESYIGSINNITKQSACVAMSKLLIEINSDDIKKLRDNEEPNSPKIRVYNTVISYIESNRKNNKQTIHLLKRLPADVLKKTIKNTLDIHKSITISNPKESTVNDQNDQTKNNDIT

SEQ ID NO: 11630 - protein, 194 aa, Artificial Sequence
  derived and/or modified protein sequence (wt) from HRSV__AHY21365.1__M2-1
MSRRNPCKFEIRGHCLNGRRCHYSHNYFEWPSHALLVRQNFMLNKILKSMDKSIDTLSEISGAAELDRTEEYALGIVGVLESYIGSINNITKQSACVAMSKLLIEINSDDIKKLRDNEEPNSPKIRVYNTVISYIESNRKNNKQTIHLLKRLPADVLKKTIKNTLDIHKSITISNPKESTVNDQNDQTKNNDIT

SEQ ID NO: 11631 - protein, 194 aa, Artificial Sequence
  derived and/or modified protein sequence (wt) from HRSV__AHY21387.1__M2-1
MSRRNPCKFEIRGHCLNGRRCHYSHNYFEWPPHALLVRQNFMLNKILKSMDKSIDTLSEISGAAELDRTEEYALGIVGVLESYIGSINNITKQSACVAMSKLLIEINSDDIKRLRDNEEPNSPKIRVYNTVISYIESNRKNNKQTIHLLKRLPADVLKKTIKNTLDIHKSITISNPKESTVSDQNDQTKNNDIT

SEQ ID NO: 11632 - protein, 194 aa, Artificial Sequence
  derived and/or modified protein sequence (wt) from HRSV__AHY21399.1__M2-1
MSRRNPCKFEIRGHCLNGRRCHYSHNYFEWPPHALLVRQNFMLNKILKSMDKSIDTLSEISGAAELDRTEEYALGIVGVLESYIGSINNITKQSACVAMSKLLIEINSDDIKKQRDNEEPNSPKIRVYNTVISYIESNRKNNKQTIHLLKRLPADVLKKTIKNTLDIHKNITISSSKESTVNDQNDQTKNNDIT

SEQ ID NO: 11633 - protein, 194 aa, Artificial Sequence
  derived and/or modified protein sequence (wt) from HRSV__AHY21432.1__M2-1
MSRRNPCKFEIRGHCLNGKRCHFSHNYFEWPPHALLVRQNFMLNRILKSMDKSIDTLSEISGAAELDRTEEYALGVVGVLESYIGSINNITKQSACVAMSKLLTELNSDDIKKLRDNEELNSPKIRVYNTVISYIESNRKNNKQTIHLLKRLPADVLKKTIKNTLDIHKSITINNPKELTVSNTNDHAKNNDTT

SEQ ID NO: 11634 - protein, 194 aa, Artificial Sequence
  derived and/or modified protein sequence (wt) from HRSV__AHY21442.1__M2-1
MSRRNPCKFEIRGHCLNGKRCHFNHNYFEWPPHALLVRQNFMLNRILKSMDKSIDTLSEISGAAELDRTEEYALGVVGVLESYIGSINNITKQSACVAMSKLLTELNSDDIKKLRDNEEPNSPKIRVYNTVISYIESNRKNNKQTIHLLKRLPADVLKKTIKNTLDIHKSITINNPKESTVNDTNDHAKNNDTT

SEQ ID NO: 11635 - protein, 194 aa, Artificial Sequence
  derived and/or modified protein sequence (wt) from HRSV__AIA62796.1__M2-1
MSRRNPCKFEIRGHCLNGKRCHFSHNYFEWPPHALLVRQNFMLNRILKSMDKSIDTLSEISGAAELDRTEEYALGVVGVLESYIGSINNITKQSACVAMSKLLTELNSDDIKKLRDNEEPNSPKIRVYNTVISYIESNRKNNKQTIHLLKRLPADVLKKTIKNTLDIHKSITINNPKESTVNDTNDHAKNNDAT

SEQ ID NO: 11636 - protein, 194 aa, Artificial Sequence
  derived and/or modified protein sequence (wt) from HRSV__AIA63155.1__M2-1
MSRRNPCKFEIRGHCLNGKRCHFSHNYFEWPPHALLVRQNFMLNRILKSMDKSIDTLSEISGAAELDRTEEFAHGVVGVLESYIGSINNITKQSACVAMSKLLTELNSDDIKKLRDNEEPNSPKIRVYNTVISYIESNRKNNKQTIHLLKRLPADVLKKTIKNTLDIHKSITINNPKESTVNDTNDHAKNNDTT

SEQ ID NO: 11637 - protein, 194 aa, Artificial Sequence
  derived and/or modified protein sequence (wt) from HRSV__AII22108.1__M2-1
MSRRNPCKFEIRGHCLNGKKCHFSHNYFEWPPHALLVRQNFMLNRILKSMDKSIDTLSEISGAAELDRTEEYALGVVGVLESYIGSINNITKQSACVAMSKLLTELNSDDIKKLRDNEEPNSPKVRVYNTVISYIESNRKNNKQTIHLLKRLPADVLKKTIKNTLDIHKSITINNPKESTVSDTNDHAKNNDTT

SEQ ID NO: 11638 - protein, 194 aa, Artificial Sequence
  derived and/or modified protein sequence (wt) from HRSV__AII22130.1__M2-1
MSRRNPCKFEIRGHCLNGKRCHFSHNYFEWPPHALLVRQNFMLNRILKSMDKSIDTLSEISGAAELDRTEEYALGVVGVLESYIGSINNITKQSACVAMSKLLTELNSDDIKKLRDNEEPNSPKARVYNTVISYIESNRKNNKQTIHLLKRLPADVLKKTIKNTLDIHKSITINNPKESTVSDTNDHAKNNDTT

SEQ ID NO: 11639 - protein, 194 aa, Artificial Sequence
  derived and/or modified protein sequence (wt) from HRSV__AIZ95509.1__M2-1
MSRRNPCKFEIRGHCLNGKRCHFSHNYFEWPPHALLVRQNFMLNRILKSMDKSIDTLSEISGAAELDRTEEYALGVVGVLESYIGSINNITKQSACVAMSKLLTELNSDDIKKLRNNEEPNSPKIRVYNTVTSYIESNRKNNKQTIHLLKRLPADVLKKTIKNTLDIHKSITINNPKESADSDTNDHAKNNDTT

SEQ ID NO: 11640 - protein, 194 aa, Artificial Sequence
  derived and/or modified protein sequence (wt) from HRSV__AIZ95696.1__M2-1
MSRRNPCKFEIRGHCLNGRRCHYSHNYFEWPPHALLVRQNFMLNKILKSMDKSIDTLSEISGAAELDRTEEYALGIVGVLESYIGSINNITKQSACVAMSKLLIEINSDDIKKLRDNEEPNSPKIRVYNTVISYIESNRKNNKQTIHLLKRLPADVLKKTIKNTLDIHKSITISNSKESTVNDQNDQTKNNDIT

SEQ ID NO: 11641 - protein, 194 aa, Artificial Sequence
  derived and/or modified protein sequence (wt) from HRSV__AIZ95762.1__M2-1
MSRRNPCKFEIRGHCLNGRRCHYSHNYFEWPPHALLVRQNFMLNKILKSMDKSIDTLSEISGAAELDRTEEYALGIVGVLESYIGSINNITKQSACVAMSKLLIEINSDDIKKLRDNEEPNSPKIRVYNTVISYIESNRKNNKQTIHLLKRLPADVLKKTIKNTLDIHKSITINNPKESTVNDQNDQTKNNDIT

SEQ ID NO: 11642 - protein, 194 aa, Artificial Sequence
  derived and/or modified protein sequence (wt) from HRSV__AIZ95828.1__M2-1
MSRRNPCKFEIRGHCLNGKRCHFSHNYFEWPPHALLVRQNFMLNRILKSMDKSIDTLSEISGAAELDRTEEYALGVVGVLESYIGSINNITKQSACVAMSKLLTELNSDDIKKLRDNEEPNSPKIRVYNTVISYIESNRKNNKQTIHLLKRLPADVLKKTIKNTLDIHKSITINNPKESTVNDTNNHAKNNDTT

SEQ ID NO: 11643 - protein, 194 aa, Artificial Sequence
  derived and/or modified protein sequence (wt) from HRSV__AIZ95927.1__M2-1
MSRRNPCKFEIRGHCLNGRRCHYSHNYFEWPPHALLVRQNFMLNKILKSMDKSIDTLSEISGAAELDRTEEYALGIVGVLESYIGSINNITKQSACVAMSKLLIEINSDDIKKLRDNEESNSPKIRVYNTVISYIESNRKNNKQTIHLLKRLPADVLKKTIKNTLDIHKSITISNPKESTVNDQNDQTKNNDIT

SEQ ID NO: 11644 - protein, 194 aa, Artificial Sequence
  derived and/or modified protein sequence (wt) from HRSV__AIZ95938.1__M2-1
MSRRNPCKFEIRGHCLNGKRCHFSHNYFEWPPHALLVRQNFMLNRILKSMDKSIDTLSEISGAAELDRTEEYALGVVGVLESYIGSINNITKQSACVAMSKLLTELNSDDIKKLRDTEEPNSPKIRVYNTVISYIESNRKNNKQTIHLLKRLPADVLKKTIKNTLDIHKSITINNPKESTVSDTNDHAKNNDTT

SEQ ID NO: 11645 - protein, 194 aa, Artificial Sequence
  derived and/or modified protein sequence (wt) from HRSV__AIZ95949.1__M2-1
MSQRNPCKFEIRGHCLNGRRCHYSHNYFEWPPHALLVRQNFMLNKILKSMDKSIDTLSEISGAAELDRTEEYALGIVGVLESYIGSINNITKQSACVAMSKLLIEINSDDIKKQRDNEEPNSPKIRVYNTVISYIESNRKNNKQTIHLLKRLPADVLKKTIKNTLDIHKNITISNSKESTVNDQNDQTKNNDIT

SEQ ID NO: 11646 - protein, 194 aa, Artificial Sequence
  derived and/or modified protein sequence (wt) from HRSV__AIZ96004.1__M2-1
MSRRNPCKFEIRGHCLNGKRCHFSHNYFEWPPHALLVRQNFMLNRILKSMDKSIDTLSEISGAAELDRTEEYALGVVGVLESYIGSINNITKQSACVAMSKLLTELNSDDIKKLKDTEEPNSPKIRVYNTVISYIESNRKNNKQTIHLLKRLPADVLKKTIKNTLDIHKSITINNPKESTVSDTDDHAKNNDTT

SEQ ID NO: 11647 - protein, 194 aa, Artificial Sequence
  derived and/or modified protein sequence (wt) from HRSV__AJF44527.1__M2-1
MSRRNPCKFEIRGHCLNGRRCHYSHNYFEWPSHALLVRQNFMLNKILKSMDKSIDTLSEISGAAELDRTEEYALGIVGVLESYIGSINNITKQSACVAMSKLLIEINSDDIKKLRDNEEPSSPKIRVYNTVISYIESNRKNNKQTIHLLKRLPADVLKKTIKNTLDIHKSITISNPKESTVSDHNDQTKNNDIT

SEQ ID NO: 11648 - protein, 194 aa, Artificial Sequence
  derived and/or modified protein sequence (wt) from HRSV__AJF44603.1__M2-1
MSRRNPCKFEIRGHCLNGRRCHYSHNYFEWPPHALLVRQNFMLNKILKSMDKSIDTLSEISGAAELDRTEEYALGIVGVLESYIGSINNITKQSACVAMSKLLIEINSDDIKKLRDNEEPNSPKIRVYNTVISYIESNRKNSKQTIHLLKRLPADVLKKTIKNTLDIHKSITISNPKESTVSDQNDQPKNNDIT

SEQ ID NO: 11649 - protein, 194 aa, Artificial Sequence
  derived and/or modified protein sequence (wt) from HRSV__AJF44726.1__M2-1
MSRRNPCKFEIRGHCLNGKRCHFSHNYFEWPPHALLVRQNFMLNRILKSMDKSIDTLSEISGAAELDRTEEYALGVVGVLESYIGSINNITKQSACVAMSKLLTELNSDDIKKLRDNEETNSPKVRVYNTVISYIESNRKNNKQTIHLLKRLPADVLKKTIKNTLDIHKSITINNPKESTVSDTNDHAKNNDTT

SEQ ID NO: 11650 - protein, 194 aa, Artificial Sequence
  derived and/or modified protein sequence (wt) from HRSV__AJF44729.1__M2-1
MSRRNPCKFEIRGHCLNGERCHFSHNYFEWPPHALLVRQNFMLNRILKSMDKSIDTLSEISGAAELDRTEEYALGVVGVLESYIGSINNITKQSACVAMSKLLTELNSDDIKKLRDNEETNSPKVRVYNTVISYIESNRKNNKQTIHLLKRLPADVLKKTIKNTLDIHKSITINNPKESTVSDTNDHAKNNDTT

SEQ ID NO: 11651 - protein, 194 aa, Artificial Sequence
  derived and/or modified protein sequence (wt) from HRSV__AJF44827.1__M2-1
MSRRNPCKFEIRGHCLNGKRCHFSHNYFEWPPHALLVGQNFMLNRILKSMDKSIDTLSEISGAAELDRTEEYALGVVGVLESYIGSINNITKQSACVAMSKLLTELNSDDIKKLRDHEEPNSPKVRVYNTVISYIESNRKNNKQTIHLLKRLPADVLKKTIKNTLDIHKSITINNPKESTVSDTNDHAKNNDTT

SEQ ID NO: 11652 - protein, 194 aa, Artificial Sequence
  derived and/or modified protein sequence (wt) from HRSV__AJO16078.1__M2-1
MSRRNPCKFEIRGHCLNGRRCHYSHNYFEWPPHALLVRQNFMLNKILKSMDKSIDTLSEISGAAELDRTEEYALGIVGVLESYIGSINNITKQSACVAMSKLLIEINSDDIKKLRDNEEPNSPKIRVYNTVISYIESNRKNSKQTIHLLKRLPADVLKKTIKNTLDIHRSITISNPKESTISDQNDQTKNNDIT

SEQ ID NO: 11653 - protein, 194 aa, Artificial Sequence
  derived and/or modified protein sequence (wt) from HRSV__AJZ69870.1__M2-1
MSRRNPCKFEIRGHCLNGKRCHFSHNYFEWPPHALLVRQNFMLNRILKSMDKSIDTLSEISGAAELDRTEEYALGVVGVLESYIGSINNITKQSACVAMSKLLTELNSDDIKKLRDNEELNSPKVRVYNTVISYIESNRKNNKQTIHLLKRLPADVLKKTIKNTLDIHKSITINNPKESTVNDTNDHAKNNDTT

SEQ ID NO: 11654 - protein, 194 aa, Artificial Sequence
  derived and/or modified protein sequence (wt) from HRSV__AJZ70167.1__M2-1
MSRRNPCKFEIRGHCLNGKRCHFSHNYFEWPPHALLVRQNFMLNRILKSMDKSIDTLSEISGAAELDRTEEYALGVVGVLESYIGSINNITKQSACVAMSKLLTELNSDDIKKLRDHEEPNSPKVRVYNTVISYIESNRKNNKQTIHLLKRLPADVLKKTIKNTLDIHKSITINNPKESTVSDTSDHAKNNDTT

SEQ ID NO: 11655 - protein, 194 aa, Artificial Sequence
  derived and/or modified protein sequence (wt) from HRSV__AKA45839.1__M2-1
MSRRNPCKFEIRGHCLNGRRCHYSHNYFEWPPHALLVRQNFMLNKILKSMDKSIDTLSEISGAAELDRTEEYALGIVGVLESYIGSVNNITKQSACVAMSKLLIEINSDDIKKLRDNEEPNSPKIRVYNTVISYIESNRKNNKQTIHLLKRLPADVLKKTIKNTLDIHKSITISNPKESTVSDQNDQTKNNDIT

SEQ ID NO: 11656 - protein, 194 aa, Artificial Sequence
  derived and/or modified protein sequence (wt) from HRSV__AKA45850.1__M2-1
MSRRNPCKFEIRGHCLNGRRCHYSHNYFEWPPHALLVRQNFMLNKILKSMDKSIDTLSEISGAAELDRTEEYALGIVGVLESYIGSINNITKQSACVAMSKLLIEINSDDIKKLRDNEEPNSPKIRVYNTVISYIESNRKNNKQTIHLLKRLPADVLKKTIKNTLDIHKSITVSNPKESTVSEQNDQTKNNDIT

SEQ ID NO: 11657 - protein, 194 aa, Artificial Sequence
  derived and/or modified protein sequence (wt) from HRSV__ALC74026.1__M2-1
MSRRNPCKFEIRGHCLNGRRCHYSHNYFEWPPHALLVRQNFMLNKILKSMDKSIDTLSEISGAAELDRTEEYALGIVGVLESYIGSINNITKQSACVAMSKLLIEINSDDIRKLRDNEEPNSPKIRVYNTVISYIESNRKNSKQTIHLLKRLPADVLKKTIKNTLDIHKSITISNPKESTVSDQNDQTKNNDIT

SEQ ID NO: 11658 - protein, 194 aa, Artificial Sequence
  derived and/or modified protein sequence (wt) from HRSV__AMA66450.1__M2-1
MSRRNPCKFEIRGHCLNGRRCHYSHNYFEWPSHALLVRQNFMLNKILKSMDKSIDTLSEISGAAELDRTEEYALGIVGVLESYIGSINNITKQSACVAMSKLLIEINSDDIKKLRDNEEPNSPKIRVYNTVISYIESNRKNNKQTIHLLKRLPADVLKKTIKNTLDIHKSITISNPKESTVSDQNDQTKNNDIT

SEQ ID NO: 11659 - protein, 194 aa, Artificial Sequence
  derived and/or modified protein sequence (wt) from HRSV__AMA66559.1__M2-1
MSRRNPCKFEIRGHCLNGKRCHFSHNYFEWPPHALLVRQNFMLNRILKSMDKSIDTLSEISGAAELDRTEEYALGVVGVLESYIGSINNITKQSACVAMSKLLTELNSDDIKKLRDNEEPNSPKIRVYNTVISYIESNRKNNKQTIHLLKRLPADVLKKTIKNTLDIHKSITINNPKESTFSDTNDHAKNNDTT

SEQ ID NO: 11660 - protein, 194 aa, Artificial Sequence
  derived and/or modified protein sequence (wt) from HRSV__AMA66570.1__M2-1
MSRRNPCKFEIRGHCLNGRRCHYSHNYFEWPHHALLVRQNFILNKILKSMDKSIDTLSEISGAAELDRTEEYALGIVGVLESYIGSINNITKQSACVAMSKLLIEINSDDIKKLRDNEEPNSPKIRVYNTVISYIESNRKNNKQTIHLLKRLPADVLKKTIKNTLDIHKSITISNPKESTVSDQNDQTKNNDIT

SEQ ID NO: 11661 - protein, 194 aa, Artificial Sequence
  derived and/or modified protein sequence (wt) from HRSV__AMA66581.1__M2-1
MSRRNPCKFEIRGHCLNGKRCHFSHNYFEWPPHALLVRQNFMLNRILKSMDKSIDTLSEISGAAELDRTEEYALGVVGVLESYIGSINNITKQSACVAMSKLLTELNSDDIKKLRDNEELNSPKIRVYNTVISYIESNRKNNKQTIHLLKRLPADVLKKTIKNTLDIHKSVTINNPKELTVSDTNDHAKNNDTT

SEQ ID NO: 11662 - protein, 194 aa, Artificial Sequence
  derived and/or modified protein sequence (wt) from HRSV__AMA66625.1__M2-1
MSRRNPCKFEIRGHCLNGRRCHYSHNYFEWPPHALLVRQNFMLNKILKSMDKSIDTLSEISGAAELDRTEEYALGIVGVLESYIGSINNITKQSACVAMSKLLIEINSDDIKKLRDNEEPNSPKIRVYNTVISYIESNRKNTKQTIHLLKRLPADVLKKTIKNTLDIHKSITISNPKESTVNDQNDQTKNNDIT

SEQ ID NO: 11663 - protein, 194 aa, Artificial Sequence
  derived and/or modified protein sequence (wt) from HRSV__AMA66922.1__M2-1
MSRKNPCKFEIRGHCLNGKRCHFSHNYFEWPPHALLVRQNFMLNRILKSMDKSIDTLSEISGAAELDRTEEYALGVVGVLESYIGSINNITKQSACVAMSKLLTELNSDDIKKLRDNEEPNSPKIRVYNTVISYIESNRKNNKQTIHLLKRLPADVLKKTIKNTLDIHKSVTINNPKESTVGDTNDHAKNNDTT

SEQ ID NO: 11664 - protein, 194 aa, Artificial Sequence
  derived and/or modified protein sequence (wt) from HRSV__AMA66966.1__M2-1
MSRRNPCKFEIRGHCLNGRRCHYSHNYFEWPSHALLVRQNFMLNKILKSMDKSIDTLSEISGAAELDRTEEYALGIVGVLESYIGSINNITKQSACVAMSKLLIEINSDDIKKLKDNEEPNSPKIRVYNTVISYIESNRKNNKQTIHLLKRLPADVLKKTIKNTLDIHKSITISNPKESTVNDQNDQTKNNDIT

SEQ ID NO: 11665 - protein, 194 aa, Artificial Sequence
  derived and/or modified protein sequence (wt) from HRSV__AMA67087.1__M2-1
MSRRNPCKFEIRGHCLNGRRCHYSHNYFEWPPHALLVRQNFMLNKILKSMDKSIDTLSEISGAAELDRTEEYALGIVGVLESYIGSINNITKQSACVAMSKLLIEINSDDIKKLRDNEEPNSPKIRVYNTVISYIESNRKNNKQTIHLLKRLPADVLKKTIKNTLDIHKSITISNPKESIVSDQNDQTKNNDIT

SEQ ID NO: 11666 - protein, 194 aa, Artificial Sequence
  derived and/or modified protein sequence (wt) from HRSV__AMA67120.1__M2-1
MSRRNPCKFEIRGHCLNGKRCHFSHNYFEWPPHALLVRQNFMLNRILKSMDKSIDTLSEISGAAELDRTEEYALGVVGVLESYIESINNITKQSACVAMSKLLTELNSDDIKKLRDNEEPNSPKIRVYNTVISYIESNRKNNKQTIHLLKRLPADVLKKTIKNTLDIHKSITINNPKESTVNDTNDHAKNNDTT

SEQ ID NO: 11667 - protein, 194 aa, Artificial Sequence
  derived and/or modified protein sequence (wt) from HRSV__AMA67318.1__M2-1
MSRRNPCKFEIRGHCLNGRRCHYSHNYFEWPPHALLVRQNFMLNKILKSMDKSIDTLSEISGAAELDRTEEYALGIVGVLESYIGSINNITKQSACVAMSKLLIEINSDDIKKLRDNEESNSPKIRVYNTVISYIESNRKNNKQTIHLLKRLPADVLKKTIKNTLDIHKSITISNPKESTVSDQNDQTKNNDIT

SEQ ID NO: 11668 - protein, 194 aa, Artificial Sequence
  derived and/or modified protein sequence (wt) from HRSV__AMA67329.1__M2-1
MSRRNPCKFEIRGHCLNGKRCHFSHNYFEWPPHALLVRQNFMLNRILKSMDKSIDTLSEISGAAELDRTEEYALGVVGVLESYIGSINNITKQSACVAMSKLLTELNSDDIKKLRDNEEPNSPKIRVYNTVISYIESNRKNNKQTIHLLKRLPADVLKKTIKNTLDIHKSITINNPKESTINDTNDHAKNNDTT

SEQ ID NO: 11669 - protein, 194 aa, Artificial Sequence
  derived and/or modified protein sequence (wt) from HRSV__AMN91265.1__M2-1
MSRRNPCKFEIRGHCLNGRRCHYSHNYFEWPPHALLVRQNFMLNKILKSMDKSIDTLSEISGAAELDRTEEYALGIVGVLESYIGSINNITKQSACVAMSKLLIEINSDDIKKLRDNEEPNSPKIRVYNTVISYIESNRKNSKQTIHLLKRLPADVLKKTIKNTLDIHKSITISNPKESTINDQNDQTKNNDIT

SEQ ID NO: 11670 - protein, 194 aa, Artificial Sequence
  derived and/or modified protein sequence (wt) from HRSV__AMN91386.1__M2-1
MSRRNPCKFEIRGHCLNGRRCHYSHNYFEWPPHALLVRQNFMLNKILKSMDKSIDTLSEISGAAELDRTEEYALGIVGVLESYIGSINNITKQSACVAMSKLLIEINSDDIKKLRDNEEPNSPKVRVYNTVISYIESNRKNSKQTIHLLKRLPADVLKKTIKNTLDIHKSITISNPKESTVSDQNDQTKNNDIT

SEQ ID NO: 11671 - protein, 194 aa, Artificial Sequence
  derived and/or modified protein sequence (wt) from HRSV__AMN91397.1__M2-1
MSRRNPCKFEIRGHCLNGKRCHFSHNYFEWPPHALLVRQNFMLNRILKSMDKSIDTLSEISGAAELDRTEEYALGVVGVLESYIGSINNITKQSACVAMSKLLTELNSDDIKKLRDNEEPNSPKVRVYNTVISYIESNRKNNKQTIHLLKRLPADVLKKTIKNTLDIHKSITISNPKESTVSDTNDHAKNNDTT

SEQ ID NO: 11672 - protein, 194 aa, Artificial Sequence
  derived and/or modified protein sequence (wt) from HRSV__AMT77370.1__M2-1
MSRRNPCKFEIRGHCLNGRRCHYSHNYFEWPPHALLVRQNFMLNKILKSMDKSIDTLSEISGAAELDRTEEYALGIVGVLESYIGSINNITKQSACVAMSKLLIEISSDDIKKLRDNEEPNSPKIRVYNTVISYIESNRKNNKQTIHLLKRLPADVLKKTIKNTLDIHKGITISNPKESTISDQNDQTKNNDIT

SEQ ID NO: 11673 - protein, 194 aa, Artificial Sequence
  derived and/or modified protein sequence (wt) from HRSV__AMT77557.1__M2-1
MSRRNPCKFEIRGHCLNGKRCHFSHNYFEWPPHALLVRQNFMLNRILKSMDKSIDTLSEISGAAELDRTEEYALGVVGVLESYIGSINNITKQSACVAMSKLLTELNSDDIKKLRDNEEPNSPKVRVYNTVISYIESNRKNNKQTIHLLKRLPADVLKKTIKNTLDIHKSITINIPKESTVSDTNDHAKNNDTT

SEQ ID NO: 11674 - protein, 194 aa, Artificial Sequence
  derived and/or modified protein sequence (wt) from HRSV__AMT77733.1__M2-1
MSRRNPCKFEIRGHCLNGKRCHFSHNYFEWPPHALLVRQNFMLNRILKSMDKSIDTLSEISGAAELDRTEEYALGVVGVLESYIGSINNITKQSACVAMSKLLTELNSDDIKKLRDNEEPNSPKVRVYSTVISYIESNRKNNKQTIHLLKRLPADVLKKTIKNTLDIHKSITINNPKESTVSDTNDHAKNNDTT

SEQ ID NO: 11675 - protein, 194 aa, Artificial Sequence
  derived and/or modified protein sequence (wt) from HRSV__AMT77755.1__M2-1
MSRRNPCKFEIRGHCLNGKRCHYSHNYFEWPPHALLVRQNFMLNKILKSMDKSIDTLSEISGAAELDRTEEYALGIVGVLESYIGSINNITKQSACVAMSKLLIEINSDDIKKLRDNEEPNSPKIRVYNTVISYIESNRKNSKQTIHLLKRLPADVLKKTIKNTLDIHKSITISNPKESTVSDQNDQTKNNDIT

SEQ ID NO: 11676 - protein, 194 aa, Artificial Sequence
  derived and/or modified protein sequence (wt) from HRSV__AMT77810.1__M2-1
MSRRNPCKFEIRGHCLNGKRCHFSHNYFEWPPHALLVRQNFMLNRILKSMDKSIDTLSEISGAAELDRTEEYALGVVGVLESYIGSINNITKQSACVAMSKLLTELNSDDIKKLKDNEEPNSPKVRVYNTVISYIESNRKNNKQTIHLLKRLPADVLKKTIKNTLDIHKSITINNPKESTVSDTNDHAKNNDTT

SEQ ID NO: 11677 - protein, 194 aa, Artificial Sequence
  derived and/or modified protein sequence (wt) from HRSV__AMT77920.1__M2-1
MSRRNPCKFEIRGHCLNGKRCHFSHNYFEWPPHALLVRQNFMLNRILKSMDKSIDTLSEISGAAELDRTEEYALGVVGVLESYIGSINNITKQSACVAMSKLLTELNSDDIKKLRDNEEPNSPKVRVYNTVISYIESNRKNNKQTIHLLKRLPADVLKKTIKNTLDIHKSITINNQKESTVSDTNDHAKNNDTT

SEQ ID NO: 11678 - protein, 194 aa, Artificial Sequence
  derived and/or modified protein sequence (wt) from HRSV__AMT78008.1__M2-1
MSRRNPCKFEIRGHCLNGRRCHYSHNYFEWPPHALLVRQNFMLNKILKSMDKSIDTLSEISGADELDRTEEYALGIVGVLESYIGSINNITKQSACVAMSKLLIEINSDDIKKLRDNEEPNSPKIRVYNTVISYIESNRKNSKQTIHLLKRLPADVLKKTIKNTLDIHKSITISNPKESTVSDQNDQTKNNDIT

SEQ ID NO: 11679 - protein, 194 aa, Artificial Sequence
  derived and/or modified protein sequence (wt) from HRSV__AMT78096.1__M2-1
MSRRNPCKFEIRGHCLNGRRCHYSHNYFEWPPHALLVRQNFMLNKILKSMDKSIDTLSEISGAAELDRTEEYALGIVGVLESYIGSINNITKQSACVAMSKLLIEINSDDIKKLRDNEEPNSPKIRVYNTVISYIESNRKNSKQTIYLLKRLPADVLKKTIKNTLDIHKSITISNPKESTVSDQNDQTKNNDIT

SEQ ID NO: 11680 - protein, 194 aa, Artificial Sequence
  derived and/or modified protein sequence (wt) from HRSV__AMT78217.1__M2-1
MSRRNPCKFEIRGHCLNGKRCHFSHNYFEWPPHALLVRQNFMLNRILKSMDKSIDTLSEISGAAELDRTEEYALGVVGVLESYIGSINNITKQSACVAMSKLLTELNSDDIKKLRDNEEPNSPKVRVYNTVISYIESNRKNNKQTIHLLKRLPADVLKKTIKNTLDIHKCITINNPKESTVSDTNDHAKNNDTT

SEQ ID NO: 11681 - protein, 194 aa, Artificial Sequence
  derived and/or modified protein sequence (wt) from HRSV__AMT78305.1__M2-1
MSQRNPCKFEIRGHCLNGKRCHFSHNYFEWPPHALLVRQNFMLNRILKSMDKSIDTLSEISGAAELDRTEEYALGVVGVLESYIGSINNITKQSACVAMSKLLTELNSDDIKKLRDNEEPNSPKVRVYNTVISYIESNRKNNKQTIHLLKRLPADVLKKTIKNTLDIHKSITINNPKESTVSDTNDHAKNNDTT

SEQ ID NO: 11682 - protein, 194 aa, Artificial Sequence
  derived and/or modified protein sequence (wt) from HRSV__AMT78360.1__M2-1
MSRRNPCKFEIRGHCLNGKRCHFSHNYFEWPPHALLVRQNFMLNRILKSMDKSIDTLSEISGAAELDRTEEYALGVVGVLESYIGSINNITKQSACVAMSKLLTELNSDDIKKLRDNEEPSSPKVRVYNTVISYIESNRKNNKQTIHLLKRLPADVLKKTIKNTLDIHKSITINNPKESTVSDTNDHAKNNDTT

SEQ ID NO: 11683 - protein, 194 aa, Artificial Sequence
  derived and/or modified protein sequence (wt) from HRSV__AMT78800.1__M2-1
MSRRNPCKFEIRGHCLNGRRCHYSHNYFEWPPHALLVRQNFMLNKILKSMDKSIDTLSEISGAAELDRTEEYALGIVGVLESYIGSINNITKQSACVAMNKLLIEINSDDIKKLRDNEEPNSPKIRVYNTVISYIESNRKNSKQTIHLLKRLPADVLKKTIKNTLDIHKSITISNPKESTVSDQNDQTKNNDIT

SEQ ID NO: 11684 - protein, 194 aa, Artificial Sequence
  derived and/or modified protein sequence (wt) from HRSV__AMT78833.1__M2-1
MSRRNPCKFEIRGHCLNGKRCHFSHNYFEWPPHALLVRQNFILNRILKSMDKSIDTLSEISGAAELDRTEEYALGVVGVLESYIGSINNITKQSACVAMSKLLTELNSDDIKKLRDNEEPNSPKVRVYNTVISYIESNRKNNKQTIHLLKRLPADVLKKTIKNTLDIHKSITINNPKESTVSDTNDHAKNNDTT

SEQ ID NO: 11685 - protein, 194 aa, Artificial Sequence
  derived and/or modified protein sequence (wt) from HRSV__AMT79862.1__M2-1
MSRRNPCKFEIRGHCLNGRRCHYSHNYFEWPPHALLVRQNFMLNKILKSMDKSIDTLSEISGAAELDRTEEYALGIVGVLESYIGSINNITKQSACVAMSKLLIEVNSDDIKKLRDNEEPNSPKIRVYNTVISYIESNRKNSKQTIHLLKRLPADVLKKTIKNTLDIHKSITISNPKESTVSDQNDQTKNNDIT

SEQ ID NO: 11686 - protein, 194 aa, Artificial Sequence
  derived and/or modified protein sequence (wt) from HRSV__AMT79907.1__M2-1
MSRRNPCKFEIRGHCLNGKRCHFSHNYFEWPPHALLVRQNFMLNKILKSMDKSIDTLSEISGAAELDRTEEYALGVVGVLESYIGSINNITKQSACVAMSKLLTELNSDDIKKLRDNEEPNSPKVRVYNTVISYIESNRKNNKQTIHLLKRLPADVLKKTIKNTLDIHKSITINNPKESTVSDTNDHAKNNDTT

SEQ ID NO: 11687 - protein, 194 aa, Artificial Sequence
  derived and/or modified protein sequence (wt) from HRSV__ANZ80013.1__M2-1
MSRRNPCKFEIRGHCLNGKRCHFSHNYFEWPPHALLVRQNFMLNRILKSMDKSIDTLSEISGAAELDRTEEYALGVVGVLESYIGSINNITKQSACVAMSKLLTELNSDDIKKLRDNEEQNSPKVRVYNTVISYIESNRKNNKQTIHLLKRLPADVLKKTIKNTLDIHKSITINNPKESTVSDTNDHAKNNDTT

SEQ ID NO: 11688 - protein, 194 aa, Artificial Sequence
  derived and/or modified protein sequence (wt) from HRSV__ANZ80035.1__M2-1
MSRRNPCKFEIRGHCLNGKRCHYSHNYFEWPPHALLVRQNFMLNRILKSMDKSIDTLSEISGAAELDRTEEYALGVVGVLESYIGSINNITKQSACVAMSKLLTELNSDDIKKLRDNEEPNSPKVRVYNTVISYIESNRKNNKQTIHLLKRLPADVLKKTIKNTLDIHKSITINNPKESTVSDTNDHAKNNDTT

SEQ ID NO: 11689 - protein, 194 aa, Artificial Sequence
  derived and/or modified protein sequence (wt) from HRSV__ANZ80244.1__M2-1
MSRRNPCKFEIRGHCLNGRRCHYSHNYFEWPPHALLVRQNFMLNKILKSMDKSIDTLSEISGAAELDRTEEYALGIVGVLESYIGSINNITKQSACVAMSKLLIEINGDDIKRLRDNEEPNSPKIRVYNTVISYIESNRKNSKQTIHLLKRLPADVLKKTIKNTLDIHKSITISNPKESTISDQNDQTKNNDIT

SEQ ID NO: 11690 - protein, 194 aa, Artificial Sequence
  derived and/or modified protein sequence (wt) from HRSV__ANZ80354.1__M2-1
MSRRNPCKFEIRGHCLNGRRCHYSHNYFEWPPHALLVRQNFMLNKILKSMDKSIDTLSEISGAAELDRTEEYALGIVGVLESYIGSINNITKQSACVAMSKLLIEINSDDIKKLRDNEEPNSPKIRVYNTVISYIESNRKNSKQTIHLLKRLPADVLKKTIKNTLDIHKSITMSNPKESTISDQNDQTKNNDIT

SEQ ID NO: 11691 - protein, 194 aa, Artificial Sequence
  derived and/or modified protein sequence (wt) from HRSV__ANZ80376.1__M2-1
MSRRNPCKFEIRGHCLNGRRCHYSHNYFEWPPHALLVRQNFMLNKILKSMDKSIDTLSEISGAAELDRTEEYALGIVGVLESYIGSINNITKQSACVAMSKLLIEINSDDIKKLRDNEEPNSPKIRVYNTVISYIESNRKNSKQTIHLLKRLPADVLKKTIKNTLDIHKSITINNPKESTVSDQNDQTKNNDIT

SEQ ID NO: 11692 - protein, 194 aa, Artificial Sequence
  derived and/or modified protein sequence (wt) from HRSV__ANZ80453.1__M2-1
MSRRNPCKFEIRGHCLNGRRCHYSHNYFEWPPHALLVRQNFMLSKILKSMDKSIDTLSEISGAAELDRTEEYALGIVGVLESYIGSINNITKQSACVAMSKLLIEINSDDIKKLRDNEEPNSPKIRVYNTVISYIESNRKNSKQTIHLLKRLPADVLKKTIKNTLDIHKSITISNPKESTVSDQNDQTKNNDIT

SEQ ID NO: 11693 - protein, 194 aa, Artificial Sequence
  derived and/or modified protein sequence (wt) from HRSV__ANZ80475.1__M2-1
MSRRNPCKFEIRGHCLNGKRCHFSHNYFEWPPHALLVRQNFMLNRILKSMDKSIDTLSEISGAAELDRTEEYALGVVGVLESYIGSINNITKQSACVAMSKLLTELNSDDIKKLRDNEEPNSPKVRVYNTVISYIESNRKNNKQTIHLLKRLPADVLKKTIKNTLDIHKSITINSPKESTVSDTNDHAKNNDTT

SEQ ID NO: 11694 - protein, 194 aa, Artificial Sequence
  derived and/or modified protein sequence (wt) from HRSV__AOD41040.1__M2-1
MSRRNPCKFEIRGHCLNGKRCHFSHNYFEWPPHALLVRQNFMLNRILKSMDKSIDTLSEISGAAELDRTEEYALGVVGVLESYIGSINNITKQSACVAMSKLLTELNSDDIKKLRDHEEPNSPKIRVYNTVISYIESNRKNNKQTIHLLKRLPADVLKKTIKNTLDIHKSITINNPKESTVSDTNDHAKNNDTT

SEQ ID NO: 11695 - protein, 194 aa, Artificial Sequence
  derived and/or modified protein sequence (wt) from HRSV__AOS48200.1__M2-1
MSRRNPCKFEIRGHCLNGKRCHFSHNYFEWPPHALLVRQNFMLNRILKSMDKSIDTLSEISGAAELDRTEEYALGVVGVLESYIGSINNITKQSACVAMSKLLTELNSDDIKKLRDNEELNSPKVRVYNTVISYIESNRKNNKQTIHLLKRLPADVLKKTIKNTLDIHKSITINNPKESTVSDTNDHAKNNDTT

SEQ ID NO: 11696 - protein, 194 aa, Artificial Sequence
  derived and/or modified protein sequence (wt) from HRSV__AOS48255.1__M2-1
MSRRNPCKFEIRGHCLNGKRCHFSHNYFEWPPHALLVRQNFMLNRILKSMDKSIDTLSEISGAAELDRTEEYALGVVGVLESYIGSINNITKQSACVAMSKLLTELNSDDIKKLRDNEEPNSLKIRVYNTVISYIESNRKNNKQTIHLLKRLPADVLKKTIKNTLDIHKSITINNPKESTVNDTNDHAKNNDTT

SEQ ID NO: 11697 - protein, 194 aa, Artificial Sequence
  derived and/or modified protein sequence (wt) from HRSV__AOS48387.1__M2-1
MSRRNPCKFEIRGHCLNGRRCHYSHNYFEWPPHALLVRQNFMLNKILKSMDKSIDTLSEISGAAELDRTEEYALGIVGVLESYIGSINNITKQSACVAMSKLLIEINSDDIKKLRDNEEPNSPKIRVYNTVISYIESNRKNSKQTIHLLKRLPADVLKKTIKNTLDIHKSITISSPKESTVSDQNDQTKNNDIT

SEQ ID NO: 11698 - protein, 194 aa, Artificial Sequence
  derived and/or modified protein sequence (wt) from HRSV__AOS48420.1__M2-1
MSRRNPCKFEIRGHCLNGRRCHYSHNYFEWPPHALLVRQNFMLNKILKSMDKSIDTLSEISGAAELDRTEEYALGIIGVLESYIGSINNITKQSACVAMSKLLIEINSDDIKKLRDNEEPNSPKIRVYNTVISYIESNRKNSKQTIHLLKRLPADVLKKTIKNTLDIHKSITISNPKESTISDQNDQTKNNDIT

SEQ ID NO: 11699 - protein, 194 aa, Artificial Sequence
  derived and/or modified protein sequence (wt) from HRSV__AOS48442.1__M2-1
MSRRNPCKFEIRGHCLNGRRCHYSHNYFEWPPHALLVRQNFMLNKILKSMDKSIDTLSEISGAAELDRTEEYALGIVGVLESYIGSINNITKQSACVAMSKLLIEINSDDIKKLRDNEEPNSPKIRVYNTVISYTESNRKNSKQTIHLLKRLPADVLKKTIKNTLDIHKSITISNPKESTVSDQNDQTKNNDIT

SEQ ID NO: 11700 - protein, 194 aa, Artificial Sequence
  derived and/or modified protein sequence (wt) from HRSV__API65187.1__M2-1
MARRNPCKFEIRGHCLNGKRCHFSHNYFEWPPHALLVRQNFMLNRILKSMDKSIDTLSEISGAAELDRTEEYALGVVGVLESYIGSINNITKQSACVAMSKLLTELNSDDIKKLRDNEELNSPKIRVYNTVISYIESNRKNNKQTIHLLKRLPADVLKKTIKNTLDIHKSITINNPKESTVSDTNDHAKNNDTT

SEQ ID NO: 11701 - protein, 194 aa, Artificial Sequence
  derived and/or modified protein sequence (wt) from HRSV__APW78670.1__M2-1
MSRRSPCKFEIRGHCLNGRRCHYSHNYFEWPPHALLVRQNFMLNKILKSMDKSIDTLSEISGAAELDRTEEYALGIVGVLESYIGSINNITKQSACVAMSKLLIEINSDDIKKLRDNEEPNSPKIRVYNTVISYTESNRKNSKQTIHLLKRLPADVLKKTIKNTLDIHKSITISNPKESTVSDQNDQTKNNDIT

SEQ ID NO: 11702 - protein, 194 aa, Artificial Sequence
  derived and/or modified protein sequence (wt) from HRSV__APW78824.1__M2-1
MSRRNPCKFEIRGHCLNGRRCHYSHNYFEWPPHALLVRQNFMLNKILKSMDKSIDTLSEISGAAELDRTEEYALGIVGVLESYIGSINNITKQSACVAMSKLLIEINSDDIKKLRDNEEPNSPKIRVYNTVISYIESNRKNSKQTIHLLKRLPADVLKKTIKNTLDIHRSITISNPKESTVSDQNDQTKNNDIT

SEQ ID NO: 11703 - protein, 194 aa, Artificial Sequence
  derived and/or modified protein sequence (wt) from HRSV__ARB07906.1__M2-1
MSRRNPCKFEIRGHCLNGRRCHYSHNYFEWPPHALLVRQNFMLNKILKSMDKSIDTLSEISGAAELDRTEEYALGIVGVLESYIGSINNITKQSACVAMSKLLIEINSDDIKKLRDNEEPNSPKIRVYNTVISYIESNRKNSKQTIHLLKRLPADVLKKTIKNTLDIHKSITISNPKELTISDQNDQTKNNDIT

SEQ ID NO: 11704 - protein, 194 aa, Artificial Sequence
  derived and/or modified protein sequence (wt) from HRSV__ARB66395.1__M2-1
MSRRNPCKFEIRGHCLNGKRCHFSHNYFEWPPHALLVRQNFMLNRILKSMDKSIDTLSEISGAAELDRTEEYALGVVGVLESYIGSINNITKQSACVAMSKLLTELNSDDIKKLRDNEEPNSPKVRVYNTVISYIESNRRNNKQTIHLLKRLPADVLKKTIKNTLDIHKSITINNPKESTVSDTNDHAKNNDTT

SEQ ID NO: 11705 - protein, 194 aa, Artificial Sequence
  derived and/or modified protein sequence (wt) from HRSV__ARB66417.1__M2-1
MSRRSPCKFEIRGHCLNGKRCHFSHNYFEWPPHALLVRQNFMLNRILKSMDKSIDTLSEISGAAELDRTEEYALGVVGVLESYIGSINNITKQSACVAMSKLLIELNSDDIKKLKDNEEPNSPKVRVYNTVISYIESNRKNNKQTIHLLKRLPADVLKKTIKNTLDIHKSITINNPKESTVSDTNDHAKNNDTT

SEQ ID NO: 11706 - protein, 194 aa, Artificial Sequence
  derived and/or modified protein sequence (wt) from HRSV__ARB66439.1__M2-1
MSRRNPCKFEIRGHCLNGKRCHFSHNYFEWPPHALLVRQNFMLNRILKSMDKSIDTLSEISGAAELDRTEEYALGVVGVLESYIGSINNITKQSACVAMSKLLTELNSDDIKKLRDNEEPNSPKVKVYNTVISYIESNRKNNKQTIHLLKRLPADVLKKTIKNTLDIHKSITINNPKESTVSDTNDHAKNNDTT

SEQ ID NO: 11707 - protein, 194 aa, Artificial Sequence
  derived and/or modified protein sequence (wt) from HRSV__ARN61508.1__M2-1
MSRRNPCKFEIRGHCLNGKRCHFSHNYFEWPPHALLVRQNFMLNRILKSMDKSIDTLSEISGAAELDRTEEYALGVVGVLESYIGSINNITKQSACVAMSKLLTELNGDDIKKLRDNEEPNSPKVRVYNTVISYIESNRKNNKQTIHLLKRLPADVLKKTIKNTLDTHKSITINNPKESTVSDTNDHAKNNDTT

SEQ ID NO: 11708 - protein, 194 aa, Artificial Sequence
  derived and/or modified protein sequence (wt) from HRSV__ART28318.1__M2-1
MSRRNPCKFEIRGHCLNGKRCHFSHNYFEWPPHALLVRQNFMLNRILKSMDKSIDTLSEISGAAELDRTEEYALGVVGVLESYIGSINNITKQSACVAMSKLLTELNSDDIKKLRDNEEPNSPKIRVYNTVISYIESNRKNNKQTIHLLKRLPADVLKKTIKNTLDIHKSITINNPKESTVNDANDHAKNNDTT

SEQ ID NO: 11709 - protein, 194 aa, Artificial Sequence
  derived and/or modified protein sequence (wt) from HRSV__ART28362.1__M2-1
MSRRNPCKFEIRGHCLNGKRCHFSHNYFEWPPHALLVRQNFMLNRILKSMDKSIDALSEISGAAELDRTEEYALGVVGVLESYIGSINNITKQSACVAMSKLLTELNSDDIKKLRDHEEPNSPKVRVYNTVISYIESNRKNNKQTIHLLKRLPADVLKKTIKNTLDIHKSITINNPKESTVSDTNDHAKNNDTT

SEQ ID NO: 11710 - protein, 194 aa, Artificial Sequence
  derived and/or modified protein sequence (wt) from HRSV__ART28373.1__M2-1
MSRRNPCKFEIRGHCLNGRRCHYSHNYFEWPPHALLVRQNFMLNKILKSMDKSIDTLSEISGAAELDRTEEYALGIIGVLESYIGSINNITKQSACVAMSKLLIEINSDDIKKLRDNEEPNSPKIRVYNTVISYIESNRKNSKQTIHLLKRLPADVLKKTIKNTLDIHKSITISNPKESTVSDQNDQTKNNDIT

SEQ ID NO: 11711 - protein, 194 aa, Artificial Sequence
  derived and/or modified protein sequence (wt) from HRSV__ART28417.1__M2-1
MSRRNPCKFEIRGHCLNGRRCHYSHNYFEWPPHALLVRQNFMLNKILKSMDKSIDTLSEISGAAELDRTEEYALGIVGVLESYIGSINNITKQSACVAMSKLLIEINSDDIKKLRDNEEPNSPKIRVYNTVISYIESNRKNSKQTIHLLKRLPADVLKKTIKNTLDIHKSITISNPKESTVSDQNDQAKNNDIT

SEQ ID NO: 11712 - protein, 194 aa, Artificial Sequence
  derived and/or modified protein sequence (wt) from HRSV__ASK05521.1__M2-1
MSRRNPCKFEIRGHCLNGRRCHYSHNYFEWPPHALLVRQNFMLNKILKSMDKSIDTLSEISGAAELDRTEEYALGIVGVLESYIGSINNITKQSACVAMSKLLIEINSDDIKKLRDNEEPNSPKIRVYNTVISYIESNRKNSKQTIHLLKRLPADVLKKAIKNTLDIHKSITISNPKESTISDQNDQTKNNDIT

SEQ ID NO: 11713 - protein, 194 aa, Artificial Sequence
  derived and/or modified protein sequence (wt) from HRSV__ASZ70100.1__M2-1
MSRRNPCKFEIRGHCLNGKRCHFSHNYFEWPPHALLVRQNFMLNRILKSMDKSIDTLSEISGAAELDRTEEYALGVVGVLESYIGSINNITKQSACVAMSKLLTELNSDDIKRLRDHEEPNSPKVRVYNTVISYIESNRKNNKQTIHLLKRLPADVLKKTIKNTLDIHKSITINNPKESTVSDTNDHAKNNDTT

SEQ ID NO: 11714 - protein, 194 aa, Artificial Sequence
  derived and/or modified protein sequence (wt) from HRSV__ASZ84932.1__M2-1
MSRRNPCKFEIRGHCLNGRRCHYSHNYFEWPSHALLVRQNFMLNKILKSMDKSIDTLSEISGAAELDRTEEYALGIVGVLESYIGSINNITKQSACVAMSKLLIEINSDDIKKLRDNEEPSSPKIRVYNTVISYIESNRKNNKQTIHLLKRLPADVLKKTIKNTLDIHKGITISNPKESTVSDHNDQTKNNDIT

SEQ ID NO: 11715 - protein, 194 aa, Artificial Sequence
  derived and/or modified protein sequence (wt) from HRSV__ATV81300.1__M2-1
MSRRNPCKFEIRGHCLNGRRCHYSHNYFEWPPHALLVRQNFMLNKILKSMDKSIDTLSEISGAAELDRTEEYALGIVGVLESYIGSINNITKQSACVAMSKLLIEINGDDIKKLRDNEEPNSPKIRVYNTVISYIESNRKNSKQTIHLLKRLPADVLKKTIKNTLDIHKSITISNPKESTISDQNDQTKNNDIT

SEQ ID NO: 11716 - protein, 194 aa, Artificial Sequence
  derived and/or modified protein sequence (wt) from HRSV__ATV81355.1__M2-1
MSEKYPCKFEIRGHCLNGKRCHFSHNYFEWPPHALLVRQNFMLNRILKSMDKSIDTLSEISGAAELDRTEEYALGVVGVLESYIGSINNITKQSACVAMSKLLTELNSDDIKKLRDNEEPNSPKVRVYNTVTSYIESNRKNNKQTIHLLKRLPADVLKKTIKNTLDIHKSITINNPKESTVSDTNDHAKNNDTT

SEQ ID NO: 11717 - protein, 194 aa, Artificial Sequence
  derived and/or modified protein sequence (wt) from HRSV__AUC68446.1__M2-1
MSRRNPCKFEIRGHCLNGKRCHFSHNYFEWPPHALLVRQNFMLNRILKSMDKSIDTLSEISGAAELDRTEEYALGVVGVLESYIGSINNITKQSACVAMSKLLTELNSDDIKKLRDNEEPNSPKIRVYNTVISYIESNRKNNKQTIHLLKRLPADVLKKTIKNTLDIHKSITINNPKESTVGDTNDHAKNNDTT

SEQ ID NO: 11718 - protein, 194 aa, Artificial Sequence
  derived and/or modified protein sequence (wt) from HRSV__AUC68523.1__M2-1
MSRRNPCKFEIRGHCLNGKRCHFSHNYFEWPPHALLVRQNFMLNRILKSMDKSIDTLSEISGAAELDRTEEYALGVVGVLESYIGSINNITKQSACVAMSKLLTELNSDDIKKLRDNEEPNSPKIRVYNTVISYIESNRKNNKQTIHLLKRLPADVLKKTIKNTLDIHKSITINNPKESTVSDPNDHAKNNDTT

SEQ ID NO: 11719 - protein, 194 aa, Artificial Sequence
  derived and/or modified protein sequence (wt) from HRSV__AUC68556.1__M2-1
MSRRNPCKFEIRGHCLNGKRCHFSHNYFEWPPHALLVRQNFMLNRILKSMDKSIDTLSEISGAAELDRTEEYALGVVGVLESYIGSINNITKQSACVAMSKLLTELNSDDIKKLRDNEEPNSPKIRVYNTVISYIESNRKNNKQTIHLLKRLPADVLKKTIKNTLDIHKSVTINNPKESTISDTNDHAKNNDTT

SEQ ID NO: 11720 - protein, 194 aa, Artificial Sequence
  derived and/or modified protein sequence (wt) from HRSV__AUC68567.1__M2-1
MSRRNPCKFEIRGHCLNGKRCHFSHNYFEWPPHALLVRQNFMLNRILKSMDKSIDTLSEISGAAELDRTEEYALGVVGVLESYIGSINNITKQSACVAMSKLLTELNSDDIKKLRDNEELNSPKIRVYNTVISYIESNRKNNKQTIHLLKRLPADVLKKTIKNTLDIHKSITINNPKELTVSDTNDHTKNNDTT

SEQ ID NO: 11721 - protein, 194 aa, Artificial Sequence
  derived and/or modified protein sequence (wt) from HRSV__AUC68579.1__M2-1
MSRRNPCKFEIRGHCLNGRRCHYSHNYFEWPPHALLVRQNFMLNRILKSMDKSIDTLSEISGAAELDRTEEYALGIVGVLESYIGSINNITKQSACVAMSKLLIEINSDDIKKLRDNEEPNSPKIRVYNTVISYIESNRKNNKQTIHLLKRLPADVLKKTIKNTLDIHKSITISNPKESTVNDQNDQTKNNDIT

SEQ ID NO: 11722 - protein, 194 aa, Artificial Sequence
  derived and/or modified protein sequence (wt) from HRSV__AUH26190.1__M2-1
MSRRNPCKFEIRGHCLNGKRCHFSHNYFEWPPHALLVRQNFMLNRILKSMDKSIDTLSEISGAAELDRTEEYALGVVGVLESYIGSINNITKQSACVAMSKLLTELNSDDIKKIRDNEEPNSPKIRVYNTVISYIESNRKNNKQTIHLLKRLPADVLKKTIKNTLDIHKSITINNPKESTVNDTNDHAKNNDTT

SEQ ID NO: 11723 - protein, 194 aa, Artificial Sequence
  derived and/or modified protein sequence (wt) from HRSV__NP_044597.1__M2-1
MSRRNPCKFEIRGHCLNGKRCHFSHNYFEWPPHALLVRQNFMLNRILKSMDKSIDTLSEISGAAELDRTEEYALGVVGVLESYIGSINNITKQSACVAMSKLLTELNSDDIKKLRDNEEPNSPKIRVYNTVISYIESNRKNNKQTIHLLKRLPADVLKKTIKTTLDIHKSITINNPKESTVSDINDHAKNNDTT

SEQ ID NO: 11724 - protein, 194 aa, Artificial Sequence
  derived and/or modified protein sequence (wt) from HRSV__NP_056864.1__M2-1
MSRRNPCKFEIRGHCLNGRRCHYSHNYFEWPPHALLVRQNFMLNKILKSMDKSIDTLSEISGAAELDRTEEYALGIVGVLESYIGSINNITKQSACVAMSKLLIEINSDDIKKLRDNEEPNSPKIRVYNTVISYIESNRKNNKQTIHLLKRLPADVLKKTIKNTLDIHKSIIISNPKESTVNDQNDQTKNNDIT

SEQ ID NO: 11725 - protein, 194 aa, Artificial Sequence
  derived and/or modified protein sequence (wt) from HRSV__4C3E_A__M2-1
MSRRNPCKFEIRGHCLNGKRCHFSHNYFEWPPHALLVRQNFMLNRILKSMDKSIDTLDEIDGAAELDRTEEYALGVVGVLESYIGSINNITKQSACVAMSKLLTELNSDDIKKLRDNEELNSPKIRVYNTVISYIESNRKNNKQTIHLLKRLPADVLKKTIKNTLDIHKSITINNPKESTVSDTNDHAKNNDTT

SEQ ID NO: 11726 - protein, 574 aa, Artificial Sequence; identical to SEQ ID NO: 8937
  derived and/or modified protein sequence (wt) from HRSV(Memphis-37)__AIY60640.1__F0

SEQ ID NO: 11727 - RNA, 1725 nt, Artificial Sequence
  derived and/or modified CDS sequence (wt) from HRSV(Memphis-37)__AIY60640.1__F0
auggaguugccaauccucaaaacaaaugcaauuaccacaauccuugcugcagucacacucuguuucgcuuccagucaaaacaucacugaagaauuuuaucaaucaacaugcagugcaguuagcaaaggcuaucuuagugcuuuaagaacugguugguauacuaguguuauaacuauagaauuaaguaauaucaaggaaaauaaguguaauggaacagaugcuaagguaaaauugauaaaacaagaauuagauaaauauaaaaaugcuguaacagaauugcaguugcucaugcaaagcacaccagcagccaacaaucgagccagaagagaacuaccaagguuuaugaauuauacacucaacaauaccaaaaauaacaauguaacauuaagcaagaaaaggaaaagaagauuucuuggcuuuuuguuagguguuggaucugcaaucgccaguggcauugcuguaucuaaaguccugcaccuagaaggggaagugaacaaaaucaaaaaugcucuacuauccacaaacaaggcuguagucagcuuaucaaauggaguuagugucuuaaccagcaaaguguuagaccucaaaaacuauauagauaaacaguuguuacccauugugaacaagcaaagcugcagcauaucaaacauugaaacugugauagaauuccaacaaaagaacaacagacuacuagagauuaccagggaauuuaguguuaaugcagguguaacuacaccuguaagcacuuauauguuaacaaauagugaauuauuaucauuaaucaaugauaugccuauaacaaaugaucagaaaaaguuaauguccaacaauguucaaauaguuagacagcaaaguuacucuaucauguccauaauaaaggaggaagucuuagcauauguaguucaauuaccacuauaugguguaauagauacaccuuguuggaaacuacacacauccccucuaugcacaaccaacacaaaggaaggguccaacaucuguuuaacaagaaccgacagaggaugguacugugacaaugcaggaucagugucuuucuucccacaagcugaaacaugcaaaguucaaucgaaucgaguauuuugugacacaaugaacagucuaacauuaccaagugaaguaaaucucugcaacauugacauauucaacccuaaauaugauugcaaaauuaugacuucaaaaacagaugugagcagcuccguuaucacaucucuaggagccauugugucaugcuauggcaaaacuaaauguacagcauccaauaaaaaucguggaaucauaaagacauuuucuaacgggugugauuauguaucaaauaaggggguggacacuguaucuguagguaauacauuauauuauguaaauaagcaagaaggaaaaagccucuauguaaaaggugaaccaauaauaaauuucuaugacccauuaguguucccuucugaugaauuugaugcaucaauaucucaagucaaugagaagauuaaccagagccuagcauuuauucguaaauccgaugaauuauuacauaauguaaauguugguaaauccaccacaaauaucaugauaacuacuauaauuauagugauuauaguaauauuguuauuauuaauugcaguugggcuguuccuauacugcaaggccagaagcacaccagucacacuaagcaaggaucaacugagugguauaaauaauauugcauuuaguaacuga

SEQ ID NO: 11728 - RNA, 1725 nt, Artificial Sequence
  derived and/or modified CDS sequence (opt1) from HRSV(Memphis-37)__AIY60640.1__F0
auggagcugcccauccucaagaccaacgccaucaccacgauccuggccgcggugacccugugcuucgccagcucccagaacaucaccgaggaguucuaccagagcacgugcuccgccgucagcaagggcuaccucuccgcccugcgcaccgggugguacaccagcgugaucaccaucgagcuguccaacaucaaggagaacaagugcaacggcaccgacgccaaggugaagcucaucaagcaggagcuggacaaguacaagaacgcggucacggagcugcagcuccugaugcagagcaccccggccgccaacaaccgggcccgccgggagcugccccgcuucaugaacuacacccucaacaacaccaagaacaacaacgugacgcuguccaagaagcggaagcgccgguuccugggguuccuccugggcguggggagcgcgaucgccuccggcaucgccgucagcaaggugcugcaccucgagggcgaggugaacaagaucaagaacgcccugcuguccaccaacaaggccgucgugagccucuccaacggggugagcguccugaccuccaaggugcuggaccucaagaacuacaucgacaagcagcugcugcccaucgugaacaagcagagcugcuccaucagcaacaucgagaccgucaucgaguuccagcagaagaacaaccgccuccuggagaucacgcgggaguucagcgugaacgcgggcgugaccacccccgucuccaccuacaugcugacgaacagcgagcuccugucccugaucaacgacaugccgaucaccaacgaccagaagaagcucaugagcaacaacgugcagaucgugcgccagcaguccuacagcaucauguccaucaucaaggaggagguccuggccuacguggugcagcugccccucuacggggucaucgacacccccugcuggaagcugcacaccagcccccugugcacgaccaacaccaaggagggcuccaacaucugccucacccggacggaccgcgggugguacugcgacaacgccggcagcguguccuucuucccgcaggccgagaccugcaagguccagagcaaccggguguucugcgacaccaugaacucccugacccugcccagcgaggugaaccucugcaacaucgacaucuucaaccccaaguacgacugcaagaucaugacguccaagaccgacgucagcuccagcgugaucaccucccugggcgccaucgugagcugcuacgggaagaccaagugcacggcgagcaacaagaaccgcggcaucaucaagaccuucuccaacgggugcgacuacgucagcaacaagggcguggacaccguguccgucggcaacacccuguacuacgugaacaagcaggagggcaagagccucuacgugaagggggagcccaucaucaacuucuacgacccgcuggucuuccccuccgacgaguucgacgccagcaucucccaggugaacgagaagaucaaccagagccuggccuucauccggaaguccgacgagcuccugcacaacgugaacgucggcaagagcaccacgaacaucaugaucaccaccaucaucaucgugaucaucgugauccugcugcuccugaucgccgucgggcuguuccucuacugcaaggcccgcuccacccccgugacgcugagcaaggaccagcuguccgggaucaacaacaucgcguucagcaacuga

SEQ ID NO: 11729 - RNA, 1725 nt, Artificial Sequence
  derived and/or modified CDS sequence (opt2) from HRSV(Memphis-37)__AIY60640.1__F0
auggagcuccccauccucaagaccaacgccaucaccaccauccucgccgccgucacccucugcuucgccuccucccagaacaucaccgaggaguucuaccaguccaccugcuccgccgucuccaagggcuaccucuccgcccuccgcaccggcugguacaccuccgucaucaccaucgagcucuccaacaucaaggagaacaagugcaacggcaccgacgccaaggucaagcucaucaagcaggagcucgacaaguacaagaacgccgucaccgagcuccagcuccucaugcaguccacccccgccgccaacaaccgcgcccgccgcgagcucccccgcuucaugaacuacacccucaacaacaccaagaacaacaacgucacccucuccaagaagcgcaagcgccgcuuccucggcuuccuccucggcgucggcuccgccaucgccuccggcaucgccgucuccaagguccuccaccucgagggcgaggucaacaagaucaagaacgcccuccucuccaccaacaaggccgucgucucccucuccaacggcgucuccguccucaccuccaagguccucgaccucaagaacuacaucgacaagcagcuccuccccaucgucaacaagcaguccugcuccaucuccaacaucgagaccgucaucgaguuccagcagaagaacaaccgccuccucgagaucacccgcgaguucuccgucaacgccggcgucaccacccccgucuccaccuacaugcucaccaacuccgagcuccucucccucaucaacgacaugcccaucaccaacgaccagaagaagcucauguccaacaacguccagaucguccgccagcaguccuacuccaucauguccaucaucaaggaggagguccucgccuacgucguccagcucccccucuacggcgucaucgacacccccugcuggaagcuccacaccuccccccucugcaccaccaacaccaaggagggcuccaacaucugccucacccgcaccgaccgcggcugguacugcgacaacgccggcuccgucuccuucuucccccaggccgagaccugcaagguccaguccaaccgcgucuucugcgacaccaugaacucccucacccuccccuccgaggucaaccucugcaacaucgacaucuucaaccccaaguacgacugcaagaucaugaccuccaagaccgacgucuccuccuccgucaucaccucccucggcgccaucgucuccugcuacggcaagaccaagugcaccgccuccaacaagaaccgcggcaucaucaagaccuucuccaacggcugcgacuacgucuccaacaagggcgucgacaccgucuccgucggcaacacccucuacuacgucaacaagcaggagggcaagucccucuacgucaagggcgagcccaucaucaacuucuacgacccccucgucuuccccuccgacgaguucgacgccuccaucucccaggucaacgagaagaucaaccagucccucgccuucauccgcaaguccgacgagcuccuccacaacgucaacgucggcaaguccaccaccaacaucaugaucaccaccaucaucaucgucaucaucgucauccuccuccuccucaucgccgucggccucuuccucuacugcaaggcccgcuccacccccgucacccucuccaaggaccagcucuccggcaucaacaacaucgccuucuccaacuga

SEQ ID NO: 11730 - RNA, 1725 nt, Artificial Sequence
  derived and/or modified CDS sequence (opt3) from HRSV(Memphis-37)__AIY60640.1__F0
auggagcugcccauccucaagaccaacgccauuacaacuauacuugcugcagugacgcugugcuucgccagcucccagaauaucaccgaagaguuuuaccaaucuacauguucagcggucaguaaaggcuauuugagcgcuuuaagaacugggugguacaccuccguuauuacaaucgaacugucuaacauuaaggagaauaaaugcaacggaaccgacgccaaggugaaacuaaucaagcaggaacucgauaaguauaaaaaugcaguaacugagcugcagcuucugaugcagucgaccccugccgcuaacaauagggcacggcgcgaguugccacgauucaugaacuacacacucaauaacacgaagaauaacaaugugacucugagcaaaaagcguaaaagaagguuucuggguuuccucuuaggcgucgggucagccauagcuaguggaaucgccguguccaagguucugcaccuugaaggcgaggugaacaagauuaaaaaugcguugcugucuaccaacaaggcagucgugagccuauccaacgguguaucaguucucacaaguaaagugcuggaccuuaagaauuauaucgauaaacaacuguugccgauugucaacaagcagagcuguucuaucuccaauauagaaacugugauugaguuucagcagaaaaacaaucggcuccuggagaucacccgcgaguucucagugaacgccggggucacaacccccguuagcacguacauguuaacuaauagugaacugcucucucuuauuaacgacaugccuaucacaaaugaucaaaagaagcugauguccaacaaugugcagaucguaagacagcagagcuauucgauuaugucuauaaucaaagaagagguguuggcuuacgucgugcaacuaccacuguacggaguuauugacacccccugcuggaagcuccauacuuccccucuguguacaaccaacacgaaagaaggcucaaauaucugccuuaccaggacagaucggggcugguauugugacaacgccgggagugugagcuuuuucccacaggcagagacuugcaagguccaguccaaucgcguguuuugugauaccaugaacucucugacauugcccagcgagguaaaccucugcaauauagacauuuucaacccuaaauacgauuguaagaucaugacuucaaagaccgacguuaguuccagcgugaucacaucucugggagcuauugucucaugcuaugguaaaaccaagugcacugccaguaauaaaaaccgaggcaucauuaagacguuuagcaaugggugugauuacguguccaacaaaggagucgacacagugucuguuggcaauaccuuauauuacgugaacaagcaagaagguaagucgcuguauguaaaaggggagccaauaaucaauuucuacgacccgcuagucuuucccagcgaugaguucgacgcguccauuucacaggugaacgaaaagaucaaucagagucucgccuucaucagaaaaucugaugaacugcuucacaacguuaaugugggaaagagcacuaccaacauuaugauaacaaccaucauuaucgucauuaucgugauauugcugcuccugaucgcaguaggccuuuuucuguacugcaaagcuagguccacuccugugacauugucaaaggaccagcucagcggcauuaauaacaucgccuucucuaacuga

SEQ ID NO: 11731 - RNA, 1725 nt, Artificial Sequence
  derived and/or modified CDS sequence (opt4) from HRSV(Memphis-37)__AIY60640.1__F0
auggagcugcccauccugaagaccaacgccaucaccaccauccuggccgccgugacccugugcuucgccagcagccagaacaucaccgaggaguucuaccagagcaccugcagcgccgugagcaagggcuaccugagcgcccugagaaccggcugguacaccagcgugaucaccaucgagcugagcaacaucaaggagaacaagugcaacggcaccgacgccaaggugaagcugaucaagcaggagcuggacaaguacaagaacgccgugaccgagcugcagcugcugaugcagagcacccccgccgccaacaacagagccagaagagagcugcccagauucaugaacuacacccugaacaacaccaagaacaacaacgugacccugagcaagaagagaaagagaagauuccugggcuuccugcugggcgugggcagcgccaucgccagcggcaucgccgugagcaaggugcugcaccuggagggcgaggugaacaagaucaagaacgcccugcugagcaccaacaaggccguggugagccugagcaacggcgugagcgugcugaccagcaaggugcuggaccugaagaacuacaucgacaagcagcugcugcccaucgugaacaagcagagcugcagcaucagcaacaucgagaccgugaucgaguuccagcagaagaacaacagacugcuggagaucaccagagaguucagcgugaacgccggcgugaccacccccgugagcaccuacaugcugaccaacagcgagcugcugagccugaucaacgacaugcccaucaccaacgaccagaagaagcugaugagcaacaacgugcagaucgugagacagcagagcuacagcaucaugagcaucaucaaggaggaggugcuggccuacguggugcagcugccccuguacggcgugaucgacacccccugcuggaagcugcacaccagcccccugugcaccaccaacaccaaggagggcagcaacaucugccugaccagaaccgacagaggcugguacugcgacaacgccggcagcgugagcuucuucccccaggccgagaccugcaaggugcagagcaacagaguguucugcgacaccaugaacagccugacccugcccagcgaggugaaccugugcaacaucgacaucuucaaccccaaguacgacugcaagaucaugaccagcaagaccgacgugagcagcagcgugaucaccagccugggcgccaucgugagcugcuacggcaagaccaagugcaccgccagcaacaagaacagaggcaucaucaagaccuucagcaacggcugcgacuacgugagcaacaagggcguggacaccgugagcgugggcaacacccuguacuacgugaacaagcaggagggcaagagccuguacgugaagggcgagcccaucaucaacuucuacgacccccugguguuccccagcgacgaguucgacgccagcaucagccaggugaacgagaagaucaaccagagccuggccuucaucagaaagagcgacgagcugcugcacaacgugaacgugggcaagagcaccaccaacaucaugaucaccaccaucaucaucgugaucaucgugauccugcugcugcugaucgccgugggccuguuccuguacugcaaggccagaagcacccccgugacccugagcaaggaccagcugagcggcaucaacaacaucgccuucagcaacuga

SEQ ID NO: 11732 - RNA, 1725 nt, Artificial Sequence
  derived and/or modified CDS sequence (opt5) from HRSV(Memphis-37)__AIY60640.1__F0
auggagcugcccauccucaagaccaacgccauuacaacgauccuggcugccgugacccuuugcuucgcgagcucccagaauauuacagaagaguuuuaccaaucuaccuguagcgcugucuccaaaggcuaucugucugcccucagaacagggugguacaccagcguuaucacaauugaacuguccaacaucaaggagaauaaaugcaacggaaccgacgccaaggugaaacuuaucaagcaggaacuggauaaguauaaaaaugcugugacggagcuccagcugcugaugcagucuaccccugccgcuaacaaucgggcccgcagagagcucccgcgguucaugaacuacacacugaauaacaccaagaauaacaaugucacacuuagcaaaaagcgcaaaagacgguuucugggcuuccuccugggggugggauccgcgauugccagcggcaucgcuguuucuaaggugcuucaccuggaaggggaggucaacaagauuaaaaaugcccuccuguccaccaacaaggcugugguuagccugucuaacggaguguccguccucacgagcaaagugcuggaccuuaagaauuauaucgauaaacaacugcuccccauugugaacaagcagucuuguuccaucagcaauauugaaacagucaucgaguuucagcagaaaaacaaucgccugcuugagaucaccagagaauuuuccguuaacgccggcgugacaaccccugugucuaccuacaugcugacaaauagcgagcuccugucccugauuaacgacaugcccaucacgaaugaucaaaagaagcucaugagcaacaauguccagauugugcggcagcagucuuauuccaucaugagcauuaucaaagaagagguucuggcguacgugguccaacuuccucuguacggcgugaucgacacccccugcuggaagcuccauacaucuccucuguguaccacaaacaccaaagaagggagcaauauuugccuuacgcgcacagauagaggaugguauugugacaacgccggcuccguuucuuucuucccgcaggcugagaccugcaaggugcagagcaaucgggucuuuugugauaccaugaacucccugacacuccccagcgaggugaaccugugcaauaucgacauuuucaacccuaaauacgauuguaagaucaugaccucuaagacagacgucuccagcucugugauuacgucccugggggccaucguuagcugcuauggaaaaaccaagugcacagcuuccaauaaaaaccgcggcaucauuaagaccuuuucuaaugggugugauuacgugagcaacaaaggagucgacacaguguccguuggcaauacccucuauuacgugaacaagcaagaaggcaagucucuguaugucaaaggggagcccaucauuaauuucuacgacccucuuguguuucccagcgaugaguucgacgccuccaucagccaggugaacgaaaagauuaaucagucucuggccuucaucagaaaauccgaugaacuccugcacaacguuaaugucggaaagagcacgaccaacauuaugaucacaaccaucauuaucgugauuaucgugauucugcuucuccugaucgcugucggccuguuucucuacugcaaagcgcggucuacaccggugacccuguccaaggaccagcuuagcgggaucaauaacauugccuucucuaacuga

SEQ ID NO: 11733 - RNA, 1725 nt, Artificial Sequence
  derived and/or modified CDS sequence (opt6) from HRSV(Memphis-37)__AIY60640.1__F0
auggaacugccuauucuaaaaacaaaugccauaacaacaauucuugcagcaguaacauuauguuuugcaucaucacaaaacauuacagaagaauuuuaccaauccacuugcucagccguaucaaaaggauaccuaucagccuuaagaacagguugguacaccucaguaauaaccauagaacuaucaaacauaaaagaaaacaaaugcaaugguacugaugcaaaagucaaacuaaucaaacaagaacuggacaaauacaaaaaugcaguaaccgaacuacaacuccuaaugcaauccacaccugcagccaacaacagagcaagacgcgaacuaccaagauuuaugaauuacacauuaaacaacaccaagaacaacaauguaacucucucaaaaaaaagaaaaagacgcuuucuagguuuccuccuaggcgucggaucugcaauagccucaggaauagcaguaucaaaaguucuacaccuagaaggagaaguaaacaaaauuaaaaacgcauuacuaucaaccaacaaagcaguuguaucccuuucaaauggagucucuguacuuacaucaaaaguacucgaccuaaaaaacuauauagacaaacaacuacucccaauagucaauaagcaaucaugcagcauaucaaacauagaaacaguuauagaauuucaacaaaaaaacaacagacuacucgaaauaaccagagaauuuagcgucaacgcaggcguaaccacaccgguauccacauacaugcuuacaaacucagaacuccucucacuaauaaacgacaugccaauaacuaaugaccaaaaaaaacuaaugucaaacaauguccaaauaguccgucaacaaucauacucaauaaugucaauaauaaaagaagaaguauuagcauauguaguccaacuaccauuauacggcguuauagacacaccuuguuggaaacuucacacauccccacucuguacaaccaacacaaaagaagguuccaauauaugccuaacuagaaccgacagaggaugguauugcgacaacgcaggaucuguaucauucuuuccccaagcagaaacauguaaaguacaaaguaaccgcguauucugcgacaccaugaacucauuaacccucccauccgaaguuaauuuaugcaauauagacauauuuaauccuaaauacgacugcaaaauaaugacaucaaaaacagacguuaguuccuccguaaucacaucuuugggcgcaauagucucaugcuauggaaaaacaaaaugcacagccucaaacaaaaauagaggaauaauaaaaacauucagcaacggcugugauuauguauccaacaaaggaguagacacaguauccguaggcaauacccuuuacuacguuaauaaacaagaaggaaaaucauuauacgucaaaggagaaccuaucauaaauuucuacgacccauuaguauucccuucagacgaauuugaugccucaauaucccaagucaaugaaaaaaucaaccaaucacuagccuuuauccgcaaaucagacgaauuacuacacaacguaaacguaggcaaaucaacaacuaauauaaugauaacaacaauaauaauaguaauuauaguaauauuauuacuacuaaucgccguagguuuauucuuauacuguaaagcacgaucaacaccaguuacacucucaaaagaucaacuaucaggaauaaacaacauagcauuuuccaauuaa

SEQ ID NO: 11734 - RNA, 1725 nt, Artificial Sequence
  derived and/or modified CDS sequence (opt11) from HRSV(Memphis-37)__AIY60640.1__F0
auggaacuccccauccucaaaacaaacgccauaaccacuauccucgccgccgucacccucugcuucgccuccucccaaaacaucacagaggaguucuaccaauccacaugcuccgccgucuccaaaggcuaccucagcgcccuacguaccggcugguacaccagcgucaucacaauagaacucuccaacaucaaggaaaacaaaugcaacggcaccgaugccaaaguaaaacucaucaaacaagaacucgauaaauacaaaaacgccgucaccgaacuacaacuccuaaugcaaagcacacccgccgccaacaacagagcacggcgcgaacugccccgcuucaugaacuacacccucaacaacaccaaaaauaacaacgucacccuauccaagaaacgcaaacgccgauuccucgguuuccuacucggcguaggaagcgccauagccucaggcaucgccgucuccaaaguccuccaucuggaaggcgaagucaacaaaaucaaaaacgcacucuuauccaccaacaaagccgucgucucccucucgaacggggucuccguccuuaccuccaaaguccucgaccuuaaaaacuacaucgacaaacaacuacuaccaauagucaauaaacaauccugcuccaucucaaacauagaaaccgucauagaguuccaacagaagaacaaucgccuccucgaaauaacucgcgaguucuccgucaacgcaggcgucacgaccccugucucaacauacaugcuaacuaacucagaacuccuaagccuaaucaacgacaugcccaucacaaacgaccaaaagaaacucaugagcaacaauguccagauagucagacagcaauccuauagcaucaugucuauaauaaaagaagaagugcucgccuacguaguccaacucccucuuuacggcgucauagacacacccugcuggaaacuccacacaucuccucucugcaccaccaacacaaaagaaggcagcaacaucugccugacccgaaccgaccgcggaugguacugcgacaacgcuggcuccgugucuuucuuuccccaagccgaaaccugcaaaguccaguccaaccgcgucuucugcgacacaaugaacucccucacccuacccuccgaaguuaaccucugcaacaucgacaucuucaauccaaaauacgacugcaaaaucaugaccucgaaaacggacguauccuccuccgucauaacaucacuuggagccaucguuagcugcuacggaaaaaccaaauguaccgccuccaacaaaaaccgcggaauaaucaaaacauucuccaacggcugcgacuacguaagcaacaaaggggucgauacugucuccguagguaacacccuauacuacgucaacaaacaagaaggaaaaucacuauacguuaaaggcgaacccauuaucaacuucuacgacccccucguuuucccauccgacgaguucgacgccuccauaagccaaguuaacgaaaagauaaaccaaucgcucgcauucauccgcaaauccgacgaacuccuacacaacgucaacgugggcaaauccacaacaaacaucaugaucaccaccaucauuaucgucauaauagucauccuccuccugcucaucgccgugggacuauuccuauacugcaaagcccgcucgacgcccgucacacuuuccaaagaccaacuaagcggaaucaacaacauagcguucagcaauuaa

SEQ ID NO: 11735 - RNA, 2001 nt, Artificial Sequence
  mRNA product Design a-1 comprising derived and/or modified sequence from HRSV(Memphis-37)__AIY60640.1__F0 (wt)
gggagagucccgcagucggcguccagcggcucugcuuguucgugugugugucguugcaggccuuauucaagcuuaccauggaguugccaauccucaaaacaaaugcaauuaccacaauccuugcugcagucacacucuguuucgcuuccagucaaaacaucacugaagaauuuuaucaaucaacaugcagugcaguuagcaaaggcuaucuuagugcuuuaagaacugguugguauacuaguguuauaacuauagaauuaaguaauaucaaggaaaauaaguguaauggaacagaugcuaagguaaaauugauaaaacaagaauuagauaaauauaaaaaugcuguaacagaauugcaguugcucaugcaaagcacaccagcagccaacaaucgagccagaagagaacuaccaagguuuaugaauuauacacucaacaauaccaaaaauaacaauguaacauuaagcaagaaaaggaaaagaagauuucuuggcuuuuuguuagguguuggaucugcaaucgccaguggcauugcuguaucuaaaguccugcaccuagaaggggaagugaacaaaaucaaaaaugcucuacuauccacaaacaaggcuguagucagcuuaucaaauggaguuagugucuuaaccagcaaaguguuagaccucaaaaacuauauagauaaacaguuguuacccauugugaacaagcaaagcugcagcauaucaaacauugaaacugugauagaauuccaacaaaagaacaacagacuacuagagauuaccagggaauuuaguguuaaugcagguguaacuacaccuguaagcacuuauauguuaacaaauagugaauuauuaucauuaaucaaugauaugccuauaacaaaugaucagaaaaaguuaauguccaacaauguucaaauaguuagacagcaaaguuacucuaucauguccauaauaaaggaggaagucuuagcauauguaguucaauuaccacuauaugguguaauagauacaccuuguuggaaacuacacacauccccucuaugcacaaccaacacaaaggaaggguccaacaucuguuuaacaagaaccgacagaggaugguacugugacaaugcaggaucagugucuuucuucccacaagcugaaacaugcaaaguucaaucgaaucgaguauuuugugacacaaugaacagucuaacauuaccaagugaaguaaaucucugcaacauugacauauucaacccuaaauaugauugcaaaauuaugacuucaaaaacagaugugagcagcuccguuaucacaucucuaggagccauugugucaugcuauggcaaaacuaaauguacagcauccaauaaaaaucguggaaucauaaagacauuuucuaacgggugugauuauguaucaaauaaggggguggacacuguaucuguagguaauacauuauauuauguaaauaagcaagaaggaaaaagccucuauguaaaaggugaaccaauaauaaauuucuaugacccauuaguguucccuucugaugaauuugaugcaucaauaucucaagucaaugagaagauuaaccagagccuagcauuuauucguaaauccgaugaauuauuacauaauguaaauguugguaaauccaccacaaauaucaugauaacuacuauaauuauagugauuauaguaauauuguuauuauuaauugcaguugggcuguuccuauacugcaaggccagaagcacaccagucacacuaagcaaggaucaacugagugguauaaauaauauugcauuuaguaacugaggacuagucccuguucccagagcccacuuuuuuuucuuuuuuugaaauaaaauagccugucuuucagaucuaaaaaaaaaaaaaaaaaaaaaaaaaaaaaaaaaaaaaaaaaaaaaaaaaaaaaaaaaaaaaaaaugcaucccccccccccccccccccccccccccccccaaaggcucuuuucagagccaccagaauu

SEQ ID NO: 11736 - RNA, 2001 nt, Artificial Sequence
  mRNA product Design a-1 comprising derived and/or modified sequence from HRSV(Memphis-37)__AIY60640.1__F0 (opt1)
gggagagucccgcagucggcguccagcggcucugcuuguucgugugugugucguugcaggccuuauucaagcuuaccauggagcugcccauccucaagaccaacgccaucaccacgauccuggccgcggugacccugugcuucgccagcucccagaacaucaccgaggaguucuaccagagcacgugcuccgccgucagcaagggcuaccucuccgcccugcgcaccgggugguacaccagcgugaucaccaucgagcuguccaacaucaaggagaacaagugcaacggcaccgacgccaaggugaagcucaucaagcaggagcuggacaaguacaagaacgcggucacggagcugcagcuccugaugcagagcaccccggccgccaacaaccgggcccgccgggagcugccccgcuucaugaacuacacccucaacaacaccaagaacaacaacgugacgcuguccaagaagcggaagcgccgguuccugggguuccuccugggcguggggagcgcgaucgccuccggcaucgccgucagcaaggugcugcaccucgagggcgaggugaacaagaucaagaacgcccugcuguccaccaacaaggccgucgugagccucuccaacggggugagcguccugaccuccaaggugcuggaccucaagaacuacaucgacaagcagcugcugcccaucgugaacaagcagagcugcuccaucagcaacaucgagaccgucaucgaguuccagcagaagaacaaccgccuccuggagaucacgcgggaguucagcgugaacgcgggcgugaccacccccgucuccaccuacaugcugacgaacagcgagcuccugucccugaucaacgacaugccgaucaccaacgaccagaagaagcucaugagcaacaacgugcagaucgugcgccagcaguccuacagcaucauguccaucaucaaggaggagguccuggccuacguggugcagcugccccucuacggggucaucgacacccccugcuggaagcugcacaccagcccccugugcacgaccaacaccaaggagggcuccaacaucugccucacccggacggaccgcgggugguacugcgacaacgccggcagcguguccuucuucccgcaggccgagaccugcaagguccagagcaaccggguguucugcgacaccaugaacucccugacccugcccagcgaggugaaccucugcaacaucgacaucuucaaccccaaguacgacugcaagaucaugacguccaagaccgacgucagcuccagcgugaucaccucccugggcgccaucgugagcugcuacgggaagaccaagugcacggcgagcaacaagaaccgcggcaucaucaagaccuucuccaacgggugcgacuacgucagcaacaagggcguggacaccguguccgucggcaacacccuguacuacgugaacaagcaggagggcaagagccucuacgugaagggggagcccaucaucaacuucuacgacccgcuggucuuccccuccgacgaguucgacgccagcaucucccaggugaacgagaagaucaaccagagccuggccuucauccggaaguccgacgagcuccugcacaacgugaacgucggcaagagcaccacgaacaucaugaucaccaccaucaucaucgugaucaucgugauccugcugcuccugaucgccgucgggcuguuccucuacugcaaggcccgcuccacccccgugacgcugagcaaggaccagcuguccgggaucaacaacaucgcguucagcaacugaggacuagucccuguucccagagcccacuuuuuuuucuuuuuuugaaauaaaauagccugucuuucagaucuaaaaaaaaaaaaaaaaaaaaaaaaaaaaaaaaaaaaaaaaaaaaaaaaaaaaaaaaaaaaaaaaugcaucccccccccccccccccccccccccccccccaaaggcucuuuucagagccaccagaauu

SEQ ID NO: 11737 - RNA, 2001 nt, Artificial Sequence
  mRNA product Design a-1 comprising derived and/or modified sequence from HRSV(Memphis-37)__AIY60640.1__F0 (opt2)
gggagagucccgcagucggcguccagcggcucugcuuguucgugugugugucguugcaggccuuauucaagcuuaccauggagcuccccauccucaagaccaacgccaucaccaccauccucgccgccgucacccucugcuucgccuccucccagaacaucaccgaggaguucuaccaguccaccugcuccgccgucuccaagggcuaccucuccgcccuccgcaccggcugguacaccuccgucaucaccaucgagcucuccaacaucaaggagaacaagugcaacggcaccgacgccaaggucaagcucaucaagcaggagcucgacaaguacaagaacgccgucaccgagcuccagcuccucaugcaguccacccccgccgccaacaaccgcgcccgccgcgagcucccccgcuucaugaacuacacccucaacaacaccaagaacaacaacgucacccucuccaagaagcgcaagcgccgcuuccucggcuuccuccucggcgucggcuccgccaucgccuccggcaucgccgucuccaagguccuccaccucgagggcgaggucaacaagaucaagaacgcccuccucuccaccaacaaggccgucgucucccucuccaacggcgucuccguccucaccuccaagguccucgaccucaagaacuacaucgacaagcagcuccuccccaucgucaacaagcaguccugcuccaucuccaacaucgagaccgucaucgaguuccagcagaagaacaaccgccuccucgagaucacccgcgaguucuccgucaacgccggcgucaccacccccgucuccaccuacaugcucaccaacuccgagcuccucucccucaucaacgacaugcccaucaccaacgaccagaagaagcucauguccaacaacguccagaucguccgccagcaguccuacuccaucauguccaucaucaaggaggagguccucgccuacgucguccagcucccccucuacggcgucaucgacacccccugcuggaagcuccacaccuccccccucugcaccaccaacaccaaggagggcuccaacaucugccucacccgcaccgaccgcggcugguacugcgacaacgccggcuccgucuccuucuucccccaggccgagaccugcaagguccaguccaaccgcgucuucugcgacaccaugaacucccucacccuccccuccgaggucaaccucugcaacaucgacaucuucaaccccaaguacgacugcaagaucaugaccuccaagaccgacgucuccuccuccgucaucaccucccucggcgccaucgucuccugcuacggcaagaccaagugcaccgccuccaacaagaaccgcggcaucaucaagaccuucuccaacggcugcgacuacgucuccaacaagggcgucgacaccgucuccgucggcaacacccucuacuacgucaacaagcaggagggcaagucccucuacgucaagggcgagcccaucaucaacuucuacgacccccucgucuuccccuccgacgaguucgacgccuccaucucccaggucaacgagaagaucaaccagucccucgccuucauccgcaaguccgacgagcuccuccacaacgucaacgucggcaaguccaccaccaacaucaugaucaccaccaucaucaucgucaucaucgucauccuccuccuccucaucgccgucggccucuuccucuacugcaaggcccgcuccacccccgucacccucuccaaggaccagcucuccggcaucaacaacaucgccuucuccaacugaggacuagucccuguucccagagcccacuuuuuuuucuuuuuuugaaauaaaauagccugucuuucagaucuaaaaaaaaaaaaaaaaaaaaaaaaaaaaaaaaaaaaaaaaaaaaaaaaaaaaaaaaaaaaaaaaugcaucccccccccccccccccccccccccccccccaaaggcucuuuucagagccaccagaauu

SEQ ID NO: 11738 - RNA, 2001 nt, Artificial Sequence
  mRNA product Design a-1 comprising derived and/or modified sequence from HRSV(Memphis-37)__AIY60640.1__F0 (opt3)
gggagagucccgcagucggcguccagcggcucugcuuguucgugugugugucguugcaggccuuauucaagcuuaccauggagcugcccauccucaagaccaacgccauuacaacuauacuugcugcagugacgcugugcuucgccagcucccagaauaucaccgaagaguuuuaccaaucuacauguucagcggucaguaaaggcuauuugagcgcuuuaagaacugggugguacaccuccguuauuacaaucgaacugucuaacauuaaggagaauaaaugcaacggaaccgacgccaaggugaaacuaaucaagcaggaacucgauaaguauaaaaaugcaguaacugagcugcagcuucugaugcagucgaccccugccgcuaacaauagggcacggcgcgaguugccacgauucaugaacuacacacucaauaacacgaagaauaacaaugugacucugagcaaaaagcguaaaagaagguuucuggguuuccucuuaggcgucgggucagccauagcuaguggaaucgccguguccaagguucugcaccuugaaggcgaggugaacaagauuaaaaaugcguugcugucuaccaacaaggcagucgugagccuauccaacgguguaucaguucucacaaguaaagugcuggaccuuaagaauuauaucgauaaacaacuguugccgauugucaacaagcagagcuguucuaucuccaauauagaaacugugauugaguuucagcagaaaaacaaucggcuccuggagaucacccgcgaguucucagugaacgccggggucacaacccccguuagcacguacauguuaacuaauagugaacugcucucucuuauuaacgacaugccuaucacaaaugaucaaaagaagcugauguccaacaaugugcagaucguaagacagcagagcuauucgauuaugucuauaaucaaagaagagguguuggcuuacgucgugcaacuaccacuguacggaguuauugacacccccugcuggaagcuccauacuuccccucuguguacaaccaacacgaaagaaggcucaaauaucugccuuaccaggacagaucggggcugguauugugacaacgccgggagugugagcuuuuucccacaggcagagacuugcaagguccaguccaaucgcguguuuugugauaccaugaacucucugacauugcccagcgagguaaaccucugcaauauagacauuuucaacccuaaauacgauuguaagaucaugacuucaaagaccgacguuaguuccagcgugaucacaucucugggagcuauugucucaugcuaugguaaaaccaagugcacugccaguaauaaaaaccgaggcaucauuaagacguuuagcaaugggugugauuacguguccaacaaaggagucgacacagugucuguuggcaauaccuuauauuacgugaacaagcaagaagguaagucgcuguauguaaaaggggagccaauaaucaauuucuacgacccgcuagucuuucccagcgaugaguucgacgcguccauuucacaggugaacgaaaagaucaaucagagucucgccuucaucagaaaaucugaugaacugcuucacaacguuaaugugggaaagagcacuaccaacauuaugauaacaaccaucauuaucgucauuaucgugauauugcugcuccugaucgcaguaggccuuuuucuguacugcaaagcuagguccacuccugugacauugucaaaggaccagcucagcggcauuaauaacaucgccuucucuaacugaggacuagucccuguucccagagcccacuuuuuuuucuuuuuuugaaauaaaauagccugucuuucagaucuaaaaaaaaaaaaaaaaaaaaaaaaaaaaaaaaaaaaaaaaaaaaaaaaaaaaaaaaaaaaaaaaugcaucccccccccccccccccccccccccccccccaaaggcucuuuucagagccaccagaauu

SEQ ID NO: 11739 - RNA, 2001 nt, Artificial Sequence
  mRNA product Design a-1 comprising derived and/or modified sequence from HRSV(Memphis-37)__AIY60640.1__F0 (opt4)
gggagagucccgcagucggcguccagcggcucugcuuguucgugugugugucguugcaggccuuauucaagcuuaccauggagcugcccauccugaagaccaacgccaucaccaccauccuggccgccgugacccugugcuucgccagcagccagaacaucaccgaggaguucuaccagagcaccugcagcgccgugagcaagggcuaccugagcgcccugagaaccggcugguacaccagcgugaucaccaucgagcugagcaacaucaaggagaacaagugcaacggcaccgacgccaaggugaagcugaucaagcaggagcuggacaaguacaagaacgccgugaccgagcugcagcugcugaugcagagcacccccgccgccaacaacagagccagaagagagcugcccagauucaugaacuacacccugaacaacaccaagaacaacaacgugacccugagcaagaagagaaagagaagauuccugggcuuccugcugggcgugggcagcgccaucgccagcggcaucgccgugagcaaggugcugcaccuggagggcgaggugaacaagaucaagaacgcccugcugagcaccaacaaggccguggugagccugagcaacggcgugagcgugcugaccagcaaggugcuggaccugaagaacuacaucgacaagcagcugcugcccaucgugaacaagcagagcugcagcaucagcaacaucgagaccgugaucgaguuccagcagaagaacaacagacugcuggagaucaccagagaguucagcgugaacgccggcgugaccacccccgugagcaccuacaugcugaccaacagcgagcugcugagccugaucaacgacaugcccaucaccaacgaccagaagaagcugaugagcaacaacgugcagaucgugagacagcagagcuacagcaucaugagcaucaucaaggaggaggugcuggccuacguggugcagcugccccuguacggcgugaucgacacccccugcuggaagcugcacaccagcccccugugcaccaccaacaccaaggagggcagcaacaucugccugaccagaaccgacagaggcugguacugcgacaacgccggcagcgugagcuucuucccccaggccgagaccugcaaggugcagagcaacagaguguucugcgacaccaugaacagccugacccugcccagcgaggugaaccugugcaacaucgacaucuucaaccccaaguacgacugcaagaucaugaccagcaagaccgacgugagcagcagcgugaucaccagccugggcgccaucgugagcugcuacggcaagaccaagugcaccgccagcaacaagaacagaggcaucaucaagaccuucagcaacggcugcgacuacgugagcaacaagggcguggacaccgugagcgugggcaacacccuguacuacgugaacaagcaggagggcaagagccuguacgugaagggcgagcccaucaucaacuucuacgacccccugguguuccccagcgacgaguucgacgccagcaucagccaggugaacgagaagaucaaccagagccuggccuucaucagaaagagcgacgagcugcugcacaacgugaacgugggcaagagcaccaccaacaucaugaucaccaccaucaucaucgugaucaucgugauccugcugcugcugaucgccgugggccuguuccuguacugcaaggccagaagcacccccgugacccugagcaaggaccagcugagcggcaucaacaacaucgccuucagcaacugaggacuagucccuguucccagagcccacuuuuuuuucuuuuuuugaaauaaaauagccugucuuucagaucuaaaaaaaaaaaaaaaaaaaaaaaaaaaaaaaaaaaaaaaaaaaaaaaaaaaaaaaaaaaaaaaaugcaucccccccccccccccccccccccccccccccaaaggcucuuuucagagccaccagaauu

SEQ ID NO: 11740 - RNA, 2001 nt, Artificial Sequence
  mRNA product Design a-1 comprising derived and/or modified sequence from HRSV(Memphis-37)__AIY60640.1__F0 (opt5)
gggagagucccgcagucggcguccagcggcucugcuuguucgugugugugucguugcaggccuuauucaagcuuaccauggagcugcccauccucaagaccaacgccauuacaacgauccuggcugccgugacccuuugcuucgcgagcucccagaauauuacagaagaguuuuaccaaucuaccuguagcgcugucuccaaaggcuaucugucugcccucagaacagggugguacaccagcguuaucacaauugaacuguccaacaucaaggagaauaaaugcaacggaaccgacgccaaggugaaacuuaucaagcaggaacuggauaaguauaaaaaugcugugacggagcuccagcugcugaugcagucuaccccugccgcuaacaaucgggcccgcagagagcucccgcgguucaugaacuacacacugaauaacaccaagaauaacaaugucacacuuagcaaaaagcgcaaaagacgguuucugggcuuccuccugggggugggauccgcgauugccagcggcaucgcuguuucuaaggugcuucaccuggaaggggaggucaacaagauuaaaaaugcccuccuguccaccaacaaggcugugguuagccugucuaacggaguguccguccucacgagcaaagugcuggaccuuaagaauuauaucgauaaacaacugcuccccauugugaacaagcagucuuguuccaucagcaauauugaaacagucaucgaguuucagcagaaaaacaaucgccugcuugagaucaccagagaauuuuccguuaacgccggcgugacaaccccugugucuaccuacaugcugacaaauagcgagcuccugucccugauuaacgacaugcccaucacgaaugaucaaaagaagcucaugagcaacaauguccagauugugcggcagcagucuuauuccaucaugagcauuaucaaagaagagguucuggcguacgugguccaacuuccucuguacggcgugaucgacacccccugcuggaagcuccauacaucuccucuguguaccacaaacaccaaagaagggagcaauauuugccuuacgcgcacagauagaggaugguauugugacaacgccggcuccguuucuuucuucccgcaggcugagaccugcaaggugcagagcaaucgggucuuuugugauaccaugaacucccugacacuccccagcgaggugaaccugugcaauaucgacauuuucaacccuaaauacgauuguaagaucaugaccucuaagacagacgucuccagcucugugauuacgucccugggggccaucguuagcugcuauggaaaaaccaagugcacagcuuccaauaaaaaccgcggcaucauuaagaccuuuucuaaugggugugauuacgugagcaacaaaggagucgacacaguguccguuggcaauacccucuauuacgugaacaagcaagaaggcaagucucuguaugucaaaggggagcccaucauuaauuucuacgacccucuuguguuucccagcgaugaguucgacgccuccaucagccaggugaacgaaaagauuaaucagucucuggccuucaucagaaaauccgaugaacuccugcacaacguuaaugucggaaagagcacgaccaacauuaugaucacaaccaucauuaucgugauuaucgugauucugcuucuccugaucgcugucggccuguuucucuacugcaaagcgcggucuacaccggugacccuguccaaggaccagcuuagcgggaucaauaacauugccuucucuaacugaggacuagucccuguucccagagcccacuuuuuuuucuuuuuuugaaauaaaauagccugucuuucagaucuaaaaaaaaaaaaaaaaaaaaaaaaaaaaaaaaaaaaaaaaaaaaaaaaaaaaaaaaaaaaaaaaugcaucccccccccccccccccccccccccccccccaaaggcucuuuucagagccaccagaauu

SEQ ID NO: 11741 - RNA, 2001 nt, Artificial Sequence
  mRNA product Design a-1 comprising derived and/or modified sequence from HRSV(Memphis-37)__AIY60640.1__F0 (opt6)
gggagagucccgcagucggcguccagcggcucugcuuguucgugugugugucguugcaggccuuauucaagcuuaccauggaacugccuauucuaaaaacaaaugccauaacaacaauucuugcagcaguaacauuauguuuugcaucaucacaaaacauuacagaagaauuuuaccaauccacuugcucagccguaucaaaaggauaccuaucagccuuaagaacagguugguacaccucaguaauaaccauagaacuaucaaacauaaaagaaaacaaaugcaaugguacugaugcaaaagucaaacuaaucaaacaagaacuggacaaauacaaaaaugcaguaaccgaacuacaacuccuaaugcaauccacaccugcagccaacaacagagcaagacgcgaacuaccaagauuuaugaauuacacauuaaacaacaccaagaacaacaauguaacucucucaaaaaaaagaaaaagacgcuuucuagguuuccuccuaggcgucggaucugcaauagccucaggaauagcaguaucaaaaguucuacaccuagaaggagaaguaaacaaaauuaaaaacgcauuacuaucaaccaacaaagcaguuguaucccuuucaaauggagucucuguacuuacaucaaaaguacucgaccuaaaaaacuauauagacaaacaacuacucccaauagucaauaagcaaucaugcagcauaucaaacauagaaacaguuauagaauuucaacaaaaaaacaacagacuacucgaaauaaccagagaauuuagcgucaacgcaggcguaaccacaccgguauccacauacaugcuuacaaacucagaacuccucucacuaauaaacgacaugccaauaacuaaugaccaaaaaaaacuaaugucaaacaauguccaaauaguccgucaacaaucauacucaauaaugucaauaauaaaagaagaaguauuagcauauguaguccaacuaccauuauacggcguuauagacacaccuuguuggaaacuucacacauccccacucuguacaaccaacacaaaagaagguuccaauauaugccuaacuagaaccgacagaggaugguauugcgacaacgcaggaucuguaucauucuuuccccaagcagaaacauguaaaguacaaaguaaccgcguauucugcgacaccaugaacucauuaacccucccauccgaaguuaauuuaugcaauauagacauauuuaauccuaaauacgacugcaaaauaaugacaucaaaaacagacguuaguuccuccguaaucacaucuuugggcgcaauagucucaugcuauggaaaaacaaaaugcacagccucaaacaaaaauagaggaauaauaaaaacauucagcaacggcugugauuauguauccaacaaaggaguagacacaguauccguaggcaauacccuuuacuacguuaauaaacaagaaggaaaaucauuauacgucaaaggagaaccuaucauaaauuucuacgacccauuaguauucccuucagacgaauuugaugccucaauaucccaagucaaugaaaaaaucaaccaaucacuagccuuuauccgcaaaucagacgaauuacuacacaacguaaacguaggcaaaucaacaacuaauauaaugauaacaacaauaauaauaguaauuauaguaauauuauuacuacuaaucgccguagguuuauucuuauacuguaaagcacgaucaacaccaguuacacucucaaaagaucaacuaucaggaauaaacaacauagcauuuuccaauuaaggacuagucccuguucccagagcccacuuuuuuuucuuuuuuugaaauaaaauagccugucuuucagaucuaaaaaaaaaaaaaaaaaaaaaaaaaaaaaaaaaaaaaaaaaaaaaaaaaaaaaaaaaaaaaaaaugcaucccccccccccccccccccccccccccccccaaaggcucuuuucagagccaccagaauu

SEQ ID NO: 11742 - RNA, 2001 nt, Artificial Sequence
  mRNA product Design a-1 comprising derived and/or modified sequence from HRSV(Memphis-37)__AIY60640.1__F0 (opt11)
gggagagucccgcagucggcguccagcggcucugcuuguucgugugugugucguugcaggccuuauucaagcuuaccauggaacuccccauccucaaaacaaacgccauaaccacuauccucgccgccgucacccucugcuucgccuccucccaaaacaucacagaggaguucuaccaauccacaugcuccgccgucuccaaaggcuaccucagcgcccuacguaccggcugguacaccagcgucaucacaauagaacucuccaacaucaaggaaaacaaaugcaacggcaccgaugccaaaguaaaacucaucaaacaagaacucgauaaauacaaaaacgccgucaccgaacuacaacuccuaaugcaaagcacacccgccgccaacaacagagcacggcgcgaacugccccgcuucaugaacuacacccucaacaacaccaaaaauaacaacgucacccuauccaagaaacgcaaacgccgauuccucgguuuccuacucggcguaggaagcgccauagccucaggcaucgccgucuccaaaguccuccaucuggaaggcgaagucaacaaaaucaaaaacgcacucuuauccaccaacaaagccgucgucucccucucgaacggggucuccguccuuaccuccaaaguccucgaccuuaaaaacuacaucgacaaacaacuacuaccaauagucaauaaacaauccugcuccaucucaaacauagaaaccgucauagaguuccaacagaagaacaaucgccuccucgaaauaacucgcgaguucuccgucaacgcaggcgucacgaccccugucucaacauacaugcuaacuaacucagaacuccuaagccuaaucaacgacaugcccaucacaaacgaccaaaagaaacucaugagcaacaauguccagauagucagacagcaauccuauagcaucaugucuauaauaaaagaagaagugcucgccuacguaguccaacucccucuuuacggcgucauagacacacccugcuggaaacuccacacaucuccucucugcaccaccaacacaaaagaaggcagcaacaucugccugacccgaaccgaccgcggaugguacugcgacaacgcuggcuccgugucuuucuuuccccaagccgaaaccugcaaaguccaguccaaccgcgucuucugcgacacaaugaacucccucacccuacccuccgaaguuaaccucugcaacaucgacaucuucaauccaaaauacgacugcaaaaucaugaccucgaaaacggacguauccuccuccgucauaacaucacuuggagccaucguuagcugcuacggaaaaaccaaauguaccgccuccaacaaaaaccgcggaauaaucaaaacauucuccaacggcugcgacuacguaagcaacaaaggggucgauacugucuccguagguaacacccuauacuacgucaacaaacaagaaggaaaaucacuauacguuaaaggcgaacccauuaucaacuucuacgacccccucguuuucccauccgacgaguucgacgccuccauaagccaaguuaacgaaaagauaaaccaaucgcucgcauucauccgcaaauccgacgaacuccuacacaacgucaacgugggcaaauccacaacaaacaucaugaucaccaccaucauuaucgucauaauagucauccuccuccugcucaucgccgugggacuauuccuauacugcaaagcccgcucgacgcccgucacacuuuccaaagaccaacuaagcggaaucaacaacauagcguucagcaauuaaggacuagucccuguucccagagcccacuuuuuuuucuuuuuuugaaauaaaauagccugucuuucagaucuaaaaaaaaaaaaaaaaaaaaaaaaaaaaaaaaaaaaaaaaaaaaaaaaaaaaaaaaaaaaaaaaugcaucccccccccccccccccccccccccccccccaaaggcucuuuucagagccaccagaauu

SEQ ID NO: 11743 - RNA, 2020 nt, Artificial Sequence
  mRNA product Design a-2 comprising derived and/or modified sequence from HRSV(Memphis-37)__AIY60640.1__F0 (wt)
gggagaguccgcucagccagguugcagaagcggcuuagcguguguccuaaucuucucucugcguguagguaggccugugccgcaaacaagcuuaccauggaguugccaauccucaaaacaaaugcaauuaccacaauccuugcugcagucacacucuguuucgcuuccagucaaaacaucacugaagaauuuuaucaaucaacaugcagugcaguuagcaaaggcuaucuuagugcuuuaagaacugguugguauacuaguguuauaacuauagaauuaaguaauaucaaggaaaauaaguguaauggaacagaugcuaagguaaaauugauaaaacaagaauuagauaaauauaaaaaugcuguaacagaauugcaguugcucaugcaaagcacaccagcagccaacaaucgagccagaagagaacuaccaagguuuaugaauuauacacucaacaauaccaaaaauaacaauguaacauuaagcaagaaaaggaaaagaagauuucuuggcuuuuuguuagguguuggaucugcaaucgccaguggcauugcuguaucuaaaguccugcaccuagaaggggaagugaacaaaaucaaaaaugcucuacuauccacaaacaaggcuguagucagcuuaucaaauggaguuagugucuuaaccagcaaaguguuagaccucaaaaacuauauagauaaacaguuguuacccauugugaacaagcaaagcugcagcauaucaaacauugaaacugugauagaauuccaacaaaagaacaacagacuacuagagauuaccagggaauuuaguguuaaugcagguguaacuacaccuguaagcacuuauauguuaacaaauagugaauuauuaucauuaaucaaugauaugccuauaacaaaugaucagaaaaaguuaauguccaacaauguucaaauaguuagacagcaaaguuacucuaucauguccauaauaaaggaggaagucuuagcauauguaguucaauuaccacuauaugguguaauagauacaccuuguuggaaacuacacacauccccucuaugcacaaccaacacaaaggaaggguccaacaucuguuuaacaagaaccgacagaggaugguacugugacaaugcaggaucagugucuuucuucccacaagcugaaacaugcaaaguucaaucgaaucgaguauuuugugacacaaugaacagucuaacauuaccaagugaaguaaaucucugcaacauugacauauucaacccuaaauaugauugcaaaauuaugacuucaaaaacagaugugagcagcuccguuaucacaucucuaggagccauugugucaugcuauggcaaaacuaaauguacagcauccaauaaaaaucguggaaucauaaagacauuuucuaacgggugugauuauguaucaaauaaggggguggacacuguaucuguagguaauacauuauauuauguaaauaagcaagaaggaaaaagccucuauguaaaaggugaaccaauaauaaauuucuaugacccauuaguguucccuucugaugaauuugaugcaucaauaucucaagucaaugagaagauuaaccagagccuagcauuuauucguaaauccgaugaauuauuacauaauguaaauguugguaaauccaccacaaauaucaugauaacuacuauaauuauagugauuauaguaauauuguuauuauuaauugcaguugggcuguuccuauacugcaaggccagaagcacaccagucacacuaagcaaggaucaacugagugguauaaauaauauugcauuuaguaacugaggacuagucccuguucccagagcccacuuuuuuuucuuuuuuugaaauaaaauagccugucuuucagaucuaaaaaaaaaaaaaaaaaaaaaaaaaaaaaaaaaaaaaaaaaaaaaaaaaaaaaaaaaaaaaaaaugcaucccccccccccccccccccccccccccccccaaaggcucuuuucagagccaccagaauu

SEQ ID NO: 11744 - RNA, 2020 nt, Artificial Sequence
  mRNA product Design a-2 comprising derived and/or modified sequence from HRSV(Memphis-37)__AIY60640.1__F0 (opt1)
gggagaguccgcucagccagguugcagaagcggcuuagcguguguccuaaucuucucucugcguguagguaggccugugccgcaaacaagcuuaccauggagcugcccauccucaagaccaacgccaucaccacgauccuggccgcggugacccugugcuucgccagcucccagaacaucaccgaggaguucuaccagagcacgugcuccgccgucagcaagggcuaccucuccgcccugcgcaccgggugguacaccagcgugaucaccaucgagcuguccaacaucaaggagaacaagugcaacggcaccgacgccaaggugaagcucaucaagcaggagcuggacaaguacaagaacgcggucacggagcugcagcuccugaugcagagcaccccggccgccaacaaccgggcccgccgggagcugccccgcuucaugaacuacacccucaacaacaccaagaacaacaacgugacgcuguccaagaagcggaagcgccgguuccugggguuccuccugggcguggggagcgcgaucgccuccggcaucgccgucagcaaggugcugcaccucgagggcgaggugaacaagaucaagaacgcccugcuguccaccaacaaggccgucgugagccucuccaacggggugagcguccugaccuccaaggugcuggaccucaagaacuacaucgacaagcagcugcugcccaucgugaacaagcagagcugcuccaucagcaacaucgagaccgucaucgaguuccagcagaagaacaaccgccuccuggagaucacgcgggaguucagcgugaacgcgggcgugaccacccccgucuccaccuacaugcugacgaacagcgagcuccugucccugaucaacgacaugccgaucaccaacgaccagaagaagcucaugagcaacaacgugcagaucgugcgccagcaguccuacagcaucauguccaucaucaaggaggagguccuggccuacguggugcagcugccccucuacggggucaucgacacccccugcuggaagcugcacaccagcccccugugcacgaccaacaccaaggagggcuccaacaucugccucacccggacggaccgcgggugguacugcgacaacgccggcagcguguccuucuucccgcaggccgagaccugcaagguccagagcaaccggguguucugcgacaccaugaacucccugacccugcccagcgaggugaaccucugcaacaucgacaucuucaaccccaaguacgacugcaagaucaugacguccaagaccgacgucagcuccagcgugaucaccucccugggcgccaucgugagcugcuacgggaagaccaagugcacggcgagcaacaagaaccgcggcaucaucaagaccuucuccaacgggugcgacuacgucagcaacaagggcguggacaccguguccgucggcaacacccuguacuacgugaacaagcaggagggcaagagccucuacgugaagggggagcccaucaucaacuucuacgacccgcuggucuuccccuccgacgaguucgacgccagcaucucccaggugaacgagaagaucaaccagagccuggccuucauccggaaguccgacgagcuccugcacaacgugaacgucggcaagagcaccacgaacaucaugaucaccaccaucaucaucgugaucaucgugauccugcugcuccugaucgccgucgggcuguuccucuacugcaaggcccgcuccacccccgugacgcugagcaaggaccagcuguccgggaucaacaacaucgcguucagcaacugaggacuagucccuguucccagagcccacuuuuuuuucuuuuuuugaaauaaaauagccugucuuucagaucuaaaaaaaaaaaaaaaaaaaaaaaaaaaaaaaaaaaaaaaaaaaaaaaaaaaaaaaaaaaaaaaaugcaucccccccccccccccccccccccccccccccaaaggcucuuuucagagccaccagaauu

SEQ ID NO: 11745 - RNA, 2020 nt, Artificial Sequence
  mRNA product Design a-2 comprising derived and/or modified sequence from HRSV(Memphis-37)__AIY60640.1__F0 (opt2)
gggagaguccgcucagccagguugcagaagcggcuuagcguguguccuaaucuucucucugcguguagguaggccugugccgcaaacaagcuuaccauggagcuccccauccucaagaccaacgccaucaccaccauccucgccgccgucacccucugcuucgccuccucccagaacaucaccgaggaguucuaccaguccaccugcuccgccgucuccaagggcuaccucuccgcccuccgcaccggcugguacaccuccgucaucaccaucgagcucuccaacaucaaggagaacaagugcaacggcaccgacgccaaggucaagcucaucaagcaggagcucgacaaguacaagaacgccgucaccgagcuccagcuccucaugcaguccacccccgccgccaacaaccgcgcccgccgcgagcucccccgcuucaugaacuacacccucaacaacaccaagaacaacaacgucacccucuccaagaagcgcaagcgccgcuuccucggcuuccuccucggcgucggcuccgccaucgccuccggcaucgccgucuccaagguccuccaccucgagggcgaggucaacaagaucaagaacgcccuccucuccaccaacaaggccgucgucucccucuccaacggcgucuccguccucaccuccaagguccucgaccucaagaacuacaucgacaagcagcuccuccccaucgucaacaagcaguccugcuccaucuccaacaucgagaccgucaucgaguuccagcagaagaacaaccgccuccucgagaucacccgcgaguucuccgucaacgccggcgucaccacccccgucuccaccuacaugcucaccaacuccgagcuccucucccucaucaacgacaugcccaucaccaacgaccagaagaagcucauguccaacaacguccagaucguccgccagcaguccuacuccaucauguccaucaucaaggaggagguccucgccuacgucguccagcucccccucuacggcgucaucgacacccccugcuggaagcuccacaccuccccccucugcaccaccaacaccaaggagggcuccaacaucugccucacccgcaccgaccgcggcugguacugcgacaacgccggcuccgucuccuucuucccccaggccgagaccugcaagguccaguccaaccgcgucuucugcgacaccaugaacucccucacccuccccuccgaggucaaccucugcaacaucgacaucuucaaccccaaguacgacugcaagaucaugaccuccaagaccgacgucuccuccuccgucaucaccucccucggcgccaucgucuccugcuacggcaagaccaagugcaccgccuccaacaagaaccgcggcaucaucaagaccuucuccaacggcugcgacuacgucuccaacaagggcgucgacaccgucuccgucggcaacacccucuacuacgucaacaagcaggagggcaagucccucuacgucaagggcgagcccaucaucaacuucuacgacccccucgucuuccccuccgacgaguucgacgccuccaucucccaggucaacgagaagaucaaccagucccucgccuucauccgcaaguccgacgagcuccuccacaacgucaacgucggcaaguccaccaccaacaucaugaucaccaccaucaucaucgucaucaucgucauccuccuccuccucaucgccgucggccucuuccucuacugcaaggcccgcuccacccccgucacccucuccaaggaccagcucuccggcaucaacaacaucgccuucuccaacugaggacuagucccuguucccagagcccacuuuuuuuucuuuuuuugaaauaaaauagccugucuuucagaucuaaaaaaaaaaaaaaaaaaaaaaaaaaaaaaaaaaaaaaaaaaaaaaaaaaaaaaaaaaaaaaaaugcaucccccccccccccccccccccccccccccccaaaggcucuuuucagagccaccagaauu

SEQ ID NO: 11746 - RNA, 2020 nt, Artificial Sequence
  mRNA product Design a-2 comprising derived and/or modified sequence from HRSV(Memphis-37)__AIY60640.1__F0 (opt3)
gggagaguccgcucagccagguugcagaagcggcuuagcguguguccuaaucuucucucugcguguagguaggccugugccgcaaacaagcuuaccauggagcugcccauccucaagaccaacgccauuacaacuauacuugcugcagugacgcugugcuucgccagcucccagaauaucaccgaagaguuuuaccaaucuacauguucagcggucaguaaaggcuauuugagcgcuuuaagaacugggugguacaccuccguuauuacaaucgaacugucuaacauuaaggagaauaaaugcaacggaaccgacgccaaggugaaacuaaucaagcaggaacucgauaaguauaaaaaugcaguaacugagcugcagcuucugaugcagucgaccccugccgcuaacaauagggcacggcgcgaguugccacgauucaugaacuacacacucaauaacacgaagaauaacaaugugacucugagcaaaaagcguaaaagaagguuucuggguuuccucuuaggcgucgggucagccauagcuaguggaaucgccguguccaagguucugcaccuugaaggcgaggugaacaagauuaaaaaugcguugcugucuaccaacaaggcagucgugagccuauccaacgguguaucaguucucacaaguaaagugcuggaccuuaagaauuauaucgauaaacaacuguugccgauugucaacaagcagagcuguucuaucuccaauauagaaacugugauugaguuucagcagaaaaacaaucggcuccuggagaucacccgcgaguucucagugaacgccggggucacaacccccguuagcacguacauguuaacuaauagugaacugcucucucuuauuaacgacaugccuaucacaaaugaucaaaagaagcugauguccaacaaugugcagaucguaagacagcagagcuauucgauuaugucuauaaucaaagaagagguguuggcuuacgucgugcaacuaccacuguacggaguuauugacacccccugcuggaagcuccauacuuccccucuguguacaaccaacacgaaagaaggcucaaauaucugccuuaccaggacagaucggggcugguauugugacaacgccgggagugugagcuuuuucccacaggcagagacuugcaagguccaguccaaucgcguguuuugugauaccaugaacucucugacauugcccagcgagguaaaccucugcaauauagacauuuucaacccuaaauacgauuguaagaucaugacuucaaagaccgacguuaguuccagcgugaucacaucucugggagcuauugucucaugcuaugguaaaaccaagugcacugccaguaauaaaaaccgaggcaucauuaagacguuuagcaaugggugugauuacguguccaacaaaggagucgacacagugucuguuggcaauaccuuauauuacgugaacaagcaagaagguaagucgcuguauguaaaaggggagccaauaaucaauuucuacgacccgcuagucuuucccagcgaugaguucgacgcguccauuucacaggugaacgaaaagaucaaucagagucucgccuucaucagaaaaucugaugaacugcuucacaacguuaaugugggaaagagcacuaccaacauuaugauaacaaccaucauuaucgucauuaucgugauauugcugcuccugaucgcaguaggccuuuuucuguacugcaaagcuagguccacuccugugacauugucaaaggaccagcucagcggcauuaauaacaucgccuucucuaacugaggacuagucccuguucccagagcccacuuuuuuuucuuuuuuugaaauaaaauagccugucuuucagaucuaaaaaaaaaaaaaaaaaaaaaaaaaaaaaaaaaaaaaaaaaaaaaaaaaaaaaaaaaaaaaaaaugcaucccccccccccccccccccccccccccccccaaaggcucuuuucagagccaccagaauu

SEQ ID NO: 11747 - RNA, 2020 nt, Artificial Sequence
  mRNA product Design a-2 comprising derived and/or modified sequence from HRSV(Memphis-37)__AIY60640.1__F0 (opt4)
gggagaguccgcucagccagguugcagaagcggcuuagcguguguccuaaucuucucucugcguguagguaggccugugccgcaaacaagcuuaccauggagcugcccauccugaagaccaacgccaucaccaccauccuggccgccgugacccugugcuucgccagcagccagaacaucaccgaggaguucuaccagagcaccugcagcgccgugagcaagggcuaccugagcgcccugagaaccggcugguacaccagcgugaucaccaucgagcugagcaacaucaaggagaacaagugcaacggcaccgacgccaaggugaagcugaucaagcaggagcuggacaaguacaagaacgccgugaccgagcugcagcugcugaugcagagcacccccgccgccaacaacagagccagaagagagcugcccagauucaugaacuacacccugaacaacaccaagaacaacaacgugacccugagcaagaagagaaagagaagauuccugggcuuccugcugggcgugggcagcgccaucgccagcggcaucgccgugagcaaggugcugcaccuggagggcgaggugaacaagaucaagaacgcccugcugagcaccaacaaggccguggugagccugagcaacggcgugagcgugcugaccagcaaggugcuggaccugaagaacuacaucgacaagcagcugcugcccaucgugaacaagcagagcugcagcaucagcaacaucgagaccgugaucgaguuccagcagaagaacaacagacugcuggagaucaccagagaguucagcgugaacgccggcgugaccacccccgugagcaccuacaugcugaccaacagcgagcugcugagccugaucaacgacaugcccaucaccaacgaccagaagaagcugaugagcaacaacgugcagaucgugagacagcagagcuacagcaucaugagcaucaucaaggaggaggugcuggccuacguggugcagcugccccuguacggcgugaucgacacccccugcuggaagcugcacaccagcccccugugcaccaccaacaccaaggagggcagcaacaucugccugaccagaaccgacagaggcugguacugcgacaacgccggcagcgugagcuucuucccccaggccgagaccugcaaggugcagagcaacagaguguucugcgacaccaugaacagccugacccugcccagcgaggugaaccugugcaacaucgacaucuucaaccccaaguacgacugcaagaucaugaccagcaagaccgacgugagcagcagcgugaucaccagccugggcgccaucgugagcugcuacggcaagaccaagugcaccgccagcaacaagaacagaggcaucaucaagaccuucagcaacggcugcgacuacgugagcaacaagggcguggacaccgugagcgugggcaacacccuguacuacgugaacaagcaggagggcaagagccuguacgugaagggcgagcccaucaucaacuucuacgacccccugguguuccccagcgacgaguucgacgccagcaucagccaggugaacgagaagaucaaccagagccuggccuucaucagaaagagcgacgagcugcugcacaacgugaacgugggcaagagcaccaccaacaucaugaucaccaccaucaucaucgugaucaucgugauccugcugcugcugaucgccgugggccuguuccuguacugcaaggccagaagcacccccgugacccugagcaaggaccagcugagcggcaucaacaacaucgccuucagcaacugaggacuagucccuguucccagagcccacuuuuuuuucuuuuuuugaaauaaaauagccugucuuucagaucuaaaaaaaaaaaaaaaaaaaaaaaaaaaaaaaaaaaaaaaaaaaaaaaaaaaaaaaaaaaaaaaaugcaucccccccccccccccccccccccccccccccaaaggcucuuuucagagccaccagaauu

SEQ ID NO: 11748 - RNA, 2020 nt, Artificial Sequence
  mRNA product Design a-2 comprising derived and/or modified sequence from HRSV(Memphis-37)__AIY60640.1__F0 (opt5)
gggagaguccgcucagccagguugcagaagcggcuuagcguguguccuaaucuucucucugcguguagguaggccugugccgcaaacaagcuuaccauggagcugcccauccucaagaccaacgccauuacaacgauccuggcugccgugacccuuugcuucgcgagcucccagaauauuacagaagaguuuuaccaaucuaccuguagcgcugucuccaaaggcuaucugucugcccucagaacagggugguacaccagcguuaucacaauugaacuguccaacaucaaggagaauaaaugcaacggaaccgacgccaaggugaaacuuaucaagcaggaacuggauaaguauaaaaaugcugugacggagcuccagcugcugaugcagucuaccccugccgcuaacaaucgggcccgcagagagcucccgcgguucaugaacuacacacugaauaacaccaagaauaacaaugucacacuuagcaaaaagcgcaaaagacgguuucugggcuuccuccugggggugggauccgcgauugccagcggcaucgcuguuucuaaggugcuucaccuggaaggggaggucaacaagauuaaaaaugcccuccuguccaccaacaaggcugugguuagccugucuaacggaguguccguccucacgagcaaagugcuggaccuuaagaauuauaucgauaaacaacugcuccccauugugaacaagcagucuuguuccaucagcaauauugaaacagucaucgaguuucagcagaaaaacaaucgccugcuugagaucaccagagaauuuuccguuaacgccggcgugacaaccccugugucuaccuacaugcugacaaauagcgagcuccugucccugauuaacgacaugcccaucacgaaugaucaaaagaagcucaugagcaacaauguccagauugugcggcagcagucuuauuccaucaugagcauuaucaaagaagagguucuggcguacgugguccaacuuccucuguacggcgugaucgacacccccugcuggaagcuccauacaucuccucuguguaccacaaacaccaaagaagggagcaauauuugccuuacgcgcacagauagaggaugguauugugacaacgccggcuccguuucuuucuucccgcaggcugagaccugcaaggugcagagcaaucgggucuuuugugauaccaugaacucccugacacuccccagcgaggugaaccugugcaauaucgacauuuucaacccuaaauacgauuguaagaucaugaccucuaagacagacgucuccagcucugugauuacgucccugggggccaucguuagcugcuauggaaaaaccaagugcacagcuuccaauaaaaaccgcggcaucauuaagaccuuuucuaaugggugugauuacgugagcaacaaaggagucgacacaguguccguuggcaauacccucuauuacgugaacaagcaagaaggcaagucucuguaugucaaaggggagcccaucauuaauuucuacgacccucuuguguuucccagcgaugaguucgacgccuccaucagccaggugaacgaaaagauuaaucagucucuggccuucaucagaaaauccgaugaacuccugcacaacguuaaugucggaaagagcacgaccaacauuaugaucacaaccaucauuaucgugauuaucgugauucugcuucuccugaucgcugucggccuguuucucuacugcaaagcgcggucuacaccggugacccuguccaaggaccagcuuagcgggaucaauaacauugccuucucuaacugaggacuagucccuguucccagagcccacuuuuuuuucuuuuuuugaaauaaaauagccugucuuucagaucuaaaaaaaaaaaaaaaaaaaaaaaaaaaaaaaaaaaaaaaaaaaaaaaaaaaaaaaaaaaaaaaaugcaucccccccccccccccccccccccccccccccaaaggcucuuuucagagccaccagaauu

SEQ ID NO: 11749 - RNA, 2020 nt, Artificial Sequence
  mRNA product Design a-2 comprising derived and/or modified sequence from HRSV(Memphis-37)__AIY60640.1__F0 (opt6)
gggagaguccgcucagccagguugcagaagcggcuuagcguguguccuaaucuucucucugcguguagguaggccugugccgcaaacaagcuuaccauggaacugccuauucuaaaaacaaaugccauaacaacaauucuugcagcaguaacauuauguuuugcaucaucacaaaacauuacagaagaauuuuaccaauccacuugcucagccguaucaaaaggauaccuaucagccuuaagaacagguugguacaccucaguaauaaccauagaacuaucaaacauaaaagaaaacaaaugcaaugguacugaugcaaaagucaaacuaaucaaacaagaacuggacaaauacaaaaaugcaguaaccgaacuacaacuccuaaugcaauccacaccugcagccaacaacagagcaagacgcgaacuaccaagauuuaugaauuacacauuaaacaacaccaagaacaacaauguaacucucucaaaaaaaagaaaaagacgcuuucuagguuuccuccuaggcgucggaucugcaauagccucaggaauagcaguaucaaaaguucuacaccuagaaggagaaguaaacaaaauuaaaaacgcauuacuaucaaccaacaaagcaguuguaucccuuucaaauggagucucuguacuuacaucaaaaguacucgaccuaaaaaacuauauagacaaacaacuacucccaauagucaauaagcaaucaugcagcauaucaaacauagaaacaguuauagaauuucaacaaaaaaacaacagacuacucgaaauaaccagagaauuuagcgucaacgcaggcguaaccacaccgguauccacauacaugcuuacaaacucagaacuccucucacuaauaaacgacaugccaauaacuaaugaccaaaaaaaacuaaugucaaacaauguccaaauaguccgucaacaaucauacucaauaaugucaauaauaaaagaagaaguauuagcauauguaguccaacuaccauuauacggcguuauagacacaccuuguuggaaacuucacacauccccacucuguacaaccaacacaaaagaagguuccaauauaugccuaacuagaaccgacagaggaugguauugcgacaacgcaggaucuguaucauucuuuccccaagcagaaacauguaaaguacaaaguaaccgcguauucugcgacaccaugaacucauuaacccucccauccgaaguuaauuuaugcaauauagacauauuuaauccuaaauacgacugcaaaauaaugacaucaaaaacagacguuaguuccuccguaaucacaucuuugggcgcaauagucucaugcuauggaaaaacaaaaugcacagccucaaacaaaaauagaggaauaauaaaaacauucagcaacggcugugauuauguauccaacaaaggaguagacacaguauccguaggcaauacccuuuacuacguuaauaaacaagaaggaaaaucauuauacgucaaaggagaaccuaucauaaauuucuacgacccauuaguauucccuucagacgaauuugaugccucaauaucccaagucaaugaaaaaaucaaccaaucacuagccuuuauccgcaaaucagacgaauuacuacacaacguaaacguaggcaaaucaacaacuaauauaaugauaacaacaauaauaauaguaauuauaguaauauuauuacuacuaaucgccguagguuuauucuuauacuguaaagcacgaucaacaccaguuacacucucaaaagaucaacuaucaggaauaaacaacauagcauuuuccaauuaaggacuagucccuguucccagagcccacuuuuuuuucuuuuuuugaaauaaaauagccugucuuucagaucuaaaaaaaaaaaaaaaaaaaaaaaaaaaaaaaaaaaaaaaaaaaaaaaaaaaaaaaaaaaaaaaaugcaucccccccccccccccccccccccccccccccaaaggcucuuuucagagccaccagaauu

SEQ ID NO: 11750 - RNA, 2020 nt, Artificial Sequence
  mRNA product Design a-2 comprising derived and/or modified sequence from HRSV(Memphis-37)__AIY60640.1__F0 (opt11)
gggagaguccgcucagccagguugcagaagcggcuuagcguguguccuaaucuucucucugcguguagguaggccugugccgcaaacaagcuuaccauggaacuccccauccucaaaacaaacgccauaaccacuauccucgccgccgucacccucugcuucgccuccucccaaaacaucacagaggaguucuaccaauccacaugcuccgccgucuccaaaggcuaccucagcgcccuacguaccggcugguacaccagcgucaucacaauagaacucuccaacaucaaggaaaacaaaugcaacggcaccgaugccaaaguaaaacucaucaaacaagaacucgauaaauacaaaaacgccgucaccgaacuacaacuccuaaugcaaagcacacccgccgccaacaacagagcacggcgcgaacugccccgcuucaugaacuacacccucaacaacaccaaaaauaacaacgucacccuauccaagaaacgcaaacgccgauuccucgguuuccuacucggcguaggaagcgccauagccucaggcaucgccgucuccaaaguccuccaucuggaaggcgaagucaacaaaaucaaaaacgcacucuuauccaccaacaaagccgucgucucccucucgaacggggucuccguccuuaccuccaaaguccucgaccuuaaaaacuacaucgacaaacaacuacuaccaauagucaauaaacaauccugcuccaucucaaacauagaaaccgucauagaguuccaacagaagaacaaucgccuccucgaaauaacucgcgaguucuccgucaacgcaggcgucacgaccccugucucaacauacaugcuaacuaacucagaacuccuaagccuaaucaacgacaugcccaucacaaacgaccaaaagaaacucaugagcaacaauguccagauagucagacagcaauccuauagcaucaugucuauaauaaaagaagaagugcucgccuacguaguccaacucccucuuuacggcgucauagacacacccugcuggaaacuccacacaucuccucucugcaccaccaacacaaaagaaggcagcaacaucugccugacccgaaccgaccgcggaugguacugcgacaacgcuggcuccgugucuuucuuuccccaagccgaaaccugcaaaguccaguccaaccgcgucuucugcgacacaaugaacucccucacccuacccuccgaaguuaaccucugcaacaucgacaucuucaauccaaaauacgacugcaaaaucaugaccucgaaaacggacguauccuccuccgucauaacaucacuuggagccaucguuagcugcuacggaaaaaccaaauguaccgccuccaacaaaaaccgcggaauaaucaaaacauucuccaacggcugcgacuacguaagcaacaaaggggucgauacugucuccguagguaacacccuauacuacgucaacaaacaagaaggaaaaucacuauacguuaaaggcgaacccauuaucaacuucuacgacccccucguuuucccauccgacgaguucgacgccuccauaagccaaguuaacgaaaagauaaaccaaucgcucgcauucauccgcaaauccgacgaacuccuacacaacgucaacgugggcaaauccacaacaaacaucaugaucaccaccaucauuaucgucauaauagucauccuccuccugcucaucgccgugggacuauuccuauacugcaaagcccgcucgacgcccgucacacuuuccaaagaccaacuaagcggaaucaacaacauagcguucagcaauuaaggacuagucccuguucccagagcccacuuuuuuuucuuuuuuugaaauaaaauagccugucuuucagaucuaaaaaaaaaaaaaaaaaaaaaaaaaaaaaaaaaaaaaaaaaaaaaaaaaaaaaaaaaaaaaaaaugcaucccccccccccccccccccccccccccccccaaaggcucuuuucagagccaccagaauu

SEQ ID NO: 11751 - RNA, 2098 nt, Artificial Sequence
  mRNA product Design a-3 comprising derived and/or modified sequence from HRSV(Memphis-37)__AIY60640.1__F0 (wt)
gggagagggcgcuuggcuugcaaggacccugagcugcggcauugaagcacacccaacccaacucgacugaagucagccucacugaaccggaucugagaaucuucucucucugggcuugccagggcucuccgaaccuagcuagcauccucuucaauuccaacuagaaagcuuaccauggaguugccaauccucaaaacaaaugcaauuaccacaauccuugcugcagucacacucuguuucgcuuccagucaaaacaucacugaagaauuuuaucaaucaacaugcagugcaguuagcaaaggcuaucuuagugcuuuaagaacugguugguauacuaguguuauaacuauagaauuaaguaauaucaaggaaaauaaguguaauggaacagaugcuaagguaaaauugauaaaacaagaauuagauaaauauaaaaaugcuguaacagaauugcaguugcucaugcaaagcacaccagcagccaacaaucgagccagaagagaacuaccaagguuuaugaauuauacacucaacaauaccaaaaauaacaauguaacauuaagcaagaaaaggaaaagaagauuucuuggcuuuuuguuagguguuggaucugcaaucgccaguggcauugcuguaucuaaaguccugcaccuagaaggggaagugaacaaaaucaaaaaugcucuacuauccacaaacaaggcuguagucagcuuaucaaauggaguuagugucuuaaccagcaaaguguuagaccucaaaaacuauauagauaaacaguuguuacccauugugaacaagcaaagcugcagcauaucaaacauugaaacugugauagaauuccaacaaaagaacaacagacuacuagagauuaccagggaauuuaguguuaaugcagguguaacuacaccuguaagcacuuauauguuaacaaauagugaauuauuaucauuaaucaaugauaugccuauaacaaaugaucagaaaaaguuaauguccaacaauguucaaauaguuagacagcaaaguuacucuaucauguccauaauaaaggaggaagucuuagcauauguaguucaauuaccacuauaugguguaauagauacaccuuguuggaaacuacacacauccccucuaugcacaaccaacacaaaggaaggguccaacaucuguuuaacaagaaccgacagaggaugguacugugacaaugcaggaucagugucuuucuucccacaagcugaaacaugcaaaguucaaucgaaucgaguauuuugugacacaaugaacagucuaacauuaccaagugaaguaaaucucugcaacauugacauauucaacccuaaauaugauugcaaaauuaugacuucaaaaacagaugugagcagcuccguuaucacaucucuaggagccauugugucaugcuauggcaaaacuaaauguacagcauccaauaaaaaucguggaaucauaaagacauuuucuaacgggugugauuauguaucaaauaaggggguggacacuguaucuguagguaauacauuauauuauguaaauaagcaagaaggaaaaagccucuauguaaaaggugaaccaauaauaaauuucuaugacccauuaguguucccuucugaugaauuugaugcaucaauaucucaagucaaugagaagauuaaccagagccuagcauuuauucguaaauccgaugaauuauuacauaauguaaauguugguaaauccaccacaaauaucaugauaacuacuauaauuauagugauuauaguaauauuguuauuauuaauugcaguugggcuguuccuauacugcaaggccagaagcacaccagucacacuaagcaaggaucaacugagugguauaaauaauauugcauuuaguaacugaggacuagucccuguucccagagcccacuuuuuuuucuuuuuuugaaauaaaauagccugucuuucagaucuaaaaaaaaaaaaaaaaaaaaaaaaaaaaaaaaaaaaaaaaaaaaaaaaaaaaaaaaaaaaaaaaugcaucccccccccccccccccccccccccccccccaaaggcucuuuucagagccaccagaauu

SEQ ID NO: 11752 - RNA, 2098 nt, Artificial Sequence
  mRNA product Design a-3 comprising derived and/or modified sequence from HRSV(Memphis-37)__AIY60640.1__F0 (opt1)
gggagagggcgcuuggcuugcaaggacccugagcugcggcauugaagcacacccaacccaacucgacugaagucagccucacugaaccggaucugagaaucuucucucucugggcuugccagggcucuccgaaccuagcuagcauccucuucaauuccaacuagaaagcuuaccauggagcugcccauccucaagaccaacgccaucaccacgauccuggccgcggugacccugugcuucgccagcucccagaacaucaccgaggaguucuaccagagcacgugcuccgccgucagcaagggcuaccucuccgcccugcgcaccgggugguacaccagcgugaucaccaucgagcuguccaacaucaaggagaacaagugcaacggcaccgacgccaaggugaagcucaucaagcaggagcuggacaaguacaagaacgcggucacggagcugcagcuccugaugcagagcaccccggccgccaacaaccgggcccgccgggagcugccccgcuucaugaacuacacccucaacaacaccaagaacaacaacgugacgcuguccaagaagcggaagcgccgguuccugggguuccuccugggcguggggagcgcgaucgccuccggcaucgccgucagcaaggugcugcaccucgagggcgaggugaacaagaucaagaacgcccugcuguccaccaacaaggccgucgugagccucuccaacggggugagcguccugaccuccaaggugcuggaccucaagaacuacaucgacaagcagcugcugcccaucgugaacaagcagagcugcuccaucagcaacaucgagaccgucaucgaguuccagcagaagaacaaccgccuccuggagaucacgcgggaguucagcgugaacgcgggcgugaccacccccgucuccaccuacaugcugacgaacagcgagcuccugucccugaucaacgacaugccgaucaccaacgaccagaagaagcucaugagcaacaacgugcagaucgugcgccagcaguccuacagcaucauguccaucaucaaggaggagguccuggccuacguggugcagcugccccucuacggggucaucgacacccccugcuggaagcugcacaccagcccccugugcacgaccaacaccaaggagggcuccaacaucugccucacccggacggaccgcgggugguacugcgacaacgccggcagcguguccuucuucccgcaggccgagaccugcaagguccagagcaaccggguguucugcgacaccaugaacucccugacccugcccagcgaggugaaccucugcaacaucgacaucuucaaccccaaguacgacugcaagaucaugacguccaagaccgacgucagcuccagcgugaucaccucccugggcgccaucgugagcugcuacgggaagaccaagugcacggcgagcaacaagaaccgcggcaucaucaagaccuucuccaacgggugcgacuacgucagcaacaagggcguggacaccguguccgucggcaacacccuguacuacgugaacaagcaggagggcaagagccucuacgugaagggggagcccaucaucaacuucuacgacccgcuggucuuccccuccgacgaguucgacgccagcaucucccaggugaacgagaagaucaaccagagccuggccuucauccggaaguccgacgagcuccugcacaacgugaacgucggcaagagcaccacgaacaucaugaucaccaccaucaucaucgugaucaucgugauccugcugcuccugaucgccgucgggcuguuccucuacugcaaggcccgcuccacccccgugacgcugagcaaggaccagcuguccgggaucaacaacaucgcguucagcaacugaggacuagucccuguucccagagcccacuuuuuuuucuuuuuuugaaauaaaauagccugucuuucagaucuaaaaaaaaaaaaaaaaaaaaaaaaaaaaaaaaaaaaaaaaaaaaaaaaaaaaaaaaaaaaaaaaugcaucccccccccccccccccccccccccccccccaaaggcucuuuucagagccaccagaauu

SEQ ID NO: 11753 - RNA, 2098 nt, Artificial Sequence
  mRNA product Design a-3 comprising derived and/or modified sequence from HRSV(Memphis-37)__AIY60640.1__F0 (opt2)
gggagagggcgcuuggcuugcaaggacccugagcugcggcauugaagcacacccaacccaacucgacugaagucagccucacugaaccggaucugagaaucuucucucucugggcuugccagggcucuccgaaccuagcuagcauccucuucaauuccaacuagaaagcuuaccauggagcuccccauccucaagaccaacgccaucaccaccauccucgccgccgucacccucugcuucgccuccucccagaacaucaccgaggaguucuaccaguccaccugcuccgccgucuccaagggcuaccucuccgcccuccgcaccggcugguacaccuccgucaucaccaucgagcucuccaacaucaaggagaacaagugcaacggcaccgacgccaaggucaagcucaucaagcaggagcucgacaaguacaagaacgccgucaccgagcuccagcuccucaugcaguccacccccgccgccaacaaccgcgcccgccgcgagcucccccgcuucaugaacuacacccucaacaacaccaagaacaacaacgucacccucuccaagaagcgcaagcgccgcuuccucggcuuccuccucggcgucggcuccgccaucgccuccggcaucgccgucuccaagguccuccaccucgagggcgaggucaacaagaucaagaacgcccuccucuccaccaacaaggccgucgucucccucuccaacggcgucuccguccucaccuccaagguccucgaccucaagaacuacaucgacaagcagcuccuccccaucgucaacaagcaguccugcuccaucuccaacaucgagaccgucaucgaguuccagcagaagaacaaccgccuccucgagaucacccgcgaguucuccgucaacgccggcgucaccacccccgucuccaccuacaugcucaccaacuccgagcuccucucccucaucaacgacaugcccaucaccaacgaccagaagaagcucauguccaacaacguccagaucguccgccagcaguccuacuccaucauguccaucaucaaggaggagguccucgccuacgucguccagcucccccucuacggcgucaucgacacccccugcuggaagcuccacaccuccccccucugcaccaccaacaccaaggagggcuccaacaucugccucacccgcaccgaccgcggcugguacugcgacaacgccggcuccgucuccuucuucccccaggccgagaccugcaagguccaguccaaccgcgucuucugcgacaccaugaacucccucacccuccccuccgaggucaaccucugcaacaucgacaucuucaaccccaaguacgacugcaagaucaugaccuccaagaccgacgucuccuccuccgucaucaccucccucggcgccaucgucuccugcuacggcaagaccaagugcaccgccuccaacaagaaccgcggcaucaucaagaccuucuccaacggcugcgacuacgucuccaacaagggcgucgacaccgucuccgucggcaacacccucuacuacgucaacaagcaggagggcaagucccucuacgucaagggcgagcccaucaucaacuucuacgacccccucgucuuccccuccgacgaguucgacgccuccaucucccaggucaacgagaagaucaaccagucccucgccuucauccgcaaguccgacgagcuccuccacaacgucaacgucggcaaguccaccaccaacaucaugaucaccaccaucaucaucgucaucaucgucauccuccuccuccucaucgccgucggccucuuccucuacugcaaggcccgcuccacccccgucacccucuccaaggaccagcucuccggcaucaacaacaucgccuucuccaacugaggacuagucccuguucccagagcccacuuuuuuuucuuuuuuugaaauaaaauagccugucuuucagaucuaaaaaaaaaaaaaaaaaaaaaaaaaaaaaaaaaaaaaaaaaaaaaaaaaaaaaaaaaaaaaaaaugcaucccccccccccccccccccccccccccccccaaaggcucuuuucagagccaccagaauu

SEQ ID NO: 11754 - RNA, 2098 nt, Artificial Sequence
  mRNA product Design a-3 comprising derived and/or modified sequence from HRSV(Memphis-37)__AIY60640.1__F0 (opt3)
gggagagggcgcuuggcuugcaaggacccugagcugcggcauugaagcacacccaacccaacucgacugaagucagccucacugaaccggaucugagaaucuucucucucugggcuugccagggcucuccgaaccuagcuagcauccucuucaauuccaacuagaaagcuuaccauggagcugcccauccucaagaccaacgccauuacaacuauacuugcugcagugacgcugugcuucgccagcucccagaauaucaccgaagaguuuuaccaaucuacauguucagcggucaguaaaggcuauuugagcgcuuuaagaacugggugguacaccuccguuauuacaaucgaacugucuaacauuaaggagaauaaaugcaacggaaccgacgccaaggugaaacuaaucaagcaggaacucgauaaguauaaaaaugcaguaacugagcugcagcuucugaugcagucgaccccugccgcuaacaauagggcacggcgcgaguugccacgauucaugaacuacacacucaauaacacgaagaauaacaaugugacucugagcaaaaagcguaaaagaagguuucuggguuuccucuuaggcgucgggucagccauagcuaguggaaucgccguguccaagguucugcaccuugaaggcgaggugaacaagauuaaaaaugcguugcugucuaccaacaaggcagucgugagccuauccaacgguguaucaguucucacaaguaaagugcuggaccuuaagaauuauaucgauaaacaacuguugccgauugucaacaagcagagcuguucuaucuccaauauagaaacugugauugaguuucagcagaaaaacaaucggcuccuggagaucacccgcgaguucucagugaacgccggggucacaacccccguuagcacguacauguuaacuaauagugaacugcucucucuuauuaacgacaugccuaucacaaaugaucaaaagaagcugauguccaacaaugugcagaucguaagacagcagagcuauucgauuaugucuauaaucaaagaagagguguuggcuuacgucgugcaacuaccacuguacggaguuauugacacccccugcuggaagcuccauacuuccccucuguguacaaccaacacgaaagaaggcucaaauaucugccuuaccaggacagaucggggcugguauugugacaacgccgggagugugagcuuuuucccacaggcagagacuugcaagguccaguccaaucgcguguuuugugauaccaugaacucucugacauugcccagcgagguaaaccucugcaauauagacauuuucaacccuaaauacgauuguaagaucaugacuucaaagaccgacguuaguuccagcgugaucacaucucugggagcuauugucucaugcuaugguaaaaccaagugcacugccaguaauaaaaaccgaggcaucauuaagacguuuagcaaugggugugauuacguguccaacaaaggagucgacacagugucuguuggcaauaccuuauauuacgugaacaagcaagaagguaagucgcuguauguaaaaggggagccaauaaucaauuucuacgacccgcuagucuuucccagcgaugaguucgacgcguccauuucacaggugaacgaaaagaucaaucagagucucgccuucaucagaaaaucugaugaacugcuucacaacguuaaugugggaaagagcacuaccaacauuaugauaacaaccaucauuaucgucauuaucgugauauugcugcuccugaucgcaguaggccuuuuucuguacugcaaagcuagguccacuccugugacauugucaaaggaccagcucagcggcauuaauaacaucgccuucucuaacugaggacuagucccuguucccagagcccacuuuuuuuucuuuuuuugaaauaaaauagccugucuuucagaucuaaaaaaaaaaaaaaaaaaaaaaaaaaaaaaaaaaaaaaaaaaaaaaaaaaaaaaaaaaaaaaaaugcaucccccccccccccccccccccccccccccccaaaggcucuuuucagagccaccagaauu

SEQ ID NO: 11755 - RNA, 2098 nt, Artificial Sequence
  mRNA product Design a-3 comprising derived and/or modified sequence from HRSV(Memphis-37)__AIY60640.1__F0 (opt4)
gggagagggcgcuuggcuugcaaggacccugagcugcggcauugaagcacacccaacccaacucgacugaagucagccucacugaaccggaucugagaaucuucucucucugggcuugccagggcucuccgaaccuagcuagcauccucuucaauuccaacuagaaagcuuaccauggagcugcccauccugaagaccaacgccaucaccaccauccuggccgccgugacccugugcuucgccagcagccagaacaucaccgaggaguucuaccagagcaccugcagcgccgugagcaagggcuaccugagcgcccugagaaccggcugguacaccagcgugaucaccaucgagcugagcaacaucaaggagaacaagugcaacggcaccgacgccaaggugaagcugaucaagcaggagcuggacaaguacaagaacgccgugaccgagcugcagcugcugaugcagagcacccccgccgccaacaacagagccagaagagagcugcccagauucaugaacuacacccugaacaacaccaagaacaacaacgugacccugagcaagaagagaaagagaagauuccugggcuuccugcugggcgugggcagcgccaucgccagcggcaucgccgugagcaaggugcugcaccuggagggcgaggugaacaagaucaagaacgcccugcugagcaccaacaaggccguggugagccugagcaacggcgugagcgugcugaccagcaaggugcuggaccugaagaacuacaucgacaagcagcugcugcccaucgugaacaagcagagcugcagcaucagcaacaucgagaccgugaucgaguuccagcagaagaacaacagacugcuggagaucaccagagaguucagcgugaacgccggcgugaccacccccgugagcaccuacaugcugaccaacagcgagcugcugagccugaucaacgacaugcccaucaccaacgaccagaagaagcugaugagcaacaacgugcagaucgugagacagcagagcuacagcaucaugagcaucaucaaggaggaggugcuggccuacguggugcagcugccccuguacggcgugaucgacacccccugcuggaagcugcacaccagcccccugugcaccaccaacaccaaggagggcagcaacaucugccugaccagaaccgacagaggcugguacugcgacaacgccggcagcgugagcuucuucccccaggccgagaccugcaaggugcagagcaacagaguguucugcgacaccaugaacagccugacccugcccagcgaggugaaccugugcaacaucgacaucuucaaccccaaguacgacugcaagaucaugaccagcaagaccgacgugagcagcagcgugaucaccagccugggcgccaucgugagcugcuacggcaagaccaagugcaccgccagcaacaagaacagaggcaucaucaagaccuucagcaacggcugcgacuacgugagcaacaagggcguggacaccgugagcgugggcaacacccuguacuacgugaacaagcaggagggcaagagccuguacgugaagggcgagcccaucaucaacuucuacgacccccugguguuccccagcgacgaguucgacgccagcaucagccaggugaacgagaagaucaaccagagccuggccuucaucagaaagagcgacgagcugcugcacaacgugaacgugggcaagagcaccaccaacaucaugaucaccaccaucaucaucgugaucaucgugauccugcugcugcugaucgccgugggccuguuccuguacugcaaggccagaagcacccccgugacccugagcaaggaccagcugagcggcaucaacaacaucgccuucagcaacugaggacuagucccuguucccagagcccacuuuuuuuucuuuuuuugaaauaaaauagccugucuuucagaucuaaaaaaaaaaaaaaaaaaaaaaaaaaaaaaaaaaaaaaaaaaaaaaaaaaaaaaaaaaaaaaaaugcaucccccccccccccccccccccccccccccccaaaggcucuuuucagagccaccagaauu

SEQ ID NO: 11756 - RNA, 2098 nt, Artificial Sequence
  mRNA product Design a-3 comprising derived and/or modified sequence from HRSV(Memphis-37)__AIY60640.1__F0 (opt5)
gggagagggcgcuuggcuugcaaggacccugagcugcggcauugaagcacacccaacccaacucgacugaagucagccucacugaaccggaucugagaaucuucucucucugggcuugccagggcucuccgaaccuagcuagcauccucuucaauuccaacuagaaagcuuaccauggagcugcccauccucaagaccaacgccauuacaacgauccuggcugccgugacccuuugcuucgcgagcucccagaauauuacagaagaguuuuaccaaucuaccuguagcgcugucuccaaaggcuaucugucugcccucagaacagggugguacaccagcguuaucacaauugaacuguccaacaucaaggagaauaaaugcaacggaaccgacgccaaggugaaacuuaucaagcaggaacuggauaaguauaaaaaugcugugacggagcuccagcugcugaugcagucuaccccugccgcuaacaaucgggcccgcagagagcucccgcgguucaugaacuacacacugaauaacaccaagaauaacaaugucacacuuagcaaaaagcgcaaaagacgguuucugggcuuccuccugggggugggauccgcgauugccagcggcaucgcuguuucuaaggugcuucaccuggaaggggaggucaacaagauuaaaaaugcccuccuguccaccaacaaggcugugguuagccugucuaacggaguguccguccucacgagcaaagugcuggaccuuaagaauuauaucgauaaacaacugcuccccauugugaacaagcagucuuguuccaucagcaauauugaaacagucaucgaguuucagcagaaaaacaaucgccugcuugagaucaccagagaauuuuccguuaacgccggcgugacaaccccugugucuaccuacaugcugacaaauagcgagcuccugucccugauuaacgacaugcccaucacgaaugaucaaaagaagcucaugagcaacaauguccagauugugcggcagcagucuuauuccaucaugagcauuaucaaagaagagguucuggcguacgugguccaacuuccucuguacggcgugaucgacacccccugcuggaagcuccauacaucuccucuguguaccacaaacaccaaagaagggagcaauauuugccuuacgcgcacagauagaggaugguauugugacaacgccggcuccguuucuuucuucccgcaggcugagaccugcaaggugcagagcaaucgggucuuuugugauaccaugaacucccugacacuccccagcgaggugaaccugugcaauaucgacauuuucaacccuaaauacgauuguaagaucaugaccucuaagacagacgucuccagcucugugauuacgucccugggggccaucguuagcugcuauggaaaaaccaagugcacagcuuccaauaaaaaccgcggcaucauuaagaccuuuucuaaugggugugauuacgugagcaacaaaggagucgacacaguguccguuggcaauacccucuauuacgugaacaagcaagaaggcaagucucuguaugucaaaggggagcccaucauuaauuucuacgacccucuuguguuucccagcgaugaguucgacgccuccaucagccaggugaacgaaaagauuaaucagucucuggccuucaucagaaaauccgaugaacuccugcacaacguuaaugucggaaagagcacgaccaacauuaugaucacaaccaucauuaucgugauuaucgugauucugcuucuccugaucgcugucggccuguuucucuacugcaaagcgcggucuacaccggugacccuguccaaggaccagcuuagcgggaucaauaacauugccuucucuaacugaggacuagucccuguucccagagcccacuuuuuuuucuuuuuuugaaauaaaauagccugucuuucagaucuaaaaaaaaaaaaaaaaaaaaaaaaaaaaaaaaaaaaaaaaaaaaaaaaaaaaaaaaaaaaaaaaugcaucccccccccccccccccccccccccccccccaaaggcucuuuucagagccaccagaauu

SEQ ID NO: 11757 - RNA, 2098 nt, Artificial Sequence
  mRNA product Design a-3 comprising derived and/or modified sequence from HRSV(Memphis-37)__AIY60640.1__F0 (opt6)
gggagagggcgcuuggcuugcaaggacccugagcugcggcauugaagcacacccaacccaacucgacugaagucagccucacugaaccggaucugagaaucuucucucucugggcuugccagggcucuccgaaccuagcuagcauccucuucaauuccaacuagaaagcuuaccauggaacugccuauucuaaaaacaaaugccauaacaacaauucuugcagcaguaacauuauguuuugcaucaucacaaaacauuacagaagaauuuuaccaauccacuugcucagccguaucaaaaggauaccuaucagccuuaagaacagguugguacaccucaguaauaaccauagaacuaucaaacauaaaagaaaacaaaugcaaugguacugaugcaaaagucaaacuaaucaaacaagaacuggacaaauacaaaaaugcaguaaccgaacuacaacuccuaaugcaauccacaccugcagccaacaacagagcaagacgcgaacuaccaagauuuaugaauuacacauuaaacaacaccaagaacaacaauguaacucucucaaaaaaaagaaaaagacgcuuucuagguuuccuccuaggcgucggaucugcaauagccucaggaauagcaguaucaaaaguucuacaccuagaaggagaaguaaacaaaauuaaaaacgcauuacuaucaaccaacaaagcaguuguaucccuuucaaauggagucucuguacuuacaucaaaaguacucgaccuaaaaaacuauauagacaaacaacuacucccaauagucaauaagcaaucaugcagcauaucaaacauagaaacaguuauagaauuucaacaaaaaaacaacagacuacucgaaauaaccagagaauuuagcgucaacgcaggcguaaccacaccgguauccacauacaugcuuacaaacucagaacuccucucacuaauaaacgacaugccaauaacuaaugaccaaaaaaaacuaaugucaaacaauguccaaauaguccgucaacaaucauacucaauaaugucaauaauaaaagaagaaguauuagcauauguaguccaacuaccauuauacggcguuauagacacaccuuguuggaaacuucacacauccccacucuguacaaccaacacaaaagaagguuccaauauaugccuaacuagaaccgacagaggaugguauugcgacaacgcaggaucuguaucauucuuuccccaagcagaaacauguaaaguacaaaguaaccgcguauucugcgacaccaugaacucauuaacccucccauccgaaguuaauuuaugcaauauagacauauuuaauccuaaauacgacugcaaaauaaugacaucaaaaacagacguuaguuccuccguaaucacaucuuugggcgcaauagucucaugcuauggaaaaacaaaaugcacagccucaaacaaaaauagaggaauaauaaaaacauucagcaacggcugugauuauguauccaacaaaggaguagacacaguauccguaggcaauacccuuuacuacguuaauaaacaagaaggaaaaucauuauacgucaaaggagaaccuaucauaaauuucuacgacccauuaguauucccuucagacgaauuugaugccucaauaucccaagucaaugaaaaaaucaaccaaucacuagccuuuauccgcaaaucagacgaauuacuacacaacguaaacguaggcaaaucaacaacuaauauaaugauaacaacaauaauaauaguaauuauaguaauauuauuacuacuaaucgccguagguuuauucuuauacuguaaagcacgaucaacaccaguuacacucucaaaagaucaacuaucaggaauaaacaacauagcauuuuccaauuaaggacuagucccuguucccagagcccacuuuuuuuucuuuuuuugaaauaaaauagccugucuuucagaucuaaaaaaaaaaaaaaaaaaaaaaaaaaaaaaaaaaaaaaaaaaaaaaaaaaaaaaaaaaaaaaaaugcaucccccccccccccccccccccccccccccccaaaggcucuuuucagagccaccagaauu

SEQ ID NO: 11758 - RNA, 2098 nt, Artificial Sequence
  mRNA product Design a-3 comprising derived and/or modified sequence from HRSV(Memphis-37)__AIY60640.1__F0 (opt11)
gggagagggcgcuuggcuugcaaggacccugagcugcggcauugaagcacacccaacccaacucgacugaagucagccucacugaaccggaucugagaaucuucucucucugggcuugccagggcucuccgaaccuagcuagcauccucuucaauuccaacuagaaagcuuaccauggaacuccccauccucaaaacaaacgccauaaccacuauccucgccgccgucacccucugcuucgccuccucccaaaacaucacagaggaguucuaccaauccacaugcuccgccgucuccaaaggcuaccucagcgcccuacguaccggcugguacaccagcgucaucacaauagaacucuccaacaucaaggaaaacaaaugcaacggcaccgaugccaaaguaaaacucaucaaacaagaacucgauaaauacaaaaacgccgucaccgaacuacaacuccuaaugcaaagcacacccgccgccaacaacagagcacggcgcgaacugccccgcuucaugaacuacacccucaacaacaccaaaaauaacaacgucacccuauccaagaaacgcaaacgccgauuccucgguuuccuacucggcguaggaagcgccauagccucaggcaucgccgucuccaaaguccuccaucuggaaggcgaagucaacaaaaucaaaaacgcacucuuauccaccaacaaagccgucgucucccucucgaacggggucuccguccuuaccuccaaaguccucgaccuuaaaaacuacaucgacaaacaacuacuaccaauagucaauaaacaauccugcuccaucucaaacauagaaaccgucauagaguuccaacagaagaacaaucgccuccucgaaauaacucgcgaguucuccgucaacgcaggcgucacgaccccugucucaacauacaugcuaacuaacucagaacuccuaagccuaaucaacgacaugcccaucacaaacgaccaaaagaaacucaugagcaacaauguccagauagucagacagcaauccuauagcaucaugucuauaauaaaagaagaagugcucgccuacguaguccaacucccucuuuacggcgucauagacacacccugcuggaaacuccacacaucuccucucugcaccaccaacacaaaagaaggcagcaacaucugccugacccgaaccgaccgcggaugguacugcgacaacgcuggcuccgugucuuucuuuccccaagccgaaaccugcaaaguccaguccaaccgcgucuucugcgacacaaugaacucccucacccuacccuccgaaguuaaccucugcaacaucgacaucuucaauccaaaauacgacugcaaaaucaugaccucgaaaacggacguauccuccuccgucauaacaucacuuggagccaucguuagcugcuacggaaaaaccaaauguaccgccuccaacaaaaaccgcggaauaaucaaaacauucuccaacggcugcgacuacguaagcaacaaaggggucgauacugucuccguagguaacacccuauacuacgucaacaaacaagaaggaaaaucacuauacguuaaaggcgaacccauuaucaacuucuacgacccccucguuuucccauccgacgaguucgacgccuccauaagccaaguuaacgaaaagauaaaccaaucgcucgcauucauccgcaaauccgacgaacuccuacacaacgucaacgugggcaaauccacaacaaacaucaugaucaccaccaucauuaucgucauaauagucauccuccuccugcucaucgccgugggacuauuccuauacugcaaagcccgcucgacgcccgucacacuuuccaaagaccaacuaagcggaaucaacaacauagcguucagcaauuaaggacuagucccuguucccagagcccacuuuuuuuucuuuuuuugaaauaaaauagccugucuuucagaucuaaaaaaaaaaaaaaaaaaaaaaaaaaaaaaaaaaaaaaaaaaaaaaaaaaaaaaaaaaaaaaaaugcaucccccccccccccccccccccccccccccccaaaggcucuuuucagagccaccagaauu

SEQ ID NO: 11759 - RNA, 2047 nt, Artificial Sequence
  mRNA product Design a-4 comprising derived and/or modified sequence from HRSV(Memphis-37)__AIY60640.1__F0 (wt)
gggagacuccugucgggcggaaguaggaggaguagaguuuaaaaacaguacucuuuuuccgguucgggacguaguugaagcaacgacaagccggauaaccgcucuugagacaggaagcuuaccauggaguugccaauccucaaaacaaaugcaauuaccacaauccuugcugcagucacacucuguuucgcuuccagucaaaacaucacugaagaauuuuaucaaucaacaugcagugcaguuagcaaaggcuaucuuagugcuuuaagaacugguugguauacuaguguuauaacuauagaauuaaguaauaucaaggaaaauaaguguaauggaacagaugcuaagguaaaauugauaaaacaagaauuagauaaauauaaaaaugcuguaacagaauugcaguugcucaugcaaagcacaccagcagccaacaaucgagccagaagagaacuaccaagguuuaugaauuauacacucaacaauaccaaaaauaacaauguaacauuaagcaagaaaaggaaaagaagauuucuuggcuuuuuguuagguguuggaucugcaaucgccaguggcauugcuguaucuaaaguccugcaccuagaaggggaagugaacaaaaucaaaaaugcucuacuauccacaaacaaggcuguagucagcuuaucaaauggaguuagugucuuaaccagcaaaguguuagaccucaaaaacuauauagauaaacaguuguuacccauugugaacaagcaaagcugcagcauaucaaacauugaaacugugauagaauuccaacaaaagaacaacagacuacuagagauuaccagggaauuuaguguuaaugcagguguaacuacaccuguaagcacuuauauguuaacaaauagugaauuauuaucauuaaucaaugauaugccuauaacaaaugaucagaaaaaguuaauguccaacaauguucaaauaguuagacagcaaaguuacucuaucauguccauaauaaaggaggaagucuuagcauauguaguucaauuaccacuauaugguguaauagauacaccuuguuggaaacuacacacauccccucuaugcacaaccaacacaaaggaaggguccaacaucuguuuaacaagaaccgacagaggaugguacugugacaaugcaggaucagugucuuucuucccacaagcugaaacaugcaaaguucaaucgaaucgaguauuuugugacacaaugaacagucuaacauuaccaagugaaguaaaucucugcaacauugacauauucaacccuaaauaugauugcaaaauuaugacuucaaaaacagaugugagcagcuccguuaucacaucucuaggagccauugugucaugcuauggcaaaacuaaauguacagcauccaauaaaaaucguggaaucauaaagacauuuucuaacgggugugauuauguaucaaauaaggggguggacacuguaucuguagguaauacauuauauuauguaaauaagcaagaaggaaaaagccucuauguaaaaggugaaccaauaauaaauuucuaugacccauuaguguucccuucugaugaauuugaugcaucaauaucucaagucaaugagaagauuaaccagagccuagcauuuauucguaaauccgaugaauuauuacauaauguaaauguugguaaauccaccacaaauaucaugauaacuacuauaauuauagugauuauaguaauauuguuauuauuaauugcaguugggcuguuccuauacugcaaggccagaagcacaccagucacacuaagcaaggaucaacugagugguauaaauaauauugcauuuaguaacugaggacuagucccuguucccagagcccacuuuuuuuucuuuuuuugaaauaaaauagccugucuuucagaucuaaaaaaaaaaaaaaaaaaaaaaaaaaaaaaaaaaaaaaaaaaaaaaaaaaaaaaaaaaaaaaaaugcaucccccccccccccccccccccccccccccccaaaggcucuuuucagagccaccagaauu

SEQ ID NO: 11760 - RNA, 2047 nt, Artificial Sequence
  mRNA product Design a-4 comprising derived and/or modified sequence from HRSV(Memphis-37)__AIY60640.1__F0 (opt1)
gggagacuccugucgggcggaaguaggaggaguagaguuuaaaaacaguacucuuuuuccgguucgggacguaguugaagcaacgacaagccggauaaccgcucuugagacaggaagcuuaccauggagcugcccauccucaagaccaacgccaucaccacgauccuggccgcggugacccugugcuucgccagcucccagaacaucaccgaggaguucuaccagagcacgugcuccgccgucagcaagggcuaccucuccgcccugcgcaccgggugguacaccagcgugaucaccaucgagcuguccaacaucaaggagaacaagugcaacggcaccgacgccaaggugaagcucaucaagcaggagcuggacaaguacaagaacgcggucacggagcugcagcuccugaugcagagcaccccggccgccaacaaccgggcccgccgggagcugccccgcuucaugaacuacacccucaacaacaccaagaacaacaacgugacgcuguccaagaagcggaagcgccgguuccugggguuccuccugggcguggggagcgcgaucgccuccggcaucgccgucagcaaggugcugcaccucgagggcgaggugaacaagaucaagaacgcccugcuguccaccaacaaggccgucgugagccucuccaacggggugagcguccugaccuccaaggugcuggaccucaagaacuacaucgacaagcagcugcugcccaucgugaacaagcagagcugcuccaucagcaacaucgagaccgucaucgaguuccagcagaagaacaaccgccuccuggagaucacgcgggaguucagcgugaacgcgggcgugaccacccccgucuccaccuacaugcugacgaacagcgagcuccugucccugaucaacgacaugccgaucaccaacgaccagaagaagcucaugagcaacaacgugcagaucgugcgccagcaguccuacagcaucauguccaucaucaaggaggagguccuggccuacguggugcagcugccccucuacggggucaucgacacccccugcuggaagcugcacaccagcccccugugcacgaccaacaccaaggagggcuccaacaucugccucacccggacggaccgcgggugguacugcgacaacgccggcagcguguccuucuucccgcaggccgagaccugcaagguccagagcaaccggguguucugcgacaccaugaacucccugacccugcccagcgaggugaaccucugcaacaucgacaucuucaaccccaaguacgacugcaagaucaugacguccaagaccgacgucagcuccagcgugaucaccucccugggcgccaucgugagcugcuacgggaagaccaagugcacggcgagcaacaagaaccgcggcaucaucaagaccuucuccaacgggugcgacuacgucagcaacaagggcguggacaccguguccgucggcaacacccuguacuacgugaacaagcaggagggcaagagccucuacgugaagggggagcccaucaucaacuucuacgacccgcuggucuuccccuccgacgaguucgacgccagcaucucccaggugaacgagaagaucaaccagagccuggccuucauccggaaguccgacgagcuccugcacaacgugaacgucggcaagagcaccacgaacaucaugaucaccaccaucaucaucgugaucaucgugauccugcugcuccugaucgccgucgggcuguuccucuacugcaaggcccgcuccacccccgugacgcugagcaaggaccagcuguccgggaucaacaacaucgcguucagcaacugaggacuagucccuguucccagagcccacuuuuuuuucuuuuuuugaaauaaaauagccugucuuucagaucuaaaaaaaaaaaaaaaaaaaaaaaaaaaaaaaaaaaaaaaaaaaaaaaaaaaaaaaaaaaaaaaaugcaucccccccccccccccccccccccccccccccaaaggcucuuuucagagccaccagaauu

SEQ ID NO: 11761 - RNA, 2047 nt, Artificial Sequence
  mRNA product Design a-4 comprising derived and/or modified sequence from HRSV(Memphis-37)__AIY60640.1__F0 (opt2)
gggagacuccugucgggcggaaguaggaggaguagaguuuaaaaacaguacucuuuuuccgguucgggacguaguugaagcaacgacaagccggauaaccgcucuugagacaggaagcuuaccauggagcuccccauccucaagaccaacgccaucaccaccauccucgccgccgucacccucugcuucgccuccucccagaacaucaccgaggaguucuaccaguccaccugcuccgccgucuccaagggcuaccucuccgcccuccgcaccggcugguacaccuccgucaucaccaucgagcucuccaacaucaaggagaacaagugcaacggcaccgacgccaaggucaagcucaucaagcaggagcucgacaaguacaagaacgccgucaccgagcuccagcuccucaugcaguccacccccgccgccaacaaccgcgcccgccgcgagcucccccgcuucaugaacuacacccucaacaacaccaagaacaacaacgucacccucuccaagaagcgcaagcgccgcuuccucggcuuccuccucggcgucggcuccgccaucgccuccggcaucgccgucuccaagguccuccaccucgagggcgaggucaacaagaucaagaacgcccuccucuccaccaacaaggccgucgucucccucuccaacggcgucuccguccucaccuccaagguccucgaccucaagaacuacaucgacaagcagcuccuccccaucgucaacaagcaguccugcuccaucuccaacaucgagaccgucaucgaguuccagcagaagaacaaccgccuccucgagaucacccgcgaguucuccgucaacgccggcgucaccacccccgucuccaccuacaugcucaccaacuccgagcuccucucccucaucaacgacaugcccaucaccaacgaccagaagaagcucauguccaacaacguccagaucguccgccagcaguccuacuccaucauguccaucaucaaggaggagguccucgccuacgucguccagcucccccucuacggcgucaucgacacccccugcuggaagcuccacaccuccccccucugcaccaccaacaccaaggagggcuccaacaucugccucacccgcaccgaccgcggcugguacugcgacaacgccggcuccgucuccuucuucccccaggccgagaccugcaagguccaguccaaccgcgucuucugcgacaccaugaacucccucacccuccccuccgaggucaaccucugcaacaucgacaucuucaaccccaaguacgacugcaagaucaugaccuccaagaccgacgucuccuccuccgucaucaccucccucggcgccaucgucuccugcuacggcaagaccaagugcaccgccuccaacaagaaccgcggcaucaucaagaccuucuccaacggcugcgacuacgucuccaacaagggcgucgacaccgucuccgucggcaacacccucuacuacgucaacaagcaggagggcaagucccucuacgucaagggcgagcccaucaucaacuucuacgacccccucgucuuccccuccgacgaguucgacgccuccaucucccaggucaacgagaagaucaaccagucccucgccuucauccgcaaguccgacgagcuccuccacaacgucaacgucggcaaguccaccaccaacaucaugaucaccaccaucaucaucgucaucaucgucauccuccuccuccucaucgccgucggccucuuccucuacugcaaggcccgcuccacccccgucacccucuccaaggaccagcucuccggcaucaacaacaucgccuucuccaacugaggacuagucccuguucccagagcccacuuuuuuuucuuuuuuugaaauaaaauagccugucuuucagaucuaaaaaaaaaaaaaaaaaaaaaaaaaaaaaaaaaaaaaaaaaaaaaaaaaaaaaaaaaaaaaaaaugcaucccccccccccccccccccccccccccccccaaaggcucuuuucagagccaccagaauu

SEQ ID NO: 11762 - RNA, 2047 nt, Artificial Sequence
  mRNA product Design a-4 comprising derived and/or modified sequence from HRSV(Memphis-37)__AIY60640.1__F0 (opt3)
gggagacuccugucgggcggaaguaggaggaguagaguuuaaaaacaguacucuuuuuccgguucgggacguaguugaagcaacgacaagccggauaaccgcucuugagacaggaagcuuaccauggagcugcccauccucaagaccaacgccauuacaacuauacuugcugcagugacgcugugcuucgccagcucccagaauaucaccgaagaguuuuaccaaucuacauguucagcggucaguaaaggcuauuugagcgcuuuaagaacugggugguacaccuccguuauuacaaucgaacugucuaacauuaaggagaauaaaugcaacggaaccgacgccaaggugaaacuaaucaagcaggaacucgauaaguauaaaaaugcaguaacugagcugcagcuucugaugcagucgaccccugccgcuaacaauagggcacggcgcgaguugccacgauucaugaacuacacacucaauaacacgaagaauaacaaugugacucugagcaaaaagcguaaaagaagguuucuggguuuccucuuaggcgucgggucagccauagcuaguggaaucgccguguccaagguucugcaccuugaaggcgaggugaacaagauuaaaaaugcguugcugucuaccaacaaggcagucgugagccuauccaacgguguaucaguucucacaaguaaagugcuggaccuuaagaauuauaucgauaaacaacuguugccgauugucaacaagcagagcuguucuaucuccaauauagaaacugugauugaguuucagcagaaaaacaaucggcuccuggagaucacccgcgaguucucagugaacgccggggucacaacccccguuagcacguacauguuaacuaauagugaacugcucucucuuauuaacgacaugccuaucacaaaugaucaaaagaagcugauguccaacaaugugcagaucguaagacagcagagcuauucgauuaugucuauaaucaaagaagagguguuggcuuacgucgugcaacuaccacuguacggaguuauugacacccccugcuggaagcuccauacuuccccucuguguacaaccaacacgaaagaaggcucaaauaucugccuuaccaggacagaucggggcugguauugugacaacgccgggagugugagcuuuuucccacaggcagagacuugcaagguccaguccaaucgcguguuuugugauaccaugaacucucugacauugcccagcgagguaaaccucugcaauauagacauuuucaacccuaaauacgauuguaagaucaugacuucaaagaccgacguuaguuccagcgugaucacaucucugggagcuauugucucaugcuaugguaaaaccaagugcacugccaguaauaaaaaccgaggcaucauuaagacguuuagcaaugggugugauuacguguccaacaaaggagucgacacagugucuguuggcaauaccuuauauuacgugaacaagcaagaagguaagucgcuguauguaaaaggggagccaauaaucaauuucuacgacccgcuagucuuucccagcgaugaguucgacgcguccauuucacaggugaacgaaaagaucaaucagagucucgccuucaucagaaaaucugaugaacugcuucacaacguuaaugugggaaagagcacuaccaacauuaugauaacaaccaucauuaucgucauuaucgugauauugcugcuccugaucgcaguaggccuuuuucuguacugcaaagcuagguccacuccugugacauugucaaaggaccagcucagcggcauuaauaacaucgccuucucuaacugaggacuagucccuguucccagagcccacuuuuuuuucuuuuuuugaaauaaaauagccugucuuucagaucuaaaaaaaaaaaaaaaaaaaaaaaaaaaaaaaaaaaaaaaaaaaaaaaaaaaaaaaaaaaaaaaaugcaucccccccccccccccccccccccccccccccaaaggcucuuuucagagccaccagaauu

SEQ ID NO: 11763 - RNA, 2047 nt, Artificial Sequence
  mRNA product Design a-4 comprising derived and/or modified sequence from HRSV(Memphis-37)__AIY60640.1__F0 (opt4)
gggagacuccugucgggcggaaguaggaggaguagaguuuaaaaacaguacucuuuuuccgguucgggacguaguugaagcaacgacaagccggauaaccgcucuugagacaggaagcuuaccauggagcugcccauccugaagaccaacgccaucaccaccauccuggccgccgugacccugugcuucgccagcagccagaacaucaccgaggaguucuaccagagcaccugcagcgccgugagcaagggcuaccugagcgcccugagaaccggcugguacaccagcgugaucaccaucgagcugagcaacaucaaggagaacaagugcaacggcaccgacgccaaggugaagcugaucaagcaggagcuggacaaguacaagaacgccgugaccgagcugcagcugcugaugcagagcacccccgccgccaacaacagagccagaagagagcugcccagauucaugaacuacacccugaacaacaccaagaacaacaacgugacccugagcaagaagagaaagagaagauuccugggcuuccugcugggcgugggcagcgccaucgccagcggcaucgccgugagcaaggugcugcaccuggagggcgaggugaacaagaucaagaacgcccugcugagcaccaacaaggccguggugagccugagcaacggcgugagcgugcugaccagcaaggugcuggaccugaagaacuacaucgacaagcagcugcugcccaucgugaacaagcagagcugcagcaucagcaacaucgagaccgugaucgaguuccagcagaagaacaacagacugcuggagaucaccagagaguucagcgugaacgccggcgugaccacccccgugagcaccuacaugcugaccaacagcgagcugcugagccugaucaacgacaugcccaucaccaacgaccagaagaagcugaugagcaacaacgugcagaucgugagacagcagagcuacagcaucaugagcaucaucaaggaggaggugcuggccuacguggugcagcugccccuguacggcgugaucgacacccccugcuggaagcugcacaccagcccccugugcaccaccaacaccaaggagggcagcaacaucugccugaccagaaccgacagaggcugguacugcgacaacgccggcagcgugagcuucuucccccaggccgagaccugcaaggugcagagcaacagaguguucugcgacaccaugaacagccugacccugcccagcgaggugaaccugugcaacaucgacaucuucaaccccaaguacgacugcaagaucaugaccagcaagaccgacgugagcagcagcgugaucaccagccugggcgccaucgugagcugcuacggcaagaccaagugcaccgccagcaacaagaacagaggcaucaucaagaccuucagcaacggcugcgacuacgugagcaacaagggcguggacaccgugagcgugggcaacacccuguacuacgugaacaagcaggagggcaagagccuguacgugaagggcgagcccaucaucaacuucuacgacccccugguguuccccagcgacgaguucgacgccagcaucagccaggugaacgagaagaucaaccagagccuggccuucaucagaaagagcgacgagcugcugcacaacgugaacgugggcaagagcaccaccaacaucaugaucaccaccaucaucaucgugaucaucgugauccugcugcugcugaucgccgugggccuguuccuguacugcaaggccagaagcacccccgugacccugagcaaggaccagcugagcggcaucaacaacaucgccuucagcaacugaggacuagucccuguucccagagcccacuuuuuuuucuuuuuuugaaauaaaauagccugucuuucagaucuaaaaaaaaaaaaaaaaaaaaaaaaaaaaaaaaaaaaaaaaaaaaaaaaaaaaaaaaaaaaaaaaugcaucccccccccccccccccccccccccccccccaaaggcucuuuucagagccaccagaauu

SEQ ID NO: 11764 - RNA, 2047 nt, Artificial Sequence
  mRNA product Design a-4 comprising derived and/or modified sequence from HRSV(Memphis-37)__AIY60640.1__F0 (opt5)
gggagacuccugucgggcggaaguaggaggaguagaguuuaaaaacaguacucuuuuuccgguucgggacguaguugaagcaacgacaagccggauaaccgcucuugagacaggaagcuuaccauggagcugcccauccucaagaccaacgccauuacaacgauccuggcugccgugacccuuugcuucgcgagcucccagaauauuacagaagaguuuuaccaaucuaccuguagcgcugucuccaaaggcuaucugucugcccucagaacagggugguacaccagcguuaucacaauugaacuguccaacaucaaggagaauaaaugcaacggaaccgacgccaaggugaaacuuaucaagcaggaacuggauaaguauaaaaaugcugugacggagcuccagcugcugaugcagucuaccccugccgcuaacaaucgggcccgcagagagcucccgcgguucaugaacuacacacugaauaacaccaagaauaacaaugucacacuuagcaaaaagcgcaaaagacgguuucugggcuuccuccugggggugggauccgcgauugccagcggcaucgcuguuucuaaggugcuucaccuggaaggggaggucaacaagauuaaaaaugcccuccuguccaccaacaaggcugugguuagccugucuaacggaguguccguccucacgagcaaagugcuggaccuuaagaauuauaucgauaaacaacugcuccccauugugaacaagcagucuuguuccaucagcaauauugaaacagucaucgaguuucagcagaaaaacaaucgccugcuugagaucaccagagaauuuuccguuaacgccggcgugacaaccccugugucuaccuacaugcugacaaauagcgagcuccugucccugauuaacgacaugcccaucacgaaugaucaaaagaagcucaugagcaacaauguccagauugugcggcagcagucuuauuccaucaugagcauuaucaaagaagagguucuggcguacgugguccaacuuccucuguacggcgugaucgacacccccugcuggaagcuccauacaucuccucuguguaccacaaacaccaaagaagggagcaauauuugccuuacgcgcacagauagaggaugguauugugacaacgccggcuccguuucuuucuucccgcaggcugagaccugcaaggugcagagcaaucgggucuuuugugauaccaugaacucccugacacuccccagcgaggugaaccugugcaauaucgacauuuucaacccuaaauacgauuguaagaucaugaccucuaagacagacgucuccagcucugugauuacgucccugggggccaucguuagcugcuauggaaaaaccaagugcacagcuuccaauaaaaaccgcggcaucauuaagaccuuuucuaaugggugugauuacgugagcaacaaaggagucgacacaguguccguuggcaauacccucuauuacgugaacaagcaagaaggcaagucucuguaugucaaaggggagcccaucauuaauuucuacgacccucuuguguuucccagcgaugaguucgacgccuccaucagccaggugaacgaaaagauuaaucagucucuggccuucaucagaaaauccgaugaacuccugcacaacguuaaugucggaaagagcacgaccaacauuaugaucacaaccaucauuaucgugauuaucgugauucugcuucuccugaucgcugucggccuguuucucuacugcaaagcgcggucuacaccggugacccuguccaaggaccagcuuagcgggaucaauaacauugccuucucuaacugaggacuagucccuguucccagagcccacuuuuuuuucuuuuuuugaaauaaaauagccugucuuucagaucuaaaaaaaaaaaaaaaaaaaaaaaaaaaaaaaaaaaaaaaaaaaaaaaaaaaaaaaaaaaaaaaaugcaucccccccccccccccccccccccccccccccaaaggcucuuuucagagccaccagaauu

SEQ ID NO: 11765 - RNA, 2047 nt, Artificial Sequence
  mRNA product Design a-4 comprising derived and/or modified sequence from HRSV(Memphis-37)__AIY60640.1__F0 (opt6)
gggagacuccugucgggcggaaguaggaggaguagaguuuaaaaacaguacucuuuuuccgguucgggacguaguugaagcaacgacaagccggauaaccgcucuugagacaggaagcuuaccauggaacugccuauucuaaaaacaaaugccauaacaacaauucuugcagcaguaacauuauguuuugcaucaucacaaaacauuacagaagaauuuuaccaauccacuugcucagccguaucaaaaggauaccuaucagccuuaagaacagguugguacaccucaguaauaaccauagaacuaucaaacauaaaagaaaacaaaugcaaugguacugaugcaaaagucaaacuaaucaaacaagaacuggacaaauacaaaaaugcaguaaccgaacuacaacuccuaaugcaauccacaccugcagccaacaacagagcaagacgcgaacuaccaagauuuaugaauuacacauuaaacaacaccaagaacaacaauguaacucucucaaaaaaaagaaaaagacgcuuucuagguuuccuccuaggcgucggaucugcaauagccucaggaauagcaguaucaaaaguucuacaccuagaaggagaaguaaacaaaauuaaaaacgcauuacuaucaaccaacaaagcaguuguaucccuuucaaauggagucucuguacuuacaucaaaaguacucgaccuaaaaaacuauauagacaaacaacuacucccaauagucaauaagcaaucaugcagcauaucaaacauagaaacaguuauagaauuucaacaaaaaaacaacagacuacucgaaauaaccagagaauuuagcgucaacgcaggcguaaccacaccgguauccacauacaugcuuacaaacucagaacuccucucacuaauaaacgacaugccaauaacuaaugaccaaaaaaaacuaaugucaaacaauguccaaauaguccgucaacaaucauacucaauaaugucaauaauaaaagaagaaguauuagcauauguaguccaacuaccauuauacggcguuauagacacaccuuguuggaaacuucacacauccccacucuguacaaccaacacaaaagaagguuccaauauaugccuaacuagaaccgacagaggaugguauugcgacaacgcaggaucuguaucauucuuuccccaagcagaaacauguaaaguacaaaguaaccgcguauucugcgacaccaugaacucauuaacccucccauccgaaguuaauuuaugcaauauagacauauuuaauccuaaauacgacugcaaaauaaugacaucaaaaacagacguuaguuccuccguaaucacaucuuugggcgcaauagucucaugcuauggaaaaacaaaaugcacagccucaaacaaaaauagaggaauaauaaaaacauucagcaacggcugugauuauguauccaacaaaggaguagacacaguauccguaggcaauacccuuuacuacguuaauaaacaagaaggaaaaucauuauacgucaaaggagaaccuaucauaaauuucuacgacccauuaguauucccuucagacgaauuugaugccucaauaucccaagucaaugaaaaaaucaaccaaucacuagccuuuauccgcaaaucagacgaauuacuacacaacguaaacguaggcaaaucaacaacuaauauaaugauaacaacaauaauaauaguaauuauaguaauauuauuacuacuaaucgccguagguuuauucuuauacuguaaagcacgaucaacaccaguuacacucucaaaagaucaacuaucaggaauaaacaacauagcauuuuccaauuaaggacuagucccuguucccagagcccacuuuuuuuucuuuuuuugaaauaaaauagccugucuuucagaucuaaaaaaaaaaaaaaaaaaaaaaaaaaaaaaaaaaaaaaaaaaaaaaaaaaaaaaaaaaaaaaaaugcaucccccccccccccccccccccccccccccccaaaggcucuuuucagagccaccagaauu

SEQ ID NO: 11766 - RNA, 2047 nt, Artificial Sequence
  mRNA product Design a-4 comprising derived and/or modified sequence from HRSV(Memphis-37)__AIY60640.1__F0 (opt11)
gggagacuccugucgggcggaaguaggaggaguagaguuuaaaaacaguacucuuuuuccgguucgggacguaguugaagcaacgacaagccggauaaccgcucuugagacaggaagcuuaccauggaacuccccauccucaaaacaaacgccauaaccacuauccucgccgccgucacccucugcuucgccuccucccaaaacaucacagaggaguucuaccaauccacaugcuccgccgucuccaaaggcuaccucagcgcccuacguaccggcugguacaccagcgucaucacaauagaacucuccaacaucaaggaaaacaaaugcaacggcaccgaugccaaaguaaaacucaucaaacaagaacucgauaaauacaaaaacgccgucaccgaacuacaacuccuaaugcaaagcacacccgccgccaacaacagagcacggcgcgaacugccccgcuucaugaacuacacccucaacaacaccaaaaauaacaacgucacccuauccaagaaacgcaaacgccgauuccucgguuuccuacucggcguaggaagcgccauagccucaggcaucgccgucuccaaaguccuccaucuggaaggcgaagucaacaaaaucaaaaacgcacucuuauccaccaacaaagccgucgucucccucucgaacggggucuccguccuuaccuccaaaguccucgaccuuaaaaacuacaucgacaaacaacuacuaccaauagucaauaaacaauccugcuccaucucaaacauagaaaccgucauagaguuccaacagaagaacaaucgccuccucgaaauaacucgcgaguucuccgucaacgcaggcgucacgaccccugucucaacauacaugcuaacuaacucagaacuccuaagccuaaucaacgacaugcccaucacaaacgaccaaaagaaacucaugagcaacaauguccagauagucagacagcaauccuauagcaucaugucuauaauaaaagaagaagugcucgccuacguaguccaacucccucuuuacggcgucauagacacacccugcuggaaacuccacacaucuccucucugcaccaccaacacaaaagaaggcagcaacaucugccugacccgaaccgaccgcggaugguacugcgacaacgcuggcuccgugucuuucuuuccccaagccgaaaccugcaaaguccaguccaaccgcgucuucugcgacacaaugaacucccucacccuacccuccgaaguuaaccucugcaacaucgacaucuucaauccaaaauacgacugcaaaaucaugaccucgaaaacggacguauccuccuccgucauaacaucacuuggagccaucguuagcugcuacggaaaaaccaaauguaccgccuccaacaaaaaccgcggaauaaucaaaacauucuccaacggcugcgacuacguaagcaacaaaggggucgauacugucuccguagguaacacccuauacuacgucaacaaacaagaaggaaaaucacuauacguuaaaggcgaacccauuaucaacuucuacgacccccucguuuucccauccgacgaguucgacgccuccauaagccaaguuaacgaaaagauaaaccaaucgcucgcauucauccgcaaauccgacgaacuccuacacaacgucaacgugggcaaauccacaacaaacaucaugaucaccaccaucauuaucgucauaauagucauccuccuccugcucaucgccgugggacuauuccuauacugcaaagcccgcucgacgcccgucacacuuuccaaagaccaacuaagcggaaucaacaacauagcguucagcaauuaaggacuagucccuguucccagagcccacuuuuuuuucuuuuuuugaaauaaaauagccugucuuucagaucuaaaaaaaaaaaaaaaaaaaaaaaaaaaaaaaaaaaaaaaaaaaaaaaaaaaaaaaaaaaaaaaaugcaucccccccccccccccccccccccccccccccaaaggcucuuuucagagccaccagaauu

SEQ ID NO: 11767 - RNA, 1993 nt, Artificial Sequence
  mRNA product Design a-5 comprising derived and/or modified sequence from HRSV(Memphis-37)__AIY60640.1__F0 (wt)
gggagacuuucccauucuguagcagaauuugguguugccuguggucuuggucccgcggagaagcuuaccauggaguugccaauccucaaaacaaaugcaauuaccacaauccuugcugcagucacacucuguuucgcuuccagucaaaacaucacugaagaauuuuaucaaucaacaugcagugcaguuagcaaaggcuaucuuagugcuuuaagaacugguugguauacuaguguuauaacuauagaauuaaguaauaucaaggaaaauaaguguaauggaacagaugcuaagguaaaauugauaaaacaagaauuagauaaauauaaaaaugcuguaacagaauugcaguugcucaugcaaagcacaccagcagccaacaaucgagccagaagagaacuaccaagguuuaugaauuauacacucaacaauaccaaaaauaacaauguaacauuaagcaagaaaaggaaaagaagauuucuuggcuuuuuguuagguguuggaucugcaaucgccaguggcauugcuguaucuaaaguccugcaccuagaaggggaagugaacaaaaucaaaaaugcucuacuauccacaaacaaggcuguagucagcuuaucaaauggaguuagugucuuaaccagcaaaguguuagaccucaaaaacuauauagauaaacaguuguuacccauugugaacaagcaaagcugcagcauaucaaacauugaaacugugauagaauuccaacaaaagaacaacagacuacuagagauuaccagggaauuuaguguuaaugcagguguaacuacaccuguaagcacuuauauguuaacaaauagugaauuauuaucauuaaucaaugauaugccuauaacaaaugaucagaaaaaguuaauguccaacaauguucaaauaguuagacagcaaaguuacucuaucauguccauaauaaaggaggaagucuuagcauauguaguucaauuaccacuauaugguguaauagauacaccuuguuggaaacuacacacauccccucuaugcacaaccaacacaaaggaaggguccaacaucuguuuaacaagaaccgacagaggaugguacugugacaaugcaggaucagugucuuucuucccacaagcugaaacaugcaaaguucaaucgaaucgaguauuuugugacacaaugaacagucuaacauuaccaagugaaguaaaucucugcaacauugacauauucaacccuaaauaugauugcaaaauuaugacuucaaaaacagaugugagcagcuccguuaucacaucucuaggagccauugugucaugcuauggcaaaacuaaauguacagcauccaauaaaaaucguggaaucauaaagacauuuucuaacgggugugauuauguaucaaauaaggggguggacacuguaucuguagguaauacauuauauuauguaaauaagcaagaaggaaaaagccucuauguaaaaggugaaccaauaauaaauuucuaugacccauuaguguucccuucugaugaauuugaugcaucaauaucucaagucaaugagaagauuaaccagagccuagcauuuauucguaaauccgaugaauuauuacauaauguaaauguugguaaauccaccacaaauaucaugauaacuacuauaauuauagugauuauaguaauauuguuauuauuaauugcaguugggcuguuccuauacugcaaggccagaagcacaccagucacacuaagcaaggaucaacugagugguauaaauaauauugcauuuaguaacugaggacuagucccuguucccagagcccacuuuuuuuucuuuuuuugaaauaaaauagccugucuuucagaucuaaaaaaaaaaaaaaaaaaaaaaaaaaaaaaaaaaaaaaaaaaaaaaaaaaaaaaaaaaaaaaaaugcaucccccccccccccccccccccccccccccccaaaggcucuuuucagagccaccagaauu

SEQ ID NO: 11768 - RNA, 1993 nt, Artificial Sequence
  mRNA product Design a-5 comprising derived and/or modified sequence from HRSV(Memphis-37)__AIY60640.1__F0 (opt1)
gggagacuuucccauucuguagcagaauuugguguugccuguggucuuggucccgcggagaagcuuaccauggagcugcccauccucaagaccaacgccaucaccacgauccuggccgcggugacccugugcuucgccagcucccagaacaucaccgaggaguucuaccagagcacgugcuccgccgucagcaagggcuaccucuccgcccugcgcaccgggugguacaccagcgugaucaccaucgagcuguccaacaucaaggagaacaagugcaacggcaccgacgccaaggugaagcucaucaagcaggagcuggacaaguacaagaacgcggucacggagcugcagcuccugaugcagagcaccccggccgccaacaaccgggcccgccgggagcugccccgcuucaugaacuacacccucaacaacaccaagaacaacaacgugacgcuguccaagaagcggaagcgccgguuccugggguuccuccugggcguggggagcgcgaucgccuccggcaucgccgucagcaaggugcugcaccucgagggcgaggugaacaagaucaagaacgcccugcuguccaccaacaaggccgucgugagccucuccaacggggugagcguccugaccuccaaggugcuggaccucaagaacuacaucgacaagcagcugcugcccaucgugaacaagcagagcugcuccaucagcaacaucgagaccgucaucgaguuccagcagaagaacaaccgccuccuggagaucacgcgggaguucagcgugaacgcgggcgugaccacccccgucuccaccuacaugcugacgaacagcgagcuccugucccugaucaacgacaugccgaucaccaacgaccagaagaagcucaugagcaacaacgugcagaucgugcgccagcaguccuacagcaucauguccaucaucaaggaggagguccuggccuacguggugcagcugccccucuacggggucaucgacacccccugcuggaagcugcacaccagcccccugugcacgaccaacaccaaggagggcuccaacaucugccucacccggacggaccgcgggugguacugcgacaacgccggcagcguguccuucuucccgcaggccgagaccugcaagguccagagcaaccggguguucugcgacaccaugaacucccugacccugcccagcgaggugaaccucugcaacaucgacaucuucaaccccaaguacgacugcaagaucaugacguccaagaccgacgucagcuccagcgugaucaccucccugggcgccaucgugagcugcuacgggaagaccaagugcacggcgagcaacaagaaccgcggcaucaucaagaccuucuccaacgggugcgacuacgucagcaacaagggcguggacaccguguccgucggcaacacccuguacuacgugaacaagcaggagggcaagagccucuacgugaagggggagcccaucaucaacuucuacgacccgcuggucuuccccuccgacgaguucgacgccagcaucucccaggugaacgagaagaucaaccagagccuggccuucauccggaaguccgacgagcuccugcacaacgugaacgucggcaagagcaccacgaacaucaugaucaccaccaucaucaucgugaucaucgugauccugcugcuccugaucgccgucgggcuguuccucuacugcaaggcccgcuccacccccgugacgcugagcaaggaccagcuguccgggaucaacaacaucgcguucagcaacugaggacuagucccuguucccagagcccacuuuuuuuucuuuuuuugaaauaaaauagccugucuuucagaucuaaaaaaaaaaaaaaaaaaaaaaaaaaaaaaaaaaaaaaaaaaaaaaaaaaaaaaaaaaaaaaaaugcaucccccccccccccccccccccccccccccccaaaggcucuuuucagagccaccagaauu

SEQ ID NO: 11769 - RNA, 1993 nt, Artificial Sequence
  mRNA product Design a-5 comprising derived and/or modified sequence from HRSV(Memphis-37)__AIY60640.1__F0 (opt2)
gggagacuuucccauucuguagcagaauuugguguugccuguggucuuggucccgcggagaagcuuaccauggagcuccccauccucaagaccaacgccaucaccaccauccucgccgccgucacccucugcuucgccuccucccagaacaucaccgaggaguucuaccaguccaccugcuccgccgucuccaagggcuaccucuccgcccuccgcaccggcugguacaccuccgucaucaccaucgagcucuccaacaucaaggagaacaagugcaacggcaccgacgccaaggucaagcucaucaagcaggagcucgacaaguacaagaacgccgucaccgagcuccagcuccucaugcaguccacccccgccgccaacaaccgcgcccgccgcgagcucccccgcuucaugaacuacacccucaacaacaccaagaacaacaacgucacccucuccaagaagcgcaagcgccgcuuccucggcuuccuccucggcgucggcuccgccaucgccuccggcaucgccgucuccaagguccuccaccucgagggcgaggucaacaagaucaagaacgcccuccucuccaccaacaaggccgucgucucccucuccaacggcgucuccguccucaccuccaagguccucgaccucaagaacuacaucgacaagcagcuccuccccaucgucaacaagcaguccugcuccaucuccaacaucgagaccgucaucgaguuccagcagaagaacaaccgccuccucgagaucacccgcgaguucuccgucaacgccggcgucaccacccccgucuccaccuacaugcucaccaacuccgagcuccucucccucaucaacgacaugcccaucaccaacgaccagaagaagcucauguccaacaacguccagaucguccgccagcaguccuacuccaucauguccaucaucaaggaggagguccucgccuacgucguccagcucccccucuacggcgucaucgacacccccugcuggaagcuccacaccuccccccucugcaccaccaacaccaaggagggcuccaacaucugccucacccgcaccgaccgcggcugguacugcgacaacgccggcuccgucuccuucuucccccaggccgagaccugcaagguccaguccaaccgcgucuucugcgacaccaugaacucccucacccuccccuccgaggucaaccucugcaacaucgacaucuucaaccccaaguacgacugcaagaucaugaccuccaagaccgacgucuccuccuccgucaucaccucccucggcgccaucgucuccugcuacggcaagaccaagugcaccgccuccaacaagaaccgcggcaucaucaagaccuucuccaacggcugcgacuacgucuccaacaagggcgucgacaccgucuccgucggcaacacccucuacuacgucaacaagcaggagggcaagucccucuacgucaagggcgagcccaucaucaacuucuacgacccccucgucuuccccuccgacgaguucgacgccuccaucucccaggucaacgagaagaucaaccagucccucgccuucauccgcaaguccgacgagcuccuccacaacgucaacgucggcaaguccaccaccaacaucaugaucaccaccaucaucaucgucaucaucgucauccuccuccuccucaucgccgucggccucuuccucuacugcaaggcccgcuccacccccgucacccucuccaaggaccagcucuccggcaucaacaacaucgccuucuccaacugaggacuagucccuguucccagagcccacuuuuuuuucuuuuuuugaaauaaaauagccugucuuucagaucuaaaaaaaaaaaaaaaaaaaaaaaaaaaaaaaaaaaaaaaaaaaaaaaaaaaaaaaaaaaaaaaaugcaucccccccccccccccccccccccccccccccaaaggcucuuuucagagccaccagaauu

SEQ ID NO: 11770 - RNA, 1993 nt, Artificial Sequence
  mRNA product Design a-5 comprising derived and/or modified sequence from HRSV(Memphis-37)__AIY60640.1__F0 (opt3)
gggagacuuucccauucuguagcagaauuugguguugccuguggucuuggucccgcggagaagcuuaccauggagcugcccauccucaagaccaacgccauuacaacuauacuugcugcagugacgcugugcuucgccagcucccagaauaucaccgaagaguuuuaccaaucuacauguucagcggucaguaaaggcuauuugagcgcuuuaagaacugggugguacaccuccguuauuacaaucgaacugucuaacauuaaggagaauaaaugcaacggaaccgacgccaaggugaaacuaaucaagcaggaacucgauaaguauaaaaaugcaguaacugagcugcagcuucugaugcagucgaccccugccgcuaacaauagggcacggcgcgaguugccacgauucaugaacuacacacucaauaacacgaagaauaacaaugugacucugagcaaaaagcguaaaagaagguuucuggguuuccucuuaggcgucgggucagccauagcuaguggaaucgccguguccaagguucugcaccuugaaggcgaggugaacaagauuaaaaaugcguugcugucuaccaacaaggcagucgugagccuauccaacgguguaucaguucucacaaguaaagugcuggaccuuaagaauuauaucgauaaacaacuguugccgauugucaacaagcagagcuguucuaucuccaauauagaaacugugauugaguuucagcagaaaaacaaucggcuccuggagaucacccgcgaguucucagugaacgccggggucacaacccccguuagcacguacauguuaacuaauagugaacugcucucucuuauuaacgacaugccuaucacaaaugaucaaaagaagcugauguccaacaaugugcagaucguaagacagcagagcuauucgauuaugucuauaaucaaagaagagguguuggcuuacgucgugcaacuaccacuguacggaguuauugacacccccugcuggaagcuccauacuuccccucuguguacaaccaacacgaaagaaggcucaaauaucugccuuaccaggacagaucggggcugguauugugacaacgccgggagugugagcuuuuucccacaggcagagacuugcaagguccaguccaaucgcguguuuugugauaccaugaacucucugacauugcccagcgagguaaaccucugcaauauagacauuuucaacccuaaauacgauuguaagaucaugacuucaaagaccgacguuaguuccagcgugaucacaucucugggagcuauugucucaugcuaugguaaaaccaagugcacugccaguaauaaaaaccgaggcaucauuaagacguuuagcaaugggugugauuacguguccaacaaaggagucgacacagugucuguuggcaauaccuuauauuacgugaacaagcaagaagguaagucgcuguauguaaaaggggagccaauaaucaauuucuacgacccgcuagucuuucccagcgaugaguucgacgcguccauuucacaggugaacgaaaagaucaaucagagucucgccuucaucagaaaaucugaugaacugcuucacaacguuaaugugggaaagagcacuaccaacauuaugauaacaaccaucauuaucgucauuaucgugauauugcugcuccugaucgcaguaggccuuuuucuguacugcaaagcuagguccacuccugugacauugucaaaggaccagcucagcggcauuaauaacaucgccuucucuaacugaggacuagucccuguucccagagcccacuuuuuuuucuuuuuuugaaauaaaauagccugucuuucagaucuaaaaaaaaaaaaaaaaaaaaaaaaaaaaaaaaaaaaaaaaaaaaaaaaaaaaaaaaaaaaaaaaugcaucccccccccccccccccccccccccccccccaaaggcucuuuucagagccaccagaauu

SEQ ID NO: 11771 - RNA, 1993 nt, Artificial Sequence
  mRNA product Design a-5 comprising derived and/or modified sequence from HRSV(Memphis-37)__AIY60640.1__F0 (opt4)
gggagacuuucccauucuguagcagaauuugguguugccuguggucuuggucccgcggagaagcuuaccauggagcugcccauccugaagaccaacgccaucaccaccauccuggccgccgugacccugugcuucgccagcagccagaacaucaccgaggaguucuaccagagcaccugcagcgccgugagcaagggcuaccugagcgcccugagaaccggcugguacaccagcgugaucaccaucgagcugagcaacaucaaggagaacaagugcaacggcaccgacgccaaggugaagcugaucaagcaggagcuggacaaguacaagaacgccgugaccgagcugcagcugcugaugcagagcacccccgccgccaacaacagagccagaagagagcugcccagauucaugaacuacacccugaacaacaccaagaacaacaacgugacccugagcaagaagagaaagagaagauuccugggcuuccugcugggcgugggcagcgccaucgccagcggcaucgccgugagcaaggugcugcaccuggagggcgaggugaacaagaucaagaacgcccugcugagcaccaacaaggccguggugagccugagcaacggcgugagcgugcugaccagcaaggugcuggaccugaagaacuacaucgacaagcagcugcugcccaucgugaacaagcagagcugcagcaucagcaacaucgagaccgugaucgaguuccagcagaagaacaacagacugcuggagaucaccagagaguucagcgugaacgccggcgugaccacccccgugagcaccuacaugcugaccaacagcgagcugcugagccugaucaacgacaugcccaucaccaacgaccagaagaagcugaugagcaacaacgugcagaucgugagacagcagagcuacagcaucaugagcaucaucaaggaggaggugcuggccuacguggugcagcugccccuguacggcgugaucgacacccccugcuggaagcugcacaccagcccccugugcaccaccaacaccaaggagggcagcaacaucugccugaccagaaccgacagaggcugguacugcgacaacgccggcagcgugagcuucuucccccaggccgagaccugcaaggugcagagcaacagaguguucugcgacaccaugaacagccugacccugcccagcgaggugaaccugugcaacaucgacaucuucaaccccaaguacgacugcaagaucaugaccagcaagaccgacgugagcagcagcgugaucaccagccugggcgccaucgugagcugcuacggcaagaccaagugcaccgccagcaacaagaacagaggcaucaucaagaccuucagcaacggcugcgacuacgugagcaacaagggcguggacaccgugagcgugggcaacacccuguacuacgugaacaagcaggagggcaagagccuguacgugaagggcgagcccaucaucaacuucuacgacccccugguguuccccagcgacgaguucgacgccagcaucagccaggugaacgagaagaucaaccagagccuggccuucaucagaaagagcgacgagcugcugcacaacgugaacgugggcaagagcaccaccaacaucaugaucaccaccaucaucaucgugaucaucgugauccugcugcugcugaucgccgugggccuguuccuguacugcaaggccagaagcacccccgugacccugagcaaggaccagcugagcggcaucaacaacaucgccuucagcaacugaggacuagucccuguucccagagcccacuuuuuuuucuuuuuuugaaauaaaauagccugucuuucagaucuaaaaaaaaaaaaaaaaaaaaaaaaaaaaaaaaaaaaaaaaaaaaaaaaaaaaaaaaaaaaaaaaugcaucccccccccccccccccccccccccccccccaaaggcucuuuucagagccaccagaauu

SEQ ID NO: 11772 - RNA, 1993 nt, Artificial Sequence
  mRNA product Design a-5 comprising derived and/or modified sequence from HRSV(Memphis-37)__AIY60640.1__F0 (opt5)
gggagacuuucccauucuguagcagaauuugguguugccuguggucuuggucccgcggagaagcuuaccauggagcugcccauccucaagaccaacgccauuacaacgauccuggcugccgugacccuuugcuucgcgagcucccagaauauuacagaagaguuuuaccaaucuaccuguagcgcugucuccaaaggcuaucugucugcccucagaacagggugguacaccagcguuaucacaauugaacuguccaacaucaaggagaauaaaugcaacggaaccgacgccaaggugaaacuuaucaagcaggaacuggauaaguauaaaaaugcugugacggagcuccagcugcugaugcagucuaccccugccgcuaacaaucgggcccgcagagagcucccgcgguucaugaacuacacacugaauaacaccaagaauaacaaugucacacuuagcaaaaagcgcaaaagacgguuucugggcuuccuccugggggugggauccgcgauugccagcggcaucgcuguuucuaaggugcuucaccuggaaggggaggucaacaagauuaaaaaugcccuccuguccaccaacaaggcugugguuagccugucuaacggaguguccguccucacgagcaaagugcuggaccuuaagaauuauaucgauaaacaacugcuccccauugugaacaagcagucuuguuccaucagcaauauugaaacagucaucgaguuucagcagaaaaacaaucgccugcuugagaucaccagagaauuuuccguuaacgccggcgugacaaccccugugucuaccuacaugcugacaaauagcgagcuccugucccugauuaacgacaugcccaucacgaaugaucaaaagaagcucaugagcaacaauguccagauugugcggcagcagucuuauuccaucaugagcauuaucaaagaagagguucuggcguacgugguccaacuuccucuguacggcgugaucgacacccccugcuggaagcuccauacaucuccucuguguaccacaaacaccaaagaagggagcaauauuugccuuacgcgcacagauagaggaugguauugugacaacgccggcuccguuucuuucuucccgcaggcugagaccugcaaggugcagagcaaucgggucuuuugugauaccaugaacucccugacacuccccagcgaggugaaccugugcaauaucgacauuuucaacccuaaauacgauuguaagaucaugaccucuaagacagacgucuccagcucugugauuacgucccugggggccaucguuagcugcuauggaaaaaccaagugcacagcuuccaauaaaaaccgcggcaucauuaagaccuuuucuaaugggugugauuacgugagcaacaaaggagucgacacaguguccguuggcaauacccucuauuacgugaacaagcaagaaggcaagucucuguaugucaaaggggagcccaucauuaauuucuacgacccucuuguguuucccagcgaugaguucgacgccuccaucagccaggugaacgaaaagauuaaucagucucuggccuucaucagaaaauccgaugaacuccugcacaacguuaaugucggaaagagcacgaccaacauuaugaucacaaccaucauuaucgugauuaucgugauucugcuucuccugaucgcugucggccuguuucucuacugcaaagcgcggucuacaccggugacccuguccaaggaccagcuuagcgggaucaauaacauugccuucucuaacugaggacuagucccuguucccagagcccacuuuuuuuucuuuuuuugaaauaaaauagccugucuuucagaucuaaaaaaaaaaaaaaaaaaaaaaaaaaaaaaaaaaaaaaaaaaaaaaaaaaaaaaaaaaaaaaaaugcaucccccccccccccccccccccccccccccccaaaggcucuuuucagagccaccagaauu

SEQ ID NO: 11773 - RNA, 1993 nt, Artificial Sequence
  mRNA product Design a-5 comprising derived and/or modified sequence from HRSV(Memphis-37)__AIY60640.1__F0 (opt6)
gggagacuuucccauucuguagcagaauuugguguugccuguggucuuggucccgcggagaagcuuaccauggaacugccuauucuaaaaacaaaugccauaacaacaauucuugcagcaguaacauuauguuuugcaucaucacaaaacauuacagaagaauuuuaccaauccacuugcucagccguaucaaaaggauaccuaucagccuuaagaacagguugguacaccucaguaauaaccauagaacuaucaaacauaaaagaaaacaaaugcaaugguacugaugcaaaagucaaacuaaucaaacaagaacuggacaaauacaaaaaugcaguaaccgaacuacaacuccuaaugcaauccacaccugcagccaacaacagagcaagacgcgaacuaccaagauuuaugaauuacacauuaaacaacaccaagaacaacaauguaacucucucaaaaaaaagaaaaagacgcuuucuagguuuccuccuaggcgucggaucugcaauagccucaggaauagcaguaucaaaaguucuacaccuagaaggagaaguaaacaaaauuaaaaacgcauuacuaucaaccaacaaagcaguuguaucccuuucaaauggagucucuguacuuacaucaaaaguacucgaccuaaaaaacuauauagacaaacaacuacucccaauagucaauaagcaaucaugcagcauaucaaacauagaaacaguuauagaauuucaacaaaaaaacaacagacuacucgaaauaaccagagaauuuagcgucaacgcaggcguaaccacaccgguauccacauacaugcuuacaaacucagaacuccucucacuaauaaacgacaugccaauaacuaaugaccaaaaaaaacuaaugucaaacaauguccaaauaguccgucaacaaucauacucaauaaugucaauaauaaaagaagaaguauuagcauauguaguccaacuaccauuauacggcguuauagacacaccuuguuggaaacuucacacauccccacucuguacaaccaacacaaaagaagguuccaauauaugccuaacuagaaccgacagaggaugguauugcgacaacgcaggaucuguaucauucuuuccccaagcagaaacauguaaaguacaaaguaaccgcguauucugcgacaccaugaacucauuaacccucccauccgaaguuaauuuaugcaauauagacauauuuaauccuaaauacgacugcaaaauaaugacaucaaaaacagacguuaguuccuccguaaucacaucuuugggcgcaauagucucaugcuauggaaaaacaaaaugcacagccucaaacaaaaauagaggaauaauaaaaacauucagcaacggcugugauuauguauccaacaaaggaguagacacaguauccguaggcaauacccuuuacuacguuaauaaacaagaaggaaaaucauuauacgucaaaggagaaccuaucauaaauuucuacgacccauuaguauucccuucagacgaauuugaugccucaauaucccaagucaaugaaaaaaucaaccaaucacuagccuuuauccgcaaaucagacgaauuacuacacaacguaaacguaggcaaaucaacaacuaauauaaugauaacaacaauaauaauaguaauuauaguaauauuauuacuacuaaucgccguagguuuauucuuauacuguaaagcacgaucaacaccaguuacacucucaaaagaucaacuaucaggaauaaacaacauagcauuuuccaauuaaggacuagucccuguucccagagcccacuuuuuuuucuuuuuuugaaauaaaauagccugucuuucagaucuaaaaaaaaaaaaaaaaaaaaaaaaaaaaaaaaaaaaaaaaaaaaaaaaaaaaaaaaaaaaaaaaugcaucccccccccccccccccccccccccccccccaaaggcucuuuucagagccaccagaauu

SEQ ID NO: 11774 - RNA, 1993 nt, Artificial Sequence
  mRNA product Design a-5 comprising derived and/or modified sequence from HRSV(Memphis-37)__AIY60640.1__F0 (opt11)
gggagacuuucccauucuguagcagaauuugguguugccuguggucuuggucccgcggagaagcuuaccauggaacuccccauccucaaaacaaacgccauaaccacuauccucgccgccgucacccucugcuucgccuccucccaaaacaucacagaggaguucuaccaauccacaugcuccgccgucuccaaaggcuaccucagcgcccuacguaccggcugguacaccagcgucaucacaauagaacucuccaacaucaaggaaaacaaaugcaacggcaccgaugccaaaguaaaacucaucaaacaagaacucgauaaauacaaaaacgccgucaccgaacuacaacuccuaaugcaaagcacacccgccgccaacaacagagcacggcgcgaacugccccgcuucaugaacuacacccucaacaacaccaaaaauaacaacgucacccuauccaagaaacgcaaacgccgauuccucgguuuccuacucggcguaggaagcgccauagccucaggcaucgccgucuccaaaguccuccaucuggaaggcgaagucaacaaaaucaaaaacgcacucuuauccaccaacaaagccgucgucucccucucgaacggggucuccguccuuaccuccaaaguccucgaccuuaaaaacuacaucgacaaacaacuacuaccaauagucaauaaacaauccugcuccaucucaaacauagaaaccgucauagaguuccaacagaagaacaaucgccuccucgaaauaacucgcgaguucuccgucaacgcaggcgucacgaccccugucucaacauacaugcuaacuaacucagaacuccuaagccuaaucaacgacaugcccaucacaaacgaccaaaagaaacucaugagcaacaauguccagauagucagacagcaauccuauagcaucaugucuauaauaaaagaagaagugcucgccuacguaguccaacucccucuuuacggcgucauagacacacccugcuggaaacuccacacaucuccucucugcaccaccaacacaaaagaaggcagcaacaucugccugacccgaaccgaccgcggaugguacugcgacaacgcuggcuccgugucuuucuuuccccaagccgaaaccugcaaaguccaguccaaccgcgucuucugcgacacaaugaacucccucacccuacccuccgaaguuaaccucugcaacaucgacaucuucaauccaaaauacgacugcaaaaucaugaccucgaaaacggacguauccuccuccgucauaacaucacuuggagccaucguuagcugcuacggaaaaaccaaauguaccgccuccaacaaaaaccgcggaauaaucaaaacauucuccaacggcugcgacuacguaagcaacaaaggggucgauacugucuccguagguaacacccuauacuacgucaacaaacaagaaggaaaaucacuauacguuaaaggcgaacccauuaucaacuucuacgacccccucguuuucccauccgacgaguucgacgccuccauaagccaaguuaacgaaaagauaaaccaaucgcucgcauucauccgcaaauccgacgaacuccuacacaacgucaacgugggcaaauccacaacaaacaucaugaucaccaccaucauuaucgucauaauagucauccuccuccugcucaucgccgugggacuauuccuauacugcaaagcccgcucgacgcccgucacacuuuccaaagaccaacuaagcggaaucaacaacauagcguucagcaauuaaggacuagucccuguucccagagcccacuuuuuuuucuuuuuuugaaauaaaauagccugucuuucagaucuaaaaaaaaaaaaaaaaaaaaaaaaaaaaaaaaaaaaaaaaaaaaaaaaaaaaaaaaaaaaaaaaugcaucccccccccccccccccccccccccccccccaaaggcucuuuucagagccaccagaauu

SEQ ID NO: 11775 - RNA, 2174 nt, Artificial Sequence
  mRNA product Design b-1 comprising derived and/or modified sequence from HRSV(Memphis-37)__AIY60640.1__F0 (wt)
gggagacggagacggccugcaggaccugcucucucagcccucagccgaggccuacgccgagccgagugcgcagccgacgaccgggaggagccgcagccuucaacucugagguacugugauccgcgcugcccgccgggccgccccaguccgcugcugcggcaccuccuucccucgcgcccucuucgcucgccagcgccuucccugugagccugcgucaccgcggccgccaagcuuaccauggaguugccaauccucaaaacaaaugcaauuaccacaauccuugcugcagucacacucuguuucgcuuccagucaaaacaucacugaagaauuuuaucaaucaacaugcagugcaguuagcaaaggcuaucuuagugcuuuaagaacugguugguauacuaguguuauaacuauagaauuaaguaauaucaaggaaaauaaguguaauggaacagaugcuaagguaaaauugauaaaacaagaauuagauaaauauaaaaaugcuguaacagaauugcaguugcucaugcaaagcacaccagcagccaacaaucgagccagaagagaacuaccaagguuuaugaauuauacacucaacaauaccaaaaauaacaauguaacauuaagcaagaaaaggaaaagaagauuucuuggcuuuuuguuagguguuggaucugcaaucgccaguggcauugcuguaucuaaaguccugcaccuagaaggggaagugaacaaaaucaaaaaugcucuacuauccacaaacaaggcuguagucagcuuaucaaauggaguuagugucuuaaccagcaaaguguuagaccucaaaaacuauauagauaaacaguuguuacccauugugaacaagcaaagcugcagcauaucaaacauugaaacugugauagaauuccaacaaaagaacaacagacuacuagagauuaccagggaauuuaguguuaaugcagguguaacuacaccuguaagcacuuauauguuaacaaauagugaauuauuaucauuaaucaaugauaugccuauaacaaaugaucagaaaaaguuaauguccaacaauguucaaauaguuagacagcaaaguuacucuaucauguccauaauaaaggaggaagucuuagcauauguaguucaauuaccacuauaugguguaauagauacaccuuguuggaaacuacacacauccccucuaugcacaaccaacacaaaggaaggguccaacaucuguuuaacaagaaccgacagaggaugguacugugacaaugcaggaucagugucuuucuucccacaagcugaaacaugcaaaguucaaucgaaucgaguauuuugugacacaaugaacagucuaacauuaccaagugaaguaaaucucugcaacauugacauauucaacccuaaauaugauugcaaaauuaugacuucaaaaacagaugugagcagcuccguuaucacaucucuaggagccauugugucaugcuauggcaaaacuaaauguacagcauccaauaaaaaucguggaaucauaaagacauuuucuaacgggugugauuauguaucaaauaaggggguggacacuguaucuguagguaauacauuauauuauguaaauaagcaagaaggaaaaagccucuauguaaaaggugaaccaauaauaaauuucuaugacccauuaguguucccuucugaugaauuugaugcaucaauaucucaagucaaugagaagauuaaccagagccuagcauuuauucguaaauccgaugaauuauuacauaauguaaauguugguaaauccaccacaaauaucaugauaacuacuauaauuauagugauuauaguaauauuguuauuauuaauugcaguugggcuguuccuauacugcaaggccagaagcacaccagucacacuaagcaaggaucaacugagugguauaaauaauauugcauuuaguaacugaggacuaguguccaccugucccuccugggcugcuggauugucucguuuuccugccaaauaaacaggaucagcgcuuuacagaucuaaaaaaaaaaaaaaaaaaaaaaaaaaaaaaaaaaaaaaaaaaaaaaaaaaaaaaaaaaaaaaaaugcaucccccccccccccccccccccccccccccccaaaggcucuuuucagagccaccagaauu

SEQ ID NO: 11776 - RNA, 2174 nt, Artificial Sequence
  mRNA product Design b-1 comprising derived and/or modified sequence from HRSV(Memphis-37)__AIY60640.1__F0 (opt1)
gggagacggagacggccugcaggaccugcucucucagcccucagccgaggccuacgccgagccgagugcgcagccgacgaccgggaggagccgcagccuucaacucugagguacugugauccgcgcugcccgccgggccgccccaguccgcugcugcggcaccuccuucccucgcgcccucuucgcucgccagcgccuucccugugagccugcgucaccgcggccgccaagcuuaccauggagcugcccauccucaagaccaacgccaucaccacgauccuggccgcggugacccugugcuucgccagcucccagaacaucaccgaggaguucuaccagagcacgugcuccgccgucagcaagggcuaccucuccgcccugcgcaccgggugguacaccagcgugaucaccaucgagcuguccaacaucaaggagaacaagugcaacggcaccgacgccaaggugaagcucaucaagcaggagcuggacaaguacaagaacgcggucacggagcugcagcuccugaugcagagcaccccggccgccaacaaccgggcccgccgggagcugccccgcuucaugaacuacacccucaacaacaccaagaacaacaacgugacgcuguccaagaagcggaagcgccgguuccugggguuccuccugggcguggggagcgcgaucgccuccggcaucgccgucagcaaggugcugcaccucgagggcgaggugaacaagaucaagaacgcccugcuguccaccaacaaggccgucgugagccucuccaacggggugagcguccugaccuccaaggugcuggaccucaagaacuacaucgacaagcagcugcugcccaucgugaacaagcagagcugcuccaucagcaacaucgagaccgucaucgaguuccagcagaagaacaaccgccuccuggagaucacgcgggaguucagcgugaacgcgggcgugaccacccccgucuccaccuacaugcugacgaacagcgagcuccugucccugaucaacgacaugccgaucaccaacgaccagaagaagcucaugagcaacaacgugcagaucgugcgccagcaguccuacagcaucauguccaucaucaaggaggagguccuggccuacguggugcagcugccccucuacggggucaucgacacccccugcuggaagcugcacaccagcccccugugcacgaccaacaccaaggagggcuccaacaucugccucacccggacggaccgcgggugguacugcgacaacgccggcagcguguccuucuucccgcaggccgagaccugcaagguccagagcaaccggguguucugcgacaccaugaacucccugacccugcccagcgaggugaaccucugcaacaucgacaucuucaaccccaaguacgacugcaagaucaugacguccaagaccgacgucagcuccagcgugaucaccucccugggcgccaucgugagcugcuacgggaagaccaagugcacggcgagcaacaagaaccgcggcaucaucaagaccuucuccaacgggugcgacuacgucagcaacaagggcguggacaccguguccgucggcaacacccuguacuacgugaacaagcaggagggcaagagccucuacgugaagggggagcccaucaucaacuucuacgacccgcuggucuuccccuccgacgaguucgacgccagcaucucccaggugaacgagaagaucaaccagagccuggccuucauccggaaguccgacgagcuccugcacaacgugaacgucggcaagagcaccacgaacaucaugaucaccaccaucaucaucgugaucaucgugauccugcugcuccugaucgccgucgggcuguuccucuacugcaaggcccgcuccacccccgugacgcugagcaaggaccagcuguccgggaucaacaacaucgcguucagcaacugaggacuaguguccaccugucccuccugggcugcuggauugucucguuuuccugccaaauaaacaggaucagcgcuuuacagaucuaaaaaaaaaaaaaaaaaaaaaaaaaaaaaaaaaaaaaaaaaaaaaaaaaaaaaaaaaaaaaaaaugcaucccccccccccccccccccccccccccccccaaaggcucuuuucagagccaccagaauu

SEQ ID NO: 11777 - RNA, 2174 nt, Artificial Sequence
  mRNA product Design b-1 comprising derived and/or modified sequence from HRSV(Memphis-37)__AIY60640.1__F0 (opt2)
gggagacggagacggccugcaggaccugcucucucagcccucagccgaggccuacgccgagccgagugcgcagccgacgaccgggaggagccgcagccuucaacucugagguacugugauccgcgcugcccgccgggccgccccaguccgcugcugcggcaccuccuucccucgcgcccucuucgcucgccagcgccuucccugugagccugcgucaccgcggccgccaagcuuaccauggagcuccccauccucaagaccaacgccaucaccaccauccucgccgccgucacccucugcuucgccuccucccagaacaucaccgaggaguucuaccaguccaccugcuccgccgucuccaagggcuaccucuccgcccuccgcaccggcugguacaccuccgucaucaccaucgagcucuccaacaucaaggagaacaagugcaacggcaccgacgccaaggucaagcucaucaagcaggagcucgacaaguacaagaacgccgucaccgagcuccagcuccucaugcaguccacccccgccgccaacaaccgcgcccgccgcgagcucccccgcuucaugaacuacacccucaacaacaccaagaacaacaacgucacccucuccaagaagcgcaagcgccgcuuccucggcuuccuccucggcgucggcuccgccaucgccuccggcaucgccgucuccaagguccuccaccucgagggcgaggucaacaagaucaagaacgcccuccucuccaccaacaaggccgucgucucccucuccaacggcgucuccguccucaccuccaagguccucgaccucaagaacuacaucgacaagcagcuccuccccaucgucaacaagcaguccugcuccaucuccaacaucgagaccgucaucgaguuccagcagaagaacaaccgccuccucgagaucacccgcgaguucuccgucaacgccggcgucaccacccccgucuccaccuacaugcucaccaacuccgagcuccucucccucaucaacgacaugcccaucaccaacgaccagaagaagcucauguccaacaacguccagaucguccgccagcaguccuacuccaucauguccaucaucaaggaggagguccucgccuacgucguccagcucccccucuacggcgucaucgacacccccugcuggaagcuccacaccuccccccucugcaccaccaacaccaaggagggcuccaacaucugccucacccgcaccgaccgcggcugguacugcgacaacgccggcuccgucuccuucuucccccaggccgagaccugcaagguccaguccaaccgcgucuucugcgacaccaugaacucccucacccuccccuccgaggucaaccucugcaacaucgacaucuucaaccccaaguacgacugcaagaucaugaccuccaagaccgacgucuccuccuccgucaucaccucccucggcgccaucgucuccugcuacggcaagaccaagugcaccgccuccaacaagaaccgcggcaucaucaagaccuucuccaacggcugcgacuacgucuccaacaagggcgucgacaccgucuccgucggcaacacccucuacuacgucaacaagcaggagggcaagucccucuacgucaagggcgagcccaucaucaacuucuacgacccccucgucuuccccuccgacgaguucgacgccuccaucucccaggucaacgagaagaucaaccagucccucgccuucauccgcaaguccgacgagcuccuccacaacgucaacgucggcaaguccaccaccaacaucaugaucaccaccaucaucaucgucaucaucgucauccuccuccuccucaucgccgucggccucuuccucuacugcaaggcccgcuccacccccgucacccucuccaaggaccagcucuccggcaucaacaacaucgccuucuccaacugaggacuaguguccaccugucccuccugggcugcuggauugucucguuuuccugccaaauaaacaggaucagcgcuuuacagaucuaaaaaaaaaaaaaaaaaaaaaaaaaaaaaaaaaaaaaaaaaaaaaaaaaaaaaaaaaaaaaaaaugcaucccccccccccccccccccccccccccccccaaaggcucuuuucagagccaccagaauu

SEQ ID NO: 11778 - RNA, 2174 nt, Artificial Sequence
  mRNA product Design b-1 comprising derived and/or modified sequence from HRSV(Memphis-37)__AIY60640.1__F0 (opt3)
gggagacggagacggccugcaggaccugcucucucagcccucagccgaggccuacgccgagccgagugcgcagccgacgaccgggaggagccgcagccuucaacucugagguacugugauccgcgcugcccgccgggccgccccaguccgcugcugcggcaccuccuucccucgcgcccucuucgcucgccagcgccuucccugugagccugcgucaccgcggccgccaagcuuaccauggagcugcccauccucaagaccaacgccauuacaacuauacuugcugcagugacgcugugcuucgccagcucccagaauaucaccgaagaguuuuaccaaucuacauguucagcggucaguaaaggcuauuugagcgcuuuaagaacugggugguacaccuccguuauuacaaucgaacugucuaacauuaaggagaauaaaugcaacggaaccgacgccaaggugaaacuaaucaagcaggaacucgauaaguauaaaaaugcaguaacugagcugcagcuucugaugcagucgaccccugccgcuaacaauagggcacggcgcgaguugccacgauucaugaacuacacacucaauaacacgaagaauaacaaugugacucugagcaaaaagcguaaaagaagguuucuggguuuccucuuaggcgucgggucagccauagcuaguggaaucgccguguccaagguucugcaccuugaaggcgaggugaacaagauuaaaaaugcguugcugucuaccaacaaggcagucgugagccuauccaacgguguaucaguucucacaaguaaagugcuggaccuuaagaauuauaucgauaaacaacuguugccgauugucaacaagcagagcuguucuaucuccaauauagaaacugugauugaguuucagcagaaaaacaaucggcuccuggagaucacccgcgaguucucagugaacgccggggucacaacccccguuagcacguacauguuaacuaauagugaacugcucucucuuauuaacgacaugccuaucacaaaugaucaaaagaagcugauguccaacaaugugcagaucguaagacagcagagcuauucgauuaugucuauaaucaaagaagagguguuggcuuacgucgugcaacuaccacuguacggaguuauugacacccccugcuggaagcuccauacuuccccucuguguacaaccaacacgaaagaaggcucaaauaucugccuuaccaggacagaucggggcugguauugugacaacgccgggagugugagcuuuuucccacaggcagagacuugcaagguccaguccaaucgcguguuuugugauaccaugaacucucugacauugcccagcgagguaaaccucugcaauauagacauuuucaacccuaaauacgauuguaagaucaugacuucaaagaccgacguuaguuccagcgugaucacaucucugggagcuauugucucaugcuaugguaaaaccaagugcacugccaguaauaaaaaccgaggcaucauuaagacguuuagcaaugggugugauuacguguccaacaaaggagucgacacagugucuguuggcaauaccuuauauuacgugaacaagcaagaagguaagucgcuguauguaaaaggggagccaauaaucaauuucuacgacccgcuagucuuucccagcgaugaguucgacgcguccauuucacaggugaacgaaaagaucaaucagagucucgccuucaucagaaaaucugaugaacugcuucacaacguuaaugugggaaagagcacuaccaacauuaugauaacaaccaucauuaucgucauuaucgugauauugcugcuccugaucgcaguaggccuuuuucuguacugcaaagcuagguccacuccugugacauugucaaaggaccagcucagcggcauuaauaacaucgccuucucuaacugaggacuaguguccaccugucccuccugggcugcuggauugucucguuuuccugccaaauaaacaggaucagcgcuuuacagaucuaaaaaaaaaaaaaaaaaaaaaaaaaaaaaaaaaaaaaaaaaaaaaaaaaaaaaaaaaaaaaaaaugcaucccccccccccccccccccccccccccccccaaaggcucuuuucagagccaccagaauu

SEQ ID NO: 11779 - RNA, 2174 nt, Artificial Sequence
  mRNA product Design b-1 comprising derived and/or modified sequence from HRSV(Memphis-37)__AIY60640.1__F0 (opt4)
gggagacggagacggccugcaggaccugcucucucagcccucagccgaggccuacgccgagccgagugcgcagccgacgaccgggaggagccgcagccuucaacucugagguacugugauccgcgcugcccgccgggccgccccaguccgcugcugcggcaccuccuucccucgcgcccucuucgcucgccagcgccuucccugugagccugcgucaccgcggccgccaagcuuaccauggagcugcccauccugaagaccaacgccaucaccaccauccuggccgccgugacccugugcuucgccagcagccagaacaucaccgaggaguucuaccagagcaccugcagcgccgugagcaagggcuaccugagcgcccugagaaccggcugguacaccagcgugaucaccaucgagcugagcaacaucaaggagaacaagugcaacggcaccgacgccaaggugaagcugaucaagcaggagcuggacaaguacaagaacgccgugaccgagcugcagcugcugaugcagagcacccccgccgccaacaacagagccagaagagagcugcccagauucaugaacuacacccugaacaacaccaagaacaacaacgugacccugagcaagaagagaaagagaagauuccugggcuuccugcugggcgugggcagcgccaucgccagcggcaucgccgugagcaaggugcugcaccuggagggcgaggugaacaagaucaagaacgcccugcugagcaccaacaaggccguggugagccugagcaacggcgugagcgugcugaccagcaaggugcuggaccugaagaacuacaucgacaagcagcugcugcccaucgugaacaagcagagcugcagcaucagcaacaucgagaccgugaucgaguuccagcagaagaacaacagacugcuggagaucaccagagaguucagcgugaacgccggcgugaccacccccgugagcaccuacaugcugaccaacagcgagcugcugagccugaucaacgacaugcccaucaccaacgaccagaagaagcugaugagcaacaacgugcagaucgugagacagcagagcuacagcaucaugagcaucaucaaggaggaggugcuggccuacguggugcagcugccccuguacggcgugaucgacacccccugcuggaagcugcacaccagcccccugugcaccaccaacaccaaggagggcagcaacaucugccugaccagaaccgacagaggcugguacugcgacaacgccggcagcgugagcuucuucccccaggccgagaccugcaaggugcagagcaacagaguguucugcgacaccaugaacagccugacccugcccagcgaggugaaccugugcaacaucgacaucuucaaccccaaguacgacugcaagaucaugaccagcaagaccgacgugagcagcagcgugaucaccagccugggcgccaucgugagcugcuacggcaagaccaagugcaccgccagcaacaagaacagaggcaucaucaagaccuucagcaacggcugcgacuacgugagcaacaagggcguggacaccgugagcgugggcaacacccuguacuacgugaacaagcaggagggcaagagccuguacgugaagggcgagcccaucaucaacuucuacgacccccugguguuccccagcgacgaguucgacgccagcaucagccaggugaacgagaagaucaaccagagccuggccuucaucagaaagagcgacgagcugcugcacaacgugaacgugggcaagagcaccaccaacaucaugaucaccaccaucaucaucgugaucaucgugauccugcugcugcugaucgccgugggccuguuccuguacugcaaggccagaagcacccccgugacccugagcaaggaccagcugagcggcaucaacaacaucgccuucagcaacugaggacuaguguccaccugucccuccugggcugcuggauugucucguuuuccugccaaauaaacaggaucagcgcuuuacagaucuaaaaaaaaaaaaaaaaaaaaaaaaaaaaaaaaaaaaaaaaaaaaaaaaaaaaaaaaaaaaaaaaugcaucccccccccccccccccccccccccccccccaaaggcucuuuucagagccaccagaauu

SEQ ID NO: 11780 - RNA, 2174 nt, Artificial Sequence
  mRNA product Design b-1 comprising derived and/or modified sequence from HRSV(Memphis-37)__AIY60640.1__F0 (opt5)
gggagacggagacggccugcaggaccugcucucucagcccucagccgaggccuacgccgagccgagugcgcagccgacgaccgggaggagccgcagccuucaacucugagguacugugauccgcgcugcccgccgggccgccccaguccgcugcugcggcaccuccuucccucgcgcccucuucgcucgccagcgccuucccugugagccugcgucaccgcggccgccaagcuuaccauggagcugcccauccucaagaccaacgccauuacaacgauccuggcugccgugacccuuugcuucgcgagcucccagaauauuacagaagaguuuuaccaaucuaccuguagcgcugucuccaaaggcuaucugucugcccucagaacagggugguacaccagcguuaucacaauugaacuguccaacaucaaggagaauaaaugcaacggaaccgacgccaaggugaaacuuaucaagcaggaacuggauaaguauaaaaaugcugugacggagcuccagcugcugaugcagucuaccccugccgcuaacaaucgggcccgcagagagcucccgcgguucaugaacuacacacugaauaacaccaagaauaacaaugucacacuuagcaaaaagcgcaaaagacgguuucugggcuuccuccugggggugggauccgcgauugccagcggcaucgcuguuucuaaggugcuucaccuggaaggggaggucaacaagauuaaaaaugcccuccuguccaccaacaaggcugugguuagccugucuaacggaguguccguccucacgagcaaagugcuggaccuuaagaauuauaucgauaaacaacugcuccccauugugaacaagcagucuuguuccaucagcaauauugaaacagucaucgaguuucagcagaaaaacaaucgccugcuugagaucaccagagaauuuuccguuaacgccggcgugacaaccccugugucuaccuacaugcugacaaauagcgagcuccugucccugauuaacgacaugcccaucacgaaugaucaaaagaagcucaugagcaacaauguccagauugugcggcagcagucuuauuccaucaugagcauuaucaaagaagagguucuggcguacgugguccaacuuccucuguacggcgugaucgacacccccugcuggaagcuccauacaucuccucuguguaccacaaacaccaaagaagggagcaauauuugccuuacgcgcacagauagaggaugguauugugacaacgccggcuccguuucuuucuucccgcaggcugagaccugcaaggugcagagcaaucgggucuuuugugauaccaugaacucccugacacuccccagcgaggugaaccugugcaauaucgacauuuucaacccuaaauacgauuguaagaucaugaccucuaagacagacgucuccagcucugugauuacgucccugggggccaucguuagcugcuauggaaaaaccaagugcacagcuuccaauaaaaaccgcggcaucauuaagaccuuuucuaaugggugugauuacgugagcaacaaaggagucgacacaguguccguuggcaauacccucuauuacgugaacaagcaagaaggcaagucucuguaugucaaaggggagcccaucauuaauuucuacgacccucuuguguuucccagcgaugaguucgacgccuccaucagccaggugaacgaaaagauuaaucagucucuggccuucaucagaaaauccgaugaacuccugcacaacguuaaugucggaaagagcacgaccaacauuaugaucacaaccaucauuaucgugauuaucgugauucugcuucuccugaucgcugucggccuguuucucuacugcaaagcgcggucuacaccggugacccuguccaaggaccagcuuagcgggaucaauaacauugccuucucuaacugaggacuaguguccaccugucccuccugggcugcuggauugucucguuuuccugccaaauaaacaggaucagcgcuuuacagaucuaaaaaaaaaaaaaaaaaaaaaaaaaaaaaaaaaaaaaaaaaaaaaaaaaaaaaaaaaaaaaaaaugcaucccccccccccccccccccccccccccccccaaaggcucuuuucagagccaccagaauu

SEQ ID NO: 11781 - RNA, 2174 nt, Artificial Sequence
  mRNA product Design b-1 comprising derived and/or modified sequence from HRSV(Memphis-37)__AIY60640.1__F0 (opt6)
gggagacggagacggccugcaggaccugcucucucagcccucagccgaggccuacgccgagccgagugcgcagccgacgaccgggaggagccgcagccuucaacucugagguacugugauccgcgcugcccgccgggccgccccaguccgcugcugcggcaccuccuucccucgcgcccucuucgcucgccagcgccuucccugugagccugcgucaccgcggccgccaagcuuaccauggaacugccuauucuaaaaacaaaugccauaacaacaauucuugcagcaguaacauuauguuuugcaucaucacaaaacauuacagaagaauuuuaccaauccacuugcucagccguaucaaaaggauaccuaucagccuuaagaacagguugguacaccucaguaauaaccauagaacuaucaaacauaaaagaaaacaaaugcaaugguacugaugcaaaagucaaacuaaucaaacaagaacuggacaaauacaaaaaugcaguaaccgaacuacaacuccuaaugcaauccacaccugcagccaacaacagagcaagacgcgaacuaccaagauuuaugaauuacacauuaaacaacaccaagaacaacaauguaacucucucaaaaaaaagaaaaagacgcuuucuagguuuccuccuaggcgucggaucugcaauagccucaggaauagcaguaucaaaaguucuacaccuagaaggagaaguaaacaaaauuaaaaacgcauuacuaucaaccaacaaagcaguuguaucccuuucaaauggagucucuguacuuacaucaaaaguacucgaccuaaaaaacuauauagacaaacaacuacucccaauagucaauaagcaaucaugcagcauaucaaacauagaaacaguuauagaauuucaacaaaaaaacaacagacuacucgaaauaaccagagaauuuagcgucaacgcaggcguaaccacaccgguauccacauacaugcuuacaaacucagaacuccucucacuaauaaacgacaugccaauaacuaaugaccaaaaaaaacuaaugucaaacaauguccaaauaguccgucaacaaucauacucaauaaugucaauaauaaaagaagaaguauuagcauauguaguccaacuaccauuauacggcguuauagacacaccuuguuggaaacuucacacauccccacucuguacaaccaacacaaaagaagguuccaauauaugccuaacuagaaccgacagaggaugguauugcgacaacgcaggaucuguaucauucuuuccccaagcagaaacauguaaaguacaaaguaaccgcguauucugcgacaccaugaacucauuaacccucccauccgaaguuaauuuaugcaauauagacauauuuaauccuaaauacgacugcaaaauaaugacaucaaaaacagacguuaguuccuccguaaucacaucuuugggcgcaauagucucaugcuauggaaaaacaaaaugcacagccucaaacaaaaauagaggaauaauaaaaacauucagcaacggcugugauuauguauccaacaaaggaguagacacaguauccguaggcaauacccuuuacuacguuaauaaacaagaaggaaaaucauuauacgucaaaggagaaccuaucauaaauuucuacgacccauuaguauucccuucagacgaauuugaugccucaauaucccaagucaaugaaaaaaucaaccaaucacuagccuuuauccgcaaaucagacgaauuacuacacaacguaaacguaggcaaaucaacaacuaauauaaugauaacaacaauaauaauaguaauuauaguaauauuauuacuacuaaucgccguagguuuauucuuauacuguaaagcacgaucaacaccaguuacacucucaaaagaucaacuaucaggaauaaacaacauagcauuuuccaauuaaggacuaguguccaccugucccuccugggcugcuggauugucucguuuuccugccaaauaaacaggaucagcgcuuuacagaucuaaaaaaaaaaaaaaaaaaaaaaaaaaaaaaaaaaaaaaaaaaaaaaaaaaaaaaaaaaaaaaaaugcaucccccccccccccccccccccccccccccccaaaggcucuuuucagagccaccagaauu

SEQ ID NO: 11782 - RNA, 2174 nt, Artificial Sequence
  mRNA product Design b-1 comprising derived and/or modified sequence from HRSV(Memphis-37)__AIY60640.1__F0 (opt11)
gggagacggagacggccugcaggaccugcucucucagcccucagccgaggccuacgccgagccgagugcgcagccgacgaccgggaggagccgcagccuucaacucugagguacugugauccgcgcugcccgccgggccgccccaguccgcugcugcggcaccuccuucccucgcgcccucuucgcucgccagcgccuucccugugagccugcgucaccgcggccgccaagcuuaccauggaacuccccauccucaaaacaaacgccauaaccacuauccucgccgccgucacccucugcuucgccuccucccaaaacaucacagaggaguucuaccaauccacaugcuccgccgucuccaaaggcuaccucagcgcccuacguaccggcugguacaccagcgucaucacaauagaacucuccaacaucaaggaaaacaaaugcaacggcaccgaugccaaaguaaaacucaucaaacaagaacucgauaaauacaaaaacgccgucaccgaacuacaacuccuaaugcaaagcacacccgccgccaacaacagagcacggcgcgaacugccccgcuucaugaacuacacccucaacaacaccaaaaauaacaacgucacccuauccaagaaacgcaaacgccgauuccucgguuuccuacucggcguaggaagcgccauagccucaggcaucgccgucuccaaaguccuccaucuggaaggcgaagucaacaaaaucaaaaacgcacucuuauccaccaacaaagccgucgucucccucucgaacggggucuccguccuuaccuccaaaguccucgaccuuaaaaacuacaucgacaaacaacuacuaccaauagucaauaaacaauccugcuccaucucaaacauagaaaccgucauagaguuccaacagaagaacaaucgccuccucgaaauaacucgcgaguucuccgucaacgcaggcgucacgaccccugucucaacauacaugcuaacuaacucagaacuccuaagccuaaucaacgacaugcccaucacaaacgaccaaaagaaacucaugagcaacaauguccagauagucagacagcaauccuauagcaucaugucuauaauaaaagaagaagugcucgccuacguaguccaacucccucuuuacggcgucauagacacacccugcuggaaacuccacacaucuccucucugcaccaccaacacaaaagaaggcagcaacaucugccugacccgaaccgaccgcggaugguacugcgacaacgcuggcuccgugucuuucuuuccccaagccgaaaccugcaaaguccaguccaaccgcgucuucugcgacacaaugaacucccucacccuacccuccgaaguuaaccucugcaacaucgacaucuucaauccaaaauacgacugcaaaaucaugaccucgaaaacggacguauccuccuccgucauaacaucacuuggagccaucguuagcugcuacggaaaaaccaaauguaccgccuccaacaaaaaccgcggaauaaucaaaacauucuccaacggcugcgacuacguaagcaacaaaggggucgauacugucuccguagguaacacccuauacuacgucaacaaacaagaaggaaaaucacuauacguuaaaggcgaacccauuaucaacuucuacgacccccucguuuucccauccgacgaguucgacgccuccauaagccaaguuaacgaaaagauaaaccaaucgcucgcauucauccgcaaauccgacgaacuccuacacaacgucaacgugggcaaauccacaacaaacaucaugaucaccaccaucauuaucgucauaauagucauccuccuccugcucaucgccgugggacuauuccuauacugcaaagcccgcucgacgcccgucacacuuuccaaagaccaacuaagcggaaucaacaacauagcguucagcaauuaaggacuaguguccaccugucccuccugggcugcuggauugucucguuuuccugccaaauaaacaggaucagcgcuuuacagaucuaaaaaaaaaaaaaaaaaaaaaaaaaaaaaaaaaaaaaaaaaaaaaaaaaaaaaaaaaaaaaaaaugcaucccccccccccccccccccccccccccccccaaaggcucuuuucagagccaccagaauu

SEQ ID NO: 11783 - RNA, 1994 nt, Artificial Sequence
  mRNA product Design b-2 comprising derived and/or modified sequence from HRSV(Memphis-37)__AIY60640.1__F0 (wt)
gggagagccucugcuggaguccggggaguggcguuggcugcuagagcgaagcuuaccauggaguugccaauccucaaaacaaaugcaauuaccacaauccuugcugcagucacacucuguuucgcuuccagucaaaacaucacugaagaauuuuaucaaucaacaugcagugcaguuagcaaaggcuaucuuagugcuuuaagaacugguugguauacuaguguuauaacuauagaauuaaguaauaucaaggaaaauaaguguaauggaacagaugcuaagguaaaauugauaaaacaagaauuagauaaauauaaaaaugcuguaacagaauugcaguugcucaugcaaagcacaccagcagccaacaaucgagccagaagagaacuaccaagguuuaugaauuauacacucaacaauaccaaaaauaacaauguaacauuaagcaagaaaaggaaaagaagauuucuuggcuuuuuguuagguguuggaucugcaaucgccaguggcauugcuguaucuaaaguccugcaccuagaaggggaagugaacaaaaucaaaaaugcucuacuauccacaaacaaggcuguagucagcuuaucaaauggaguuagugucuuaaccagcaaaguguuagaccucaaaaacuauauagauaaacaguuguuacccauugugaacaagcaaagcugcagcauaucaaacauugaaacugugauagaauuccaacaaaagaacaacagacuacuagagauuaccagggaauuuaguguuaaugcagguguaacuacaccuguaagcacuuauauguuaacaaauagugaauuauuaucauuaaucaaugauaugccuauaacaaaugaucagaaaaaguuaauguccaacaauguucaaauaguuagacagcaaaguuacucuaucauguccauaauaaaggaggaagucuuagcauauguaguucaauuaccacuauaugguguaauagauacaccuuguuggaaacuacacacauccccucuaugcacaaccaacacaaaggaaggguccaacaucuguuuaacaagaaccgacagaggaugguacugugacaaugcaggaucagugucuuucuucccacaagcugaaacaugcaaaguucaaucgaaucgaguauuuugugacacaaugaacagucuaacauuaccaagugaaguaaaucucugcaacauugacauauucaacccuaaauaugauugcaaaauuaugacuucaaaaacagaugugagcagcuccguuaucacaucucuaggagccauugugucaugcuauggcaaaacuaaauguacagcauccaauaaaaaucguggaaucauaaagacauuuucuaacgggugugauuauguaucaaauaaggggguggacacuguaucuguagguaauacauuauauuauguaaauaagcaagaaggaaaaagccucuauguaaaaggugaaccaauaauaaauuucuaugacccauuaguguucccuucugaugaauuugaugcaucaauaucucaagucaaugagaagauuaaccagagccuagcauuuauucguaaauccgaugaauuauuacauaauguaaauguugguaaauccaccacaaauaucaugauaacuacuauaauuauagugauuauaguaauauuguuauuauuaauugcaguugggcuguuccuauacugcaaggccagaagcacaccagucacacuaagcaaggaucaacugagugguauaaauaauauugcauuuaguaacugaggacuaguguccaccugucccuccugggcugcuggauugucucguuuuccugccaaauaaacaggaucagcgcuuuacagaucuaaaaaaaaaaaaaaaaaaaaaaaaaaaaaaaaaaaaaaaaaaaaaaaaaaaaaaaaaaaaaaaaugcaucccccccccccccccccccccccccccccccaaaggcucuuuucagagccaccagaauu

SEQ ID NO: 11784 - RNA, 1994 nt, Artificial Sequence
  mRNA product Design b-2 comprising derived and/or modified sequence from HRSV(Memphis-37)__AIY60640.1__F0 (opt1)
gggagagccucugcuggaguccggggaguggcguuggcugcuagagcgaagcuuaccauggagcugcccauccucaagaccaacgccaucaccacgauccuggccgcggugacccugugcuucgccagcucccagaacaucaccgaggaguucuaccagagcacgugcuccgccgucagcaagggcuaccucuccgcccugcgcaccgggugguacaccagcgugaucaccaucgagcuguccaacaucaaggagaacaagugcaacggcaccgacgccaaggugaagcucaucaagcaggagcuggacaaguacaagaacgcggucacggagcugcagcuccugaugcagagcaccccggccgccaacaaccgggcccgccgggagcugccccgcuucaugaacuacacccucaacaacaccaagaacaacaacgugacgcuguccaagaagcggaagcgccgguuccugggguuccuccugggcguggggagcgcgaucgccuccggcaucgccgucagcaaggugcugcaccucgagggcgaggugaacaagaucaagaacgcccugcuguccaccaacaaggccgucgugagccucuccaacggggugagcguccugaccuccaaggugcuggaccucaagaacuacaucgacaagcagcugcugcccaucgugaacaagcagagcugcuccaucagcaacaucgagaccgucaucgaguuccagcagaagaacaaccgccuccuggagaucacgcgggaguucagcgugaacgcgggcgugaccacccccgucuccaccuacaugcugacgaacagcgagcuccugucccugaucaacgacaugccgaucaccaacgaccagaagaagcucaugagcaacaacgugcagaucgugcgccagcaguccuacagcaucauguccaucaucaaggaggagguccuggccuacguggugcagcugccccucuacggggucaucgacacccccugcuggaagcugcacaccagcccccugugcacgaccaacaccaaggagggcuccaacaucugccucacccggacggaccgcgggugguacugcgacaacgccggcagcguguccuucuucccgcaggccgagaccugcaagguccagagcaaccggguguucugcgacaccaugaacucccugacccugcccagcgaggugaaccucugcaacaucgacaucuucaaccccaaguacgacugcaagaucaugacguccaagaccgacgucagcuccagcgugaucaccucccugggcgccaucgugagcugcuacgggaagaccaagugcacggcgagcaacaagaaccgcggcaucaucaagaccuucuccaacgggugcgacuacgucagcaacaagggcguggacaccguguccgucggcaacacccuguacuacgugaacaagcaggagggcaagagccucuacgugaagggggagcccaucaucaacuucuacgacccgcuggucuuccccuccgacgaguucgacgccagcaucucccaggugaacgagaagaucaaccagagccuggccuucauccggaaguccgacgagcuccugcacaacgugaacgucggcaagagcaccacgaacaucaugaucaccaccaucaucaucgugaucaucgugauccugcugcuccugaucgccgucgggcuguuccucuacugcaaggcccgcuccacccccgugacgcugagcaaggaccagcuguccgggaucaacaacaucgcguucagcaacugaggacuaguguccaccugucccuccugggcugcuggauugucucguuuuccugccaaauaaacaggaucagcgcuuuacagaucuaaaaaaaaaaaaaaaaaaaaaaaaaaaaaaaaaaaaaaaaaaaaaaaaaaaaaaaaaaaaaaaaugcaucccccccccccccccccccccccccccccccaaaggcucuuuucagagccaccagaauu

SEQ ID NO: 11785 - RNA, 1994 nt, Artificial Sequence
  mRNA product Design b-2 comprising derived and/or modified sequence from HRSV(Memphis-37)__AIY60640.1__F0 (opt2)
gggagagccucugcuggaguccggggaguggcguuggcugcuagagcgaagcuuaccauggagcuccccauccucaagaccaacgccaucaccaccauccucgccgccgucacccucugcuucgccuccucccagaacaucaccgaggaguucuaccaguccaccugcuccgccgucuccaagggcuaccucuccgcccuccgcaccggcugguacaccuccgucaucaccaucgagcucuccaacaucaaggagaacaagugcaacggcaccgacgccaaggucaagcucaucaagcaggagcucgacaaguacaagaacgccgucaccgagcuccagcuccucaugcaguccacccccgccgccaacaaccgcgcccgccgcgagcucccccgcuucaugaacuacacccucaacaacaccaagaacaacaacgucacccucuccaagaagcgcaagcgccgcuuccucggcuuccuccucggcgucggcuccgccaucgccuccggcaucgccgucuccaagguccuccaccucgagggcgaggucaacaagaucaagaacgcccuccucuccaccaacaaggccgucgucucccucuccaacggcgucuccguccucaccuccaagguccucgaccucaagaacuacaucgacaagcagcuccuccccaucgucaacaagcaguccugcuccaucuccaacaucgagaccgucaucgaguuccagcagaagaacaaccgccuccucgagaucacccgcgaguucuccgucaacgccggcgucaccacccccgucuccaccuacaugcucaccaacuccgagcuccucucccucaucaacgacaugcccaucaccaacgaccagaagaagcucauguccaacaacguccagaucguccgccagcaguccuacuccaucauguccaucaucaaggaggagguccucgccuacgucguccagcucccccucuacggcgucaucgacacccccugcuggaagcuccacaccuccccccucugcaccaccaacaccaaggagggcuccaacaucugccucacccgcaccgaccgcggcugguacugcgacaacgccggcuccgucuccuucuucccccaggccgagaccugcaagguccaguccaaccgcgucuucugcgacaccaugaacucccucacccuccccuccgaggucaaccucugcaacaucgacaucuucaaccccaaguacgacugcaagaucaugaccuccaagaccgacgucuccuccuccgucaucaccucccucggcgccaucgucuccugcuacggcaagaccaagugcaccgccuccaacaagaaccgcggcaucaucaagaccuucuccaacggcugcgacuacgucuccaacaagggcgucgacaccgucuccgucggcaacacccucuacuacgucaacaagcaggagggcaagucccucuacgucaagggcgagcccaucaucaacuucuacgacccccucgucuuccccuccgacgaguucgacgccuccaucucccaggucaacgagaagaucaaccagucccucgccuucauccgcaaguccgacgagcuccuccacaacgucaacgucggcaaguccaccaccaacaucaugaucaccaccaucaucaucgucaucaucgucauccuccuccuccucaucgccgucggccucuuccucuacugcaaggcccgcuccacccccgucacccucuccaaggaccagcucuccggcaucaacaacaucgccuucuccaacugaggacuaguguccaccugucccuccugggcugcuggauugucucguuuuccugccaaauaaacaggaucagcgcuuuacagaucuaaaaaaaaaaaaaaaaaaaaaaaaaaaaaaaaaaaaaaaaaaaaaaaaaaaaaaaaaaaaaaaaugcaucccccccccccccccccccccccccccccccaaaggcucuuuucagagccaccagaauu

SEQ ID NO: 11786 - RNA, 1994 nt, Artificial Sequence
  mRNA product Design b-2 comprising derived and/or modified sequence from HRSV(Memphis-37)__AIY60640.1__F0 (opt3)
gggagagccucugcuggaguccggggaguggcguuggcugcuagagcgaagcuuaccauggagcugcccauccucaagaccaacgccauuacaacuauacuugcugcagugacgcugugcuucgccagcucccagaauaucaccgaagaguuuuaccaaucuacauguucagcggucaguaaaggcuauuugagcgcuuuaagaacugggugguacaccuccguuauuacaaucgaacugucuaacauuaaggagaauaaaugcaacggaaccgacgccaaggugaaacuaaucaagcaggaacucgauaaguauaaaaaugcaguaacugagcugcagcuucugaugcagucgaccccugccgcuaacaauagggcacggcgcgaguugccacgauucaugaacuacacacucaauaacacgaagaauaacaaugugacucugagcaaaaagcguaaaagaagguuucuggguuuccucuuaggcgucgggucagccauagcuaguggaaucgccguguccaagguucugcaccuugaaggcgaggugaacaagauuaaaaaugcguugcugucuaccaacaaggcagucgugagccuauccaacgguguaucaguucucacaaguaaagugcuggaccuuaagaauuauaucgauaaacaacuguugccgauugucaacaagcagagcuguucuaucuccaauauagaaacugugauugaguuucagcagaaaaacaaucggcuccuggagaucacccgcgaguucucagugaacgccggggucacaacccccguuagcacguacauguuaacuaauagugaacugcucucucuuauuaacgacaugccuaucacaaaugaucaaaagaagcugauguccaacaaugugcagaucguaagacagcagagcuauucgauuaugucuauaaucaaagaagagguguuggcuuacgucgugcaacuaccacuguacggaguuauugacacccccugcuggaagcuccauacuuccccucuguguacaaccaacacgaaagaaggcucaaauaucugccuuaccaggacagaucggggcugguauugugacaacgccgggagugugagcuuuuucccacaggcagagacuugcaagguccaguccaaucgcguguuuugugauaccaugaacucucugacauugcccagcgagguaaaccucugcaauauagacauuuucaacccuaaauacgauuguaagaucaugacuucaaagaccgacguuaguuccagcgugaucacaucucugggagcuauugucucaugcuaugguaaaaccaagugcacugccaguaauaaaaaccgaggcaucauuaagacguuuagcaaugggugugauuacguguccaacaaaggagucgacacagugucuguuggcaauaccuuauauuacgugaacaagcaagaagguaagucgcuguauguaaaaggggagccaauaaucaauuucuacgacccgcuagucuuucccagcgaugaguucgacgcguccauuucacaggugaacgaaaagaucaaucagagucucgccuucaucagaaaaucugaugaacugcuucacaacguuaaugugggaaagagcacuaccaacauuaugauaacaaccaucauuaucgucauuaucgugauauugcugcuccugaucgcaguaggccuuuuucuguacugcaaagcuagguccacuccugugacauugucaaaggaccagcucagcggcauuaauaacaucgccuucucuaacugaggacuaguguccaccugucccuccugggcugcuggauugucucguuuuccugccaaauaaacaggaucagcgcuuuacagaucuaaaaaaaaaaaaaaaaaaaaaaaaaaaaaaaaaaaaaaaaaaaaaaaaaaaaaaaaaaaaaaaaugcaucccccccccccccccccccccccccccccccaaaggcucuuuucagagccaccagaauu

SEQ ID NO: 11787 - RNA, 1994 nt, Artificial Sequence
  mRNA product Design b-2 comprising derived and/or modified sequence from HRSV(Memphis-37)__AIY60640.1__F0 (opt4)
gggagagccucugcuggaguccggggaguggcguuggcugcuagagcgaagcuuaccauggagcugcccauccugaagaccaacgccaucaccaccauccuggccgccgugacccugugcuucgccagcagccagaacaucaccgaggaguucuaccagagcaccugcagcgccgugagcaagggcuaccugagcgcccugagaaccggcugguacaccagcgugaucaccaucgagcugagcaacaucaaggagaacaagugcaacggcaccgacgccaaggugaagcugaucaagcaggagcuggacaaguacaagaacgccgugaccgagcugcagcugcugaugcagagcacccccgccgccaacaacagagccagaagagagcugcccagauucaugaacuacacccugaacaacaccaagaacaacaacgugacccugagcaagaagagaaagagaagauuccugggcuuccugcugggcgugggcagcgccaucgccagcggcaucgccgugagcaaggugcugcaccuggagggcgaggugaacaagaucaagaacgcccugcugagcaccaacaaggccguggugagccugagcaacggcgugagcgugcugaccagcaaggugcuggaccugaagaacuacaucgacaagcagcugcugcccaucgugaacaagcagagcugcagcaucagcaacaucgagaccgugaucgaguuccagcagaagaacaacagacugcuggagaucaccagagaguucagcgugaacgccggcgugaccacccccgugagcaccuacaugcugaccaacagcgagcugcugagccugaucaacgacaugcccaucaccaacgaccagaagaagcugaugagcaacaacgugcagaucgugagacagcagagcuacagcaucaugagcaucaucaaggaggaggugcuggccuacguggugcagcugccccuguacggcgugaucgacacccccugcuggaagcugcacaccagcccccugugcaccaccaacaccaaggagggcagcaacaucugccugaccagaaccgacagaggcugguacugcgacaacgccggcagcgugagcuucuucccccaggccgagaccugcaaggugcagagcaacagaguguucugcgacaccaugaacagccugacccugcccagcgaggugaaccugugcaacaucgacaucuucaaccccaaguacgacugcaagaucaugaccagcaagaccgacgugagcagcagcgugaucaccagccugggcgccaucgugagcugcuacggcaagaccaagugcaccgccagcaacaagaacagaggcaucaucaagaccuucagcaacggcugcgacuacgugagcaacaagggcguggacaccgugagcgugggcaacacccuguacuacgugaacaagcaggagggcaagagccuguacgugaagggcgagcccaucaucaacuucuacgacccccugguguuccccagcgacgaguucgacgccagcaucagccaggugaacgagaagaucaaccagagccuggccuucaucagaaagagcgacgagcugcugcacaacgugaacgugggcaagagcaccaccaacaucaugaucaccaccaucaucaucgugaucaucgugauccugcugcugcugaucgccgugggccuguuccuguacugcaaggccagaagcacccccgugacccugagcaaggaccagcugagcggcaucaacaacaucgccuucagcaacugaggacuaguguccaccugucccuccugggcugcuggauugucucguuuuccugccaaauaaacaggaucagcgcuuuacagaucuaaaaaaaaaaaaaaaaaaaaaaaaaaaaaaaaaaaaaaaaaaaaaaaaaaaaaaaaaaaaaaaaugcaucccccccccccccccccccccccccccccccaaaggcucuuuucagagccaccagaauu

SEQ ID NO: 11788 - RNA, 1994 nt, Artificial Sequence
  mRNA product Design b-2 comprising derived and/or modified sequence from HRSV(Memphis-37)__AIY60640.1__F0 (opt5)
gggagagccucugcuggaguccggggaguggcguuggcugcuagagcgaagcuuaccauggagcugcccauccucaagaccaacgccauuacaacgauccuggcugccgugacccuuugcuucgcgagcucccagaauauuacagaagaguuuuaccaaucuaccuguagcgcugucuccaaaggcuaucugucugcccucagaacagggugguacaccagcguuaucacaauugaacuguccaacaucaaggagaauaaaugcaacggaaccgacgccaaggugaaacuuaucaagcaggaacuggauaaguauaaaaaugcugugacggagcuccagcugcugaugcagucuaccccugccgcuaacaaucgggcccgcagagagcucccgcgguucaugaacuacacacugaauaacaccaagaauaacaaugucacacuuagcaaaaagcgcaaaagacgguuucugggcuuccuccugggggugggauccgcgauugccagcggcaucgcuguuucuaaggugcuucaccuggaaggggaggucaacaagauuaaaaaugcccuccuguccaccaacaaggcugugguuagccugucuaacggaguguccguccucacgagcaaagugcuggaccuuaagaauuauaucgauaaacaacugcuccccauugugaacaagcagucuuguuccaucagcaauauugaaacagucaucgaguuucagcagaaaaacaaucgccugcuugagaucaccagagaauuuuccguuaacgccggcgugacaaccccugugucuaccuacaugcugacaaauagcgagcuccugucccugauuaacgacaugcccaucacgaaugaucaaaagaagcucaugagcaacaauguccagauugugcggcagcagucuuauuccaucaugagcauuaucaaagaagagguucuggcguacgugguccaacuuccucuguacggcgugaucgacacccccugcuggaagcuccauacaucuccucuguguaccacaaacaccaaagaagggagcaauauuugccuuacgcgcacagauagaggaugguauugugacaacgccggcuccguuucuuucuucccgcaggcugagaccugcaaggugcagagcaaucgggucuuuugugauaccaugaacucccugacacuccccagcgaggugaaccugugcaauaucgacauuuucaacccuaaauacgauuguaagaucaugaccucuaagacagacgucuccagcucugugauuacgucccugggggccaucguuagcugcuauggaaaaaccaagugcacagcuuccaauaaaaaccgcggcaucauuaagaccuuuucuaaugggugugauuacgugagcaacaaaggagucgacacaguguccguuggcaauacccucuauuacgugaacaagcaagaaggcaagucucuguaugucaaaggggagcccaucauuaauuucuacgacccucuuguguuucccagcgaugaguucgacgccuccaucagccaggugaacgaaaagauuaaucagucucuggccuucaucagaaaauccgaugaacuccugcacaacguuaaugucggaaagagcacgaccaacauuaugaucacaaccaucauuaucgugauuaucgugauucugcuucuccugaucgcugucggccuguuucucuacugcaaagcgcggucuacaccggugacccuguccaaggaccagcuuagcgggaucaauaacauugccuucucuaacugaggacuaguguccaccugucccuccugggcugcuggauugucucguuuuccugccaaauaaacaggaucagcgcuuuacagaucuaaaaaaaaaaaaaaaaaaaaaaaaaaaaaaaaaaaaaaaaaaaaaaaaaaaaaaaaaaaaaaaaugcaucccccccccccccccccccccccccccccccaaaggcucuuuucagagccaccagaauu

SEQ ID NO: 11789 - RNA, 1994 nt, Artificial Sequence
  mRNA product Design b-2 comprising derived and/or modified sequence from HRSV(Memphis-37)__AIY60640.1__F0 (opt6)
gggagagccucugcuggaguccggggaguggcguuggcugcuagagcgaagcuuaccauggaacugccuauucuaaaaacaaaugccauaacaacaauucuugcagcaguaacauuauguuuugcaucaucacaaaacauuacagaagaauuuuaccaauccacuugcucagccguaucaaaaggauaccuaucagccuuaagaacagguugguacaccucaguaauaaccauagaacuaucaaacauaaaagaaaacaaaugcaaugguacugaugcaaaagucaaacuaaucaaacaagaacuggacaaauacaaaaaugcaguaaccgaacuacaacuccuaaugcaauccacaccugcagccaacaacagagcaagacgcgaacuaccaagauuuaugaauuacacauuaaacaacaccaagaacaacaauguaacucucucaaaaaaaagaaaaagacgcuuucuagguuuccuccuaggcgucggaucugcaauagccucaggaauagcaguaucaaaaguucuacaccuagaaggagaaguaaacaaaauuaaaaacgcauuacuaucaaccaacaaagcaguuguaucccuuucaaauggagucucuguacuuacaucaaaaguacucgaccuaaaaaacuauauagacaaacaacuacucccaauagucaauaagcaaucaugcagcauaucaaacauagaaacaguuauagaauuucaacaaaaaaacaacagacuacucgaaauaaccagagaauuuagcgucaacgcaggcguaaccacaccgguauccacauacaugcuuacaaacucagaacuccucucacuaauaaacgacaugccaauaacuaaugaccaaaaaaaacuaaugucaaacaauguccaaauaguccgucaacaaucauacucaauaaugucaauaauaaaagaagaaguauuagcauauguaguccaacuaccauuauacggcguuauagacacaccuuguuggaaacuucacacauccccacucuguacaaccaacacaaaagaagguuccaauauaugccuaacuagaaccgacagaggaugguauugcgacaacgcaggaucuguaucauucuuuccccaagcagaaacauguaaaguacaaaguaaccgcguauucugcgacaccaugaacucauuaacccucccauccgaaguuaauuuaugcaauauagacauauuuaauccuaaauacgacugcaaaauaaugacaucaaaaacagacguuaguuccuccguaaucacaucuuugggcgcaauagucucaugcuauggaaaaacaaaaugcacagccucaaacaaaaauagaggaauaauaaaaacauucagcaacggcugugauuauguauccaacaaaggaguagacacaguauccguaggcaauacccuuuacuacguuaauaaacaagaaggaaaaucauuauacgucaaaggagaaccuaucauaaauuucuacgacccauuaguauucccuucagacgaauuugaugccucaauaucccaagucaaugaaaaaaucaaccaaucacuagccuuuauccgcaaaucagacgaauuacuacacaacguaaacguaggcaaaucaacaacuaauauaaugauaacaacaauaauaauaguaauuauaguaauauuauuacuacuaaucgccguagguuuauucuuauacuguaaagcacgaucaacaccaguuacacucucaaaagaucaacuaucaggaauaaacaacauagcauuuuccaauuaaggacuaguguccaccugucccuccugggcugcuggauugucucguuuuccugccaaauaaacaggaucagcgcuuuacagaucuaaaaaaaaaaaaaaaaaaaaaaaaaaaaaaaaaaaaaaaaaaaaaaaaaaaaaaaaaaaaaaaaugcaucccccccccccccccccccccccccccccccaaaggcucuuuucagagccaccagaauu

SEQ ID NO: 11790 - RNA, 1994 nt, Artificial Sequence
  mRNA product Design b-2 comprising derived and/or modified sequence from HRSV(Memphis-37)__AIY60640.1__F0 (opt11)
gggagagccucugcuggaguccggggaguggcguuggcugcuagagcgaagcuuaccauggaacuccccauccucaaaacaaacgccauaaccacuauccucgccgccgucacccucugcuucgccuccucccaaaacaucacagaggaguucuaccaauccacaugcuccgccgucuccaaaggcuaccucagcgcccuacguaccggcugguacaccagcgucaucacaauagaacucuccaacaucaaggaaaacaaaugcaacggcaccgaugccaaaguaaaacucaucaaacaagaacucgauaaauacaaaaacgccgucaccgaacuacaacuccuaaugcaaagcacacccgccgccaacaacagagcacggcgcgaacugccccgcuucaugaacuacacccucaacaacaccaaaaauaacaacgucacccuauccaagaaacgcaaacgccgauuccucgguuuccuacucggcguaggaagcgccauagccucaggcaucgccgucuccaaaguccuccaucuggaaggcgaagucaacaaaaucaaaaacgcacucuuauccaccaacaaagccgucgucucccucucgaacggggucuccguccuuaccuccaaaguccucgaccuuaaaaacuacaucgacaaacaacuacuaccaauagucaauaaacaauccugcuccaucucaaacauagaaaccgucauagaguuccaacagaagaacaaucgccuccucgaaauaacucgcgaguucuccgucaacgcaggcgucacgaccccugucucaacauacaugcuaacuaacucagaacuccuaagccuaaucaacgacaugcccaucacaaacgaccaaaagaaacucaugagcaacaauguccagauagucagacagcaauccuauagcaucaugucuauaauaaaagaagaagugcucgccuacguaguccaacucccucuuuacggcgucauagacacacccugcuggaaacuccacacaucuccucucugcaccaccaacacaaaagaaggcagcaacaucugccugacccgaaccgaccgcggaugguacugcgacaacgcuggcuccgugucuuucuuuccccaagccgaaaccugcaaaguccaguccaaccgcgucuucugcgacacaaugaacucccucacccuacccuccgaaguuaaccucugcaacaucgacaucuucaauccaaaauacgacugcaaaaucaugaccucgaaaacggacguauccuccuccgucauaacaucacuuggagccaucguuagcugcuacggaaaaaccaaauguaccgccuccaacaaaaaccgcggaauaaucaaaacauucuccaacggcugcgacuacguaagcaacaaaggggucgauacugucuccguagguaacacccuauacuacgucaacaaacaagaaggaaaaucacuauacguuaaaggcgaacccauuaucaacuucuacgacccccucguuuucccauccgacgaguucgacgccuccauaagccaaguuaacgaaaagauaaaccaaucgcucgcauucauccgcaaauccgacgaacuccuacacaacgucaacgugggcaaauccacaacaaacaucaugaucaccaccaucauuaucgucauaauagucauccuccuccugcucaucgccgugggacuauuccuauacugcaaagcccgcucgacgcccgucacacuuuccaaagaccaacuaagcggaaucaacaacauagcguucagcaauuaaggacuaguguccaccugucccuccugggcugcuggauugucucguuuuccugccaaauaaacaggaucagcgcuuuacagaucuaaaaaaaaaaaaaaaaaaaaaaaaaaaaaaaaaaaaaaaaaaaaaaaaaaaaaaaaaaaaaaaaugcaucccccccccccccccccccccccccccccccaaaggcucuuuucagagccaccagaauu

SEQ ID NO: 11791 - RNA, 2014 nt, Artificial Sequence
  mRNA product Design b-3 comprising derived and/or modified sequence from HRSV(Memphis-37)__AIY60640.1__F0 (wt)
gggagagucccgcagucggcguccagcggcucugcuuguucgugugugugucguugcaggccuuauucaagcuuaccauggaguugccaauccucaaaacaaaugcaauuaccacaauccuugcugcagucacacucuguuucgcuuccagucaaaacaucacugaagaauuuuaucaaucaacaugcagugcaguuagcaaaggcuaucuuagugcuuuaagaacugguugguauacuaguguuauaacuauagaauuaaguaauaucaaggaaaauaaguguaauggaacagaugcuaagguaaaauugauaaaacaagaauuagauaaauauaaaaaugcuguaacagaauugcaguugcucaugcaaagcacaccagcagccaacaaucgagccagaagagaacuaccaagguuuaugaauuauacacucaacaauaccaaaaauaacaauguaacauuaagcaagaaaaggaaaagaagauuucuuggcuuuuuguuagguguuggaucugcaaucgccaguggcauugcuguaucuaaaguccugcaccuagaaggggaagugaacaaaaucaaaaaugcucuacuauccacaaacaaggcuguagucagcuuaucaaauggaguuagugucuuaaccagcaaaguguuagaccucaaaaacuauauagauaaacaguuguuacccauugugaacaagcaaagcugcagcauaucaaacauugaaacugugauagaauuccaacaaaagaacaacagacuacuagagauuaccagggaauuuaguguuaaugcagguguaacuacaccuguaagcacuuauauguuaacaaauagugaauuauuaucauuaaucaaugauaugccuauaacaaaugaucagaaaaaguuaauguccaacaauguucaaauaguuagacagcaaaguuacucuaucauguccauaauaaaggaggaagucuuagcauauguaguucaauuaccacuauaugguguaauagauacaccuuguuggaaacuacacacauccccucuaugcacaaccaacacaaaggaaggguccaacaucuguuuaacaagaaccgacagaggaugguacugugacaaugcaggaucagugucuuucuucccacaagcugaaacaugcaaaguucaaucgaaucgaguauuuugugacacaaugaacagucuaacauuaccaagugaaguaaaucucugcaacauugacauauucaacccuaaauaugauugcaaaauuaugacuucaaaaacagaugugagcagcuccguuaucacaucucuaggagccauugugucaugcuauggcaaaacuaaauguacagcauccaauaaaaaucguggaaucauaaagacauuuucuaacgggugugauuauguaucaaauaaggggguggacacuguaucuguagguaauacauuauauuauguaaauaagcaagaaggaaaaagccucuauguaaaaggugaaccaauaauaaauuucuaugacccauuaguguucccuucugaugaauuugaugcaucaauaucucaagucaaugagaagauuaaccagagccuagcauuuauucguaaauccgaugaauuauuacauaauguaaauguugguaaauccaccacaaauaucaugauaacuacuauaauuauagugauuauaguaauauuguuauuauuaauugcaguugggcuguuccuauacugcaaggccagaagcacaccagucacacuaagcaaggaucaacugagugguauaaauaauauugcauuuaguaacugaggacuaguguccaccugucccuccugggcugcuggauugucucguuuuccugccaaauaaacaggaucagcgcuuuacagaucuaaaaaaaaaaaaaaaaaaaaaaaaaaaaaaaaaaaaaaaaaaaaaaaaaaaaaaaaaaaaaaaaugcaucccccccccccccccccccccccccccccccaaaggcucuuuucagagccaccagaauu

SEQ ID NO: 11792 - RNA, 2014 nt, Artificial Sequence
  mRNA product Design b-3 comprising derived and/or modified sequence from HRSV(Memphis-37)__AIY60640.1__F0 (opt1)
gggagagucccgcagucggcguccagcggcucugcuuguucgugugugugucguugcaggccuuauucaagcuuaccauggagcugcccauccucaagaccaacgccaucaccacgauccuggccgcggugacccugugcuucgccagcucccagaacaucaccgaggaguucuaccagagcacgugcuccgccgucagcaagggcuaccucuccgcccugcgcaccgggugguacaccagcgugaucaccaucgagcuguccaacaucaaggagaacaagugcaacggcaccgacgccaaggugaagcucaucaagcaggagcuggacaaguacaagaacgcggucacggagcugcagcuccugaugcagagcaccccggccgccaacaaccgggcccgccgggagcugccccgcuucaugaacuacacccucaacaacaccaagaacaacaacgugacgcuguccaagaagcggaagcgccgguuccugggguuccuccugggcguggggagcgcgaucgccuccggcaucgccgucagcaaggugcugcaccucgagggcgaggugaacaagaucaagaacgcccugcuguccaccaacaaggccgucgugagccucuccaacggggugagcguccugaccuccaaggugcuggaccucaagaacuacaucgacaagcagcugcugcccaucgugaacaagcagagcugcuccaucagcaacaucgagaccgucaucgaguuccagcagaagaacaaccgccuccuggagaucacgcgggaguucagcgugaacgcgggcgugaccacccccgucuccaccuacaugcugacgaacagcgagcuccugucccugaucaacgacaugccgaucaccaacgaccagaagaagcucaugagcaacaacgugcagaucgugcgccagcaguccuacagcaucauguccaucaucaaggaggagguccuggccuacguggugcagcugccccucuacggggucaucgacacccccugcuggaagcugcacaccagcccccugugcacgaccaacaccaaggagggcuccaacaucugccucacccggacggaccgcgggugguacugcgacaacgccggcagcguguccuucuucccgcaggccgagaccugcaagguccagagcaaccggguguucugcgacaccaugaacucccugacccugcccagcgaggugaaccucugcaacaucgacaucuucaaccccaaguacgacugcaagaucaugacguccaagaccgacgucagcuccagcgugaucaccucccugggcgccaucgugagcugcuacgggaagaccaagugcacggcgagcaacaagaaccgcggcaucaucaagaccuucuccaacgggugcgacuacgucagcaacaagggcguggacaccguguccgucggcaacacccuguacuacgugaacaagcaggagggcaagagccucuacgugaagggggagcccaucaucaacuucuacgacccgcuggucuuccccuccgacgaguucgacgccagcaucucccaggugaacgagaagaucaaccagagccuggccuucauccggaaguccgacgagcuccugcacaacgugaacgucggcaagagcaccacgaacaucaugaucaccaccaucaucaucgugaucaucgugauccugcugcuccugaucgccgucgggcuguuccucuacugcaaggcccgcuccacccccgugacgcugagcaaggaccagcuguccgggaucaacaacaucgcguucagcaacugaggacuaguguccaccugucccuccugggcugcuggauugucucguuuuccugccaaauaaacaggaucagcgcuuuacagaucuaaaaaaaaaaaaaaaaaaaaaaaaaaaaaaaaaaaaaaaaaaaaaaaaaaaaaaaaaaaaaaaaugcaucccccccccccccccccccccccccccccccaaaggcucuuuucagagccaccagaauu

SEQ ID NO: 11793 - RNA, 2014 nt, Artificial Sequence
  mRNA product Design b-3 comprising derived and/or modified sequence from HRSV(Memphis-37)__AIY60640.1__F0 (opt2)
gggagagucccgcagucggcguccagcggcucugcuuguucgugugugugucguugcaggccuuauucaagcuuaccauggagcuccccauccucaagaccaacgccaucaccaccauccucgccgccgucacccucugcuucgccuccucccagaacaucaccgaggaguucuaccaguccaccugcuccgccgucuccaagggcuaccucuccgcccuccgcaccggcugguacaccuccgucaucaccaucgagcucuccaacaucaaggagaacaagugcaacggcaccgacgccaaggucaagcucaucaagcaggagcucgacaaguacaagaacgccgucaccgagcuccagcuccucaugcaguccacccccgccgccaacaaccgcgcccgccgcgagcucccccgcuucaugaacuacacccucaacaacaccaagaacaacaacgucacccucuccaagaagcgcaagcgccgcuuccucggcuuccuccucggcgucggcuccgccaucgccuccggcaucgccgucuccaagguccuccaccucgagggcgaggucaacaagaucaagaacgcccuccucuccaccaacaaggccgucgucucccucuccaacggcgucuccguccucaccuccaagguccucgaccucaagaacuacaucgacaagcagcuccuccccaucgucaacaagcaguccugcuccaucuccaacaucgagaccgucaucgaguuccagcagaagaacaaccgccuccucgagaucacccgcgaguucuccgucaacgccggcgucaccacccccgucuccaccuacaugcucaccaacuccgagcuccucucccucaucaacgacaugcccaucaccaacgaccagaagaagcucauguccaacaacguccagaucguccgccagcaguccuacuccaucauguccaucaucaaggaggagguccucgccuacgucguccagcucccccucuacggcgucaucgacacccccugcuggaagcuccacaccuccccccucugcaccaccaacaccaaggagggcuccaacaucugccucacccgcaccgaccgcggcugguacugcgacaacgccggcuccgucuccuucuucccccaggccgagaccugcaagguccaguccaaccgcgucuucugcgacaccaugaacucccucacccuccccuccgaggucaaccucugcaacaucgacaucuucaaccccaaguacgacugcaagaucaugaccuccaagaccgacgucuccuccuccgucaucaccucccucggcgccaucgucuccugcuacggcaagaccaagugcaccgccuccaacaagaaccgcggcaucaucaagaccuucuccaacggcugcgacuacgucuccaacaagggcgucgacaccgucuccgucggcaacacccucuacuacgucaacaagcaggagggcaagucccucuacgucaagggcgagcccaucaucaacuucuacgacccccucgucuuccccuccgacgaguucgacgccuccaucucccaggucaacgagaagaucaaccagucccucgccuucauccgcaaguccgacgagcuccuccacaacgucaacgucggcaaguccaccaccaacaucaugaucaccaccaucaucaucgucaucaucgucauccuccuccuccucaucgccgucggccucuuccucuacugcaaggcccgcuccacccccgucacccucuccaaggaccagcucuccggcaucaacaacaucgccuucuccaacugaggacuaguguccaccugucccuccugggcugcuggauugucucguuuuccugccaaauaaacaggaucagcgcuuuacagaucuaaaaaaaaaaaaaaaaaaaaaaaaaaaaaaaaaaaaaaaaaaaaaaaaaaaaaaaaaaaaaaaaugcaucccccccccccccccccccccccccccccccaaaggcucuuuucagagccaccagaauu

SEQ ID NO: 11794 - RNA, 2014 nt, Artificial Sequence
  mRNA product Design b-3 comprising derived and/or modified sequence from HRSV(Memphis-37)__AIY60640.1__F0 (opt3)
gggagagucccgcagucggcguccagcggcucugcuuguucgugugugugucguugcaggccuuauucaagcuuaccauggagcugcccauccucaagaccaacgccauuacaacuauacuugcugcagugacgcugugcuucgccagcucccagaauaucaccgaagaguuuuaccaaucuacauguucagcggucaguaaaggcuauuugagcgcuuuaagaacugggugguacaccuccguuauuacaaucgaacugucuaacauuaaggagaauaaaugcaacggaaccgacgccaaggugaaacuaaucaagcaggaacucgauaaguauaaaaaugcaguaacugagcugcagcuucugaugcagucgaccccugccgcuaacaauagggcacggcgcgaguugccacgauucaugaacuacacacucaauaacacgaagaauaacaaugugacucugagcaaaaagcguaaaagaagguuucuggguuuccucuuaggcgucgggucagccauagcuaguggaaucgccguguccaagguucugcaccuugaaggcgaggugaacaagauuaaaaaugcguugcugucuaccaacaaggcagucgugagccuauccaacgguguaucaguucucacaaguaaagugcuggaccuuaagaauuauaucgauaaacaacuguugccgauugucaacaagcagagcuguucuaucuccaauauagaaacugugauugaguuucagcagaaaaacaaucggcuccuggagaucacccgcgaguucucagugaacgccggggucacaacccccguuagcacguacauguuaacuaauagugaacugcucucucuuauuaacgacaugccuaucacaaaugaucaaaagaagcugauguccaacaaugugcagaucguaagacagcagagcuauucgauuaugucuauaaucaaagaagagguguuggcuuacgucgugcaacuaccacuguacggaguuauugacacccccugcuggaagcuccauacuuccccucuguguacaaccaacacgaaagaaggcucaaauaucugccuuaccaggacagaucggggcugguauugugacaacgccgggagugugagcuuuuucccacaggcagagacuugcaagguccaguccaaucgcguguuuugugauaccaugaacucucugacauugcccagcgagguaaaccucugcaauauagacauuuucaacccuaaauacgauuguaagaucaugacuucaaagaccgacguuaguuccagcgugaucacaucucugggagcuauugucucaugcuaugguaaaaccaagugcacugccaguaauaaaaaccgaggcaucauuaagacguuuagcaaugggugugauuacguguccaacaaaggagucgacacagugucuguuggcaauaccuuauauuacgugaacaagcaagaagguaagucgcuguauguaaaaggggagccaauaaucaauuucuacgacccgcuagucuuucccagcgaugaguucgacgcguccauuucacaggugaacgaaaagaucaaucagagucucgccuucaucagaaaaucugaugaacugcuucacaacguuaaugugggaaagagcacuaccaacauuaugauaacaaccaucauuaucgucauuaucgugauauugcugcuccugaucgcaguaggccuuuuucuguacugcaaagcuagguccacuccugugacauugucaaaggaccagcucagcggcauuaauaacaucgccuucucuaacugaggacuaguguccaccugucccuccugggcugcuggauugucucguuuuccugccaaauaaacaggaucagcgcuuuacagaucuaaaaaaaaaaaaaaaaaaaaaaaaaaaaaaaaaaaaaaaaaaaaaaaaaaaaaaaaaaaaaaaaugcaucccccccccccccccccccccccccccccccaaaggcucuuuucagagccaccagaauu

SEQ ID NO: 11795 - RNA, 2014 nt, Artificial Sequence
  mRNA product Design b-3 comprising derived and/or modified sequence from HRSV(Memphis-37)__AIY60640.1__F0 (opt4)
gggagagucccgcagucggcguccagcggcucugcuuguucgugugugugucguugcaggccuuauucaagcuuaccauggagcugcccauccugaagaccaacgccaucaccaccauccuggccgccgugacccugugcuucgccagcagccagaacaucaccgaggaguucuaccagagcaccugcagcgccgugagcaagggcuaccugagcgcccugagaaccggcugguacaccagcgugaucaccaucgagcugagcaacaucaaggagaacaagugcaacggcaccgacgccaaggugaagcugaucaagcaggagcuggacaaguacaagaacgccgugaccgagcugcagcugcugaugcagagcacccccgccgccaacaacagagccagaagagagcugcccagauucaugaacuacacccugaacaacaccaagaacaacaacgugacccugagcaagaagagaaagagaagauuccugggcuuccugcugggcgugggcagcgccaucgccagcggcaucgccgugagcaaggugcugcaccuggagggcgaggugaacaagaucaagaacgcccugcugagcaccaacaaggccguggugagccugagcaacggcgugagcgugcugaccagcaaggugcuggaccugaagaacuacaucgacaagcagcugcugcccaucgugaacaagcagagcugcagcaucagcaacaucgagaccgugaucgaguuccagcagaagaacaacagacugcuggagaucaccagagaguucagcgugaacgccggcgugaccacccccgugagcaccuacaugcugaccaacagcgagcugcugagccugaucaacgacaugcccaucaccaacgaccagaagaagcugaugagcaacaacgugcagaucgugagacagcagagcuacagcaucaugagcaucaucaaggaggaggugcuggccuacguggugcagcugccccuguacggcgugaucgacacccccugcuggaagcugcacaccagcccccugugcaccaccaacaccaaggagggcagcaacaucugccugaccagaaccgacagaggcugguacugcgacaacgccggcagcgugagcuucuucccccaggccgagaccugcaaggugcagagcaacagaguguucugcgacaccaugaacagccugacccugcccagcgaggugaaccugugcaacaucgacaucuucaaccccaaguacgacugcaagaucaugaccagcaagaccgacgugagcagcagcgugaucaccagccugggcgccaucgugagcugcuacggcaagaccaagugcaccgccagcaacaagaacagaggcaucaucaagaccuucagcaacggcugcgacuacgugagcaacaagggcguggacaccgugagcgugggcaacacccuguacuacgugaacaagcaggagggcaagagccuguacgugaagggcgagcccaucaucaacuucuacgacccccugguguuccccagcgacgaguucgacgccagcaucagccaggugaacgagaagaucaaccagagccuggccuucaucagaaagagcgacgagcugcugcacaacgugaacgugggcaagagcaccaccaacaucaugaucaccaccaucaucaucgugaucaucgugauccugcugcugcugaucgccgugggccuguuccuguacugcaaggccagaagcacccccgugacccugagcaaggaccagcugagcggcaucaacaacaucgccuucagcaacugaggacuaguguccaccugucccuccugggcugcuggauugucucguuuuccugccaaauaaacaggaucagcgcuuuacagaucuaaaaaaaaaaaaaaaaaaaaaaaaaaaaaaaaaaaaaaaaaaaaaaaaaaaaaaaaaaaaaaaaugcaucccccccccccccccccccccccccccccccaaaggcucuuuucagagccaccagaauu

SEQ ID NO: 11796 - RNA, 2014 nt, Artificial Sequence
  mRNA product Design b-3 comprising derived and/or modified sequence from HRSV(Memphis-37)__AIY60640.1__F0 (opt5)
gggagagucccgcagucggcguccagcggcucugcuuguucgugugugugucguugcaggccuuauucaagcuuaccauggagcugcccauccucaagaccaacgccauuacaacgauccuggcugccgugacccuuugcuucgcgagcucccagaauauuacagaagaguuuuaccaaucuaccuguagcgcugucuccaaaggcuaucugucugcccucagaacagggugguacaccagcguuaucacaauugaacuguccaacaucaaggagaauaaaugcaacggaaccgacgccaaggugaaacuuaucaagcaggaacuggauaaguauaaaaaugcugugacggagcuccagcugcugaugcagucuaccccugccgcuaacaaucgggcccgcagagagcucccgcgguucaugaacuacacacugaauaacaccaagaauaacaaugucacacuuagcaaaaagcgcaaaagacgguuucugggcuuccuccugggggugggauccgcgauugccagcggcaucgcuguuucuaaggugcuucaccuggaaggggaggucaacaagauuaaaaaugcccuccuguccaccaacaaggcugugguuagccugucuaacggaguguccguccucacgagcaaagugcuggaccuuaagaauuauaucgauaaacaacugcuccccauugugaacaagcagucuuguuccaucagcaauauugaaacagucaucgaguuucagcagaaaaacaaucgccugcuugagaucaccagagaauuuuccguuaacgccggcgugacaaccccugugucuaccuacaugcugacaaauagcgagcuccugucccugauuaacgacaugcccaucacgaaugaucaaaagaagcucaugagcaacaauguccagauugugcggcagcagucuuauuccaucaugagcauuaucaaagaagagguucuggcguacgugguccaacuuccucuguacggcgugaucgacacccccugcuggaagcuccauacaucuccucuguguaccacaaacaccaaagaagggagcaauauuugccuuacgcgcacagauagaggaugguauugugacaacgccggcuccguuucuuucuucccgcaggcugagaccugcaaggugcagagcaaucgggucuuuugugauaccaugaacucccugacacuccccagcgaggugaaccugugcaauaucgacauuuucaacccuaaauacgauuguaagaucaugaccucuaagacagacgucuccagcucugugauuacgucccugggggccaucguuagcugcuauggaaaaaccaagugcacagcuuccaauaaaaaccgcggcaucauuaagaccuuuucuaaugggugugauuacgugagcaacaaaggagucgacacaguguccguuggcaauacccucuauuacgugaacaagcaagaaggcaagucucuguaugucaaaggggagcccaucauuaauuucuacgacccucuuguguuucccagcgaugaguucgacgccuccaucagccaggugaacgaaaagauuaaucagucucuggccuucaucagaaaauccgaugaacuccugcacaacguuaaugucggaaagagcacgaccaacauuaugaucacaaccaucauuaucgugauuaucgugauucugcuucuccugaucgcugucggccuguuucucuacugcaaagcgcggucuacaccggugacccuguccaaggaccagcuuagcgggaucaauaacauugccuucucuaacugaggacuaguguccaccugucccuccugggcugcuggauugucucguuuuccugccaaauaaacaggaucagcgcuuuacagaucuaaaaaaaaaaaaaaaaaaaaaaaaaaaaaaaaaaaaaaaaaaaaaaaaaaaaaaaaaaaaaaaaugcaucccccccccccccccccccccccccccccccaaaggcucuuuucagagccaccagaauu

SEQ ID NO: 11797 - RNA, 2014 nt, Artificial Sequence
  mRNA product Design b-3 comprising derived and/or modified sequence from HRSV(Memphis-37)__AIY60640.1__F0 (opt6)
gggagagucccgcagucggcguccagcggcucugcuuguucgugugugugucguugcaggccuuauucaagcuuaccauggaacugccuauucuaaaaacaaaugccauaacaacaauucuugcagcaguaacauuauguuuugcaucaucacaaaacauuacagaagaauuuuaccaauccacuugcucagccguaucaaaaggauaccuaucagccuuaagaacagguugguacaccucaguaauaaccauagaacuaucaaacauaaaagaaaacaaaugcaaugguacugaugcaaaagucaaacuaaucaaacaagaacuggacaaauacaaaaaugcaguaaccgaacuacaacuccuaaugcaauccacaccugcagccaacaacagagcaagacgcgaacuaccaagauuuaugaauuacacauuaaacaacaccaagaacaacaauguaacucucucaaaaaaaagaaaaagacgcuuucuagguuuccuccuaggcgucggaucugcaauagccucaggaauagcaguaucaaaaguucuacaccuagaaggagaaguaaacaaaauuaaaaacgcauuacuaucaaccaacaaagcaguuguaucccuuucaaauggagucucuguacuuacaucaaaaguacucgaccuaaaaaacuauauagacaaacaacuacucccaauagucaauaagcaaucaugcagcauaucaaacauagaaacaguuauagaauuucaacaaaaaaacaacagacuacucgaaauaaccagagaauuuagcgucaacgcaggcguaaccacaccgguauccacauacaugcuuacaaacucagaacuccucucacuaauaaacgacaugccaauaacuaaugaccaaaaaaaacuaaugucaaacaauguccaaauaguccgucaacaaucauacucaauaaugucaauaauaaaagaagaaguauuagcauauguaguccaacuaccauuauacggcguuauagacacaccuuguuggaaacuucacacauccccacucuguacaaccaacacaaaagaagguuccaauauaugccuaacuagaaccgacagaggaugguauugcgacaacgcaggaucuguaucauucuuuccccaagcagaaacauguaaaguacaaaguaaccgcguauucugcgacaccaugaacucauuaacccucccauccgaaguuaauuuaugcaauauagacauauuuaauccuaaauacgacugcaaaauaaugacaucaaaaacagacguuaguuccuccguaaucacaucuuugggcgcaauagucucaugcuauggaaaaacaaaaugcacagccucaaacaaaaauagaggaauaauaaaaacauucagcaacggcugugauuauguauccaacaaaggaguagacacaguauccguaggcaauacccuuuacuacguuaauaaacaagaaggaaaaucauuauacgucaaaggagaaccuaucauaaauuucuacgacccauuaguauucccuucagacgaauuugaugccucaauaucccaagucaaugaaaaaaucaaccaaucacuagccuuuauccgcaaaucagacgaauuacuacacaacguaaacguaggcaaaucaacaacuaauauaaugauaacaacaauaauaauaguaauuauaguaauauuauuacuacuaaucgccguagguuuauucuuauacuguaaagcacgaucaacaccaguuacacucucaaaagaucaacuaucaggaauaaacaacauagcauuuuccaauuaaggacuaguguccaccugucccuccugggcugcuggauugucucguuuuccugccaaauaaacaggaucagcgcuuuacagaucuaaaaaaaaaaaaaaaaaaaaaaaaaaaaaaaaaaaaaaaaaaaaaaaaaaaaaaaaaaaaaaaaugcaucccccccccccccccccccccccccccccccaaaggcucuuuucagagccaccagaauu

SEQ ID NO: 11798 - RNA, 2014 nt, Artificial Sequence
  mRNA product Design b-3 comprising derived and/or modified sequence from HRSV(Memphis-37)__AIY60640.1__F0 (opt11)
gggagagucccgcagucggcguccagcggcucugcuuguucgugugugugucguugcaggccuuauucaagcuuaccauggaacuccccauccucaaaacaaacgccauaaccacuauccucgccgccgucacccucugcuucgccuccucccaaaacaucacagaggaguucuaccaauccacaugcuccgccgucuccaaaggcuaccucagcgcccuacguaccggcugguacaccagcgucaucacaauagaacucuccaacaucaaggaaaacaaaugcaacggcaccgaugccaaaguaaaacucaucaaacaagaacucgauaaauacaaaaacgccgucaccgaacuacaacuccuaaugcaaagcacacccgccgccaacaacagagcacggcgcgaacugccccgcuucaugaacuacacccucaacaacaccaaaaauaacaacgucacccuauccaagaaacgcaaacgccgauuccucgguuuccuacucggcguaggaagcgccauagccucaggcaucgccgucuccaaaguccuccaucuggaaggcgaagucaacaaaaucaaaaacgcacucuuauccaccaacaaagccgucgucucccucucgaacggggucuccguccuuaccuccaaaguccucgaccuuaaaaacuacaucgacaaacaacuacuaccaauagucaauaaacaauccugcuccaucucaaacauagaaaccgucauagaguuccaacagaagaacaaucgccuccucgaaauaacucgcgaguucuccgucaacgcaggcgucacgaccccugucucaacauacaugcuaacuaacucagaacuccuaagccuaaucaacgacaugcccaucacaaacgaccaaaagaaacucaugagcaacaauguccagauagucagacagcaauccuauagcaucaugucuauaauaaaagaagaagugcucgccuacguaguccaacucccucuuuacggcgucauagacacacccugcuggaaacuccacacaucuccucucugcaccaccaacacaaaagaaggcagcaacaucugccugacccgaaccgaccgcggaugguacugcgacaacgcuggcuccgugucuuucuuuccccaagccgaaaccugcaaaguccaguccaaccgcgucuucugcgacacaaugaacucccucacccuacccuccgaaguuaaccucugcaacaucgacaucuucaauccaaaauacgacugcaaaaucaugaccucgaaaacggacguauccuccuccgucauaacaucacuuggagccaucguuagcugcuacggaaaaaccaaauguaccgccuccaacaaaaaccgcggaauaaucaaaacauucuccaacggcugcgacuacguaagcaacaaaggggucgauacugucuccguagguaacacccuauacuacgucaacaaacaagaaggaaaaucacuauacguuaaaggcgaacccauuaucaacuucuacgacccccucguuuucccauccgacgaguucgacgccuccauaagccaaguuaacgaaaagauaaaccaaucgcucgcauucauccgcaaauccgacgaacuccuacacaacgucaacgugggcaaauccacaacaaacaucaugaucaccaccaucauuaucgucauaauagucauccuccuccugcucaucgccgugggacuauuccuauacugcaaagcccgcucgacgcccgucacacuuuccaaagaccaacuaagcggaaucaacaacauagcguucagcaauuaaggacuaguguccaccugucccuccugggcugcuggauugucucguuuuccugccaaauaaacaggaucagcgcuuuacagaucuaaaaaaaaaaaaaaaaaaaaaaaaaaaaaaaaaaaaaaaaaaaaaaaaaaaaaaaaaaaaaaaaugcaucccccccccccccccccccccccccccccccaaaggcucuuuucagagccaccagaauu

SEQ ID NO: 11799 - RNA, 2065 nt, Artificial Sequence
  mRNA product Design b-4 comprising derived and/or modified sequence from HRSV(Memphis-37)__AIY60640.1__F0 (wt)
gggagagucccgcagucggcguccagcggcucugcuuguucgugugugugucguugcaggccuuauucaagcuuaccauggaguugccaauccucaaaacaaaugcaauuaccacaauccuugcugcagucacacucuguuucgcuuccagucaaaacaucacugaagaauuuuaucaaucaacaugcagugcaguuagcaaaggcuaucuuagugcuuuaagaacugguugguauacuaguguuauaacuauagaauuaaguaauaucaaggaaaauaaguguaauggaacagaugcuaagguaaaauugauaaaacaagaauuagauaaauauaaaaaugcuguaacagaauugcaguugcucaugcaaagcacaccagcagccaacaaucgagccagaagagaacuaccaagguuuaugaauuauacacucaacaauaccaaaaauaacaauguaacauuaagcaagaaaaggaaaagaagauuucuuggcuuuuuguuagguguuggaucugcaaucgccaguggcauugcuguaucuaaaguccugcaccuagaaggggaagugaacaaaaucaaaaaugcucuacuauccacaaacaaggcuguagucagcuuaucaaauggaguuagugucuuaaccagcaaaguguuagaccucaaaaacuauauagauaaacaguuguuacccauugugaacaagcaaagcugcagcauaucaaacauugaaacugugauagaauuccaacaaaagaacaacagacuacuagagauuaccagggaauuuaguguuaaugcagguguaacuacaccuguaagcacuuauauguuaacaaauagugaauuauuaucauuaaucaaugauaugccuauaacaaaugaucagaaaaaguuaauguccaacaauguucaaauaguuagacagcaaaguuacucuaucauguccauaauaaaggaggaagucuuagcauauguaguucaauuaccacuauaugguguaauagauacaccuuguuggaaacuacacacauccccucuaugcacaaccaacacaaaggaaggguccaacaucuguuuaacaagaaccgacagaggaugguacugugacaaugcaggaucagugucuuucuucccacaagcugaaacaugcaaaguucaaucgaaucgaguauuuugugacacaaugaacagucuaacauuaccaagugaaguaaaucucugcaacauugacauauucaacccuaaauaugauugcaaaauuaugacuucaaaaacagaugugagcagcuccguuaucacaucucuaggagccauugugucaugcuauggcaaaacuaaauguacagcauccaauaaaaaucguggaaucauaaagacauuuucuaacgggugugauuauguaucaaauaaggggguggacacuguaucuguagguaauacauuauauuauguaaauaagcaagaaggaaaaagccucuauguaaaaggugaaccaauaauaaauuucuaugacccauuaguguucccuucugaugaauuugaugcaucaauaucucaagucaaugagaagauuaaccagagccuagcauuuauucguaaauccgaugaauuauuacauaauguaaauguugguaaauccaccacaaauaucaugauaacuacuauaauuauagugauuauaguaauauuguuauuauuaauugcaguugggcuguuccuauacugcaaggccagaagcacaccagucacacuaagcaaggaucaacugagugguauaaauaauauugcauuuaguaacugaggacuaguaauaaggaaacuguaugaaugucugugggcaggaagugaagagauccuucuguaaagguuuuuggaauuaugucugcugaauaauaaacuuuuuugaaauaauaaaucugguagaaaaaugagaucuaaaaaaaaaaaaaaaaaaaaaaaaaaaaaaaaaaaaaaaaaaaaaaaaaaaaaaaaaaaaaaaaugcaucccccccccccccccccccccccccccccccaaaggcucuuuucagagccaccagaauu

SEQ ID NO: 11800 - RNA, 2065 nt, Artificial Sequence
  mRNA product Design b-4 comprising derived and/or modified sequence from HRSV(Memphis-37)__AIY60640.1__F0 (opt1)
gggagagucccgcagucggcguccagcggcucugcuuguucgugugugugucguugcaggccuuauucaagcuuaccauggagcugcccauccucaagaccaacgccaucaccacgauccuggccgcggugacccugugcuucgccagcucccagaacaucaccgaggaguucuaccagagcacgugcuccgccgucagcaagggcuaccucuccgcccugcgcaccgggugguacaccagcgugaucaccaucgagcuguccaacaucaaggagaacaagugcaacggcaccgacgccaaggugaagcucaucaagcaggagcuggacaaguacaagaacgcggucacggagcugcagcuccugaugcagagcaccccggccgccaacaaccgggcccgccgggagcugccccgcuucaugaacuacacccucaacaacaccaagaacaacaacgugacgcuguccaagaagcggaagcgccgguuccugggguuccuccugggcguggggagcgcgaucgccuccggcaucgccgucagcaaggugcugcaccucgagggcgaggugaacaagaucaagaacgcccugcuguccaccaacaaggccgucgugagccucuccaacggggugagcguccugaccuccaaggugcuggaccucaagaacuacaucgacaagcagcugcugcccaucgugaacaagcagagcugcuccaucagcaacaucgagaccgucaucgaguuccagcagaagaacaaccgccuccuggagaucacgcgggaguucagcgugaacgcgggcgugaccacccccgucuccaccuacaugcugacgaacagcgagcuccugucccugaucaacgacaugccgaucaccaacgaccagaagaagcucaugagcaacaacgugcagaucgugcgccagcaguccuacagcaucauguccaucaucaaggaggagguccuggccuacguggugcagcugccccucuacggggucaucgacacccccugcuggaagcugcacaccagcccccugugcacgaccaacaccaaggagggcuccaacaucugccucacccggacggaccgcgggugguacugcgacaacgccggcagcguguccuucuucccgcaggccgagaccugcaagguccagagcaaccggguguucugcgacaccaugaacucccugacccugcccagcgaggugaaccucugcaacaucgacaucuucaaccccaaguacgacugcaagaucaugacguccaagaccgacgucagcuccagcgugaucaccucccugggcgccaucgugagcugcuacgggaagaccaagugcacggcgagcaacaagaaccgcggcaucaucaagaccuucuccaacgggugcgacuacgucagcaacaagggcguggacaccguguccgucggcaacacccuguacuacgugaacaagcaggagggcaagagccucuacgugaagggggagcccaucaucaacuucuacgacccgcuggucuuccccuccgacgaguucgacgccagcaucucccaggugaacgagaagaucaaccagagccuggccuucauccggaaguccgacgagcuccugcacaacgugaacgucggcaagagcaccacgaacaucaugaucaccaccaucaucaucgugaucaucgugauccugcugcuccugaucgccgucgggcuguuccucuacugcaaggcccgcuccacccccgugacgcugagcaaggaccagcuguccgggaucaacaacaucgcguucagcaacugaggacuaguaauaaggaaacuguaugaaugucugugggcaggaagugaagagauccuucuguaaagguuuuuggaauuaugucugcugaauaauaaacuuuuuugaaauaauaaaucugguagaaaaaugagaucuaaaaaaaaaaaaaaaaaaaaaaaaaaaaaaaaaaaaaaaaaaaaaaaaaaaaaaaaaaaaaaaaugcaucccccccccccccccccccccccccccccccaaaggcucuuuucagagccaccagaauu

SEQ ID NO: 11801 - RNA, 2065 nt, Artificial Sequence
  mRNA product Design b-4 comprising derived and/or modified sequence from HRSV(Memphis-37)__AIY60640.1__F0 (opt2)
gggagagucccgcagucggcguccagcggcucugcuuguucgugugugugucguugcaggccuuauucaagcuuaccauggagcuccccauccucaagaccaacgccaucaccaccauccucgccgccgucacccucugcuucgccuccucccagaacaucaccgaggaguucuaccaguccaccugcuccgccgucuccaagggcuaccucuccgcccuccgcaccggcugguacaccuccgucaucaccaucgagcucuccaacaucaaggagaacaagugcaacggcaccgacgccaaggucaagcucaucaagcaggagcucgacaaguacaagaacgccgucaccgagcuccagcuccucaugcaguccacccccgccgccaacaaccgcgcccgccgcgagcucccccgcuucaugaacuacacccucaacaacaccaagaacaacaacgucacccucuccaagaagcgcaagcgccgcuuccucggcuuccuccucggcgucggcuccgccaucgccuccggcaucgccgucuccaagguccuccaccucgagggcgaggucaacaagaucaagaacgcccuccucuccaccaacaaggccgucgucucccucuccaacggcgucuccguccucaccuccaagguccucgaccucaagaacuacaucgacaagcagcuccuccccaucgucaacaagcaguccugcuccaucuccaacaucgagaccgucaucgaguuccagcagaagaacaaccgccuccucgagaucacccgcgaguucuccgucaacgccggcgucaccacccccgucuccaccuacaugcucaccaacuccgagcuccucucccucaucaacgacaugcccaucaccaacgaccagaagaagcucauguccaacaacguccagaucguccgccagcaguccuacuccaucauguccaucaucaaggaggagguccucgccuacgucguccagcucccccucuacggcgucaucgacacccccugcuggaagcuccacaccuccccccucugcaccaccaacaccaaggagggcuccaacaucugccucacccgcaccgaccgcggcugguacugcgacaacgccggcuccgucuccuucuucccccaggccgagaccugcaagguccaguccaaccgcgucuucugcgacaccaugaacucccucacccuccccuccgaggucaaccucugcaacaucgacaucuucaaccccaaguacgacugcaagaucaugaccuccaagaccgacgucuccuccuccgucaucaccucccucggcgccaucgucuccugcuacggcaagaccaagugcaccgccuccaacaagaaccgcggcaucaucaagaccuucuccaacggcugcgacuacgucuccaacaagggcgucgacaccgucuccgucggcaacacccucuacuacgucaacaagcaggagggcaagucccucuacgucaagggcgagcccaucaucaacuucuacgacccccucgucuuccccuccgacgaguucgacgccuccaucucccaggucaacgagaagaucaaccagucccucgccuucauccgcaaguccgacgagcuccuccacaacgucaacgucggcaaguccaccaccaacaucaugaucaccaccaucaucaucgucaucaucgucauccuccuccuccucaucgccgucggccucuuccucuacugcaaggcccgcuccacccccgucacccucuccaaggaccagcucuccggcaucaacaacaucgccuucuccaacugaggacuaguaauaaggaaacuguaugaaugucugugggcaggaagugaagagauccuucuguaaagguuuuuggaauuaugucugcugaauaauaaacuuuuuugaaauaauaaaucugguagaaaaaugagaucuaaaaaaaaaaaaaaaaaaaaaaaaaaaaaaaaaaaaaaaaaaaaaaaaaaaaaaaaaaaaaaaaugcaucccccccccccccccccccccccccccccccaaaggcucuuuucagagccaccagaauu

SEQ ID NO: 11802 - RNA, 2065 nt, Artificial Sequence
  mRNA product Design b-4 comprising derived and/or modified sequence from HRSV(Memphis-37)__AIY60640.1__F0 (opt3)
gggagagucccgcagucggcguccagcggcucugcuuguucgugugugugucguugcaggccuuauucaagcuuaccauggagcugcccauccucaagaccaacgccauuacaacuauacuugcugcagugacgcugugcuucgccagcucccagaauaucaccgaagaguuuuaccaaucuacauguucagcggucaguaaaggcuauuugagcgcuuuaagaacugggugguacaccuccguuauuacaaucgaacugucuaacauuaaggagaauaaaugcaacggaaccgacgccaaggugaaacuaaucaagcaggaacucgauaaguauaaaaaugcaguaacugagcugcagcuucugaugcagucgaccccugccgcuaacaauagggcacggcgcgaguugccacgauucaugaacuacacacucaauaacacgaagaauaacaaugugacucugagcaaaaagcguaaaagaagguuucuggguuuccucuuaggcgucgggucagccauagcuaguggaaucgccguguccaagguucugcaccuugaaggcgaggugaacaagauuaaaaaugcguugcugucuaccaacaaggcagucgugagccuauccaacgguguaucaguucucacaaguaaagugcuggaccuuaagaauuauaucgauaaacaacuguugccgauugucaacaagcagagcuguucuaucuccaauauagaaacugugauugaguuucagcagaaaaacaaucggcuccuggagaucacccgcgaguucucagugaacgccggggucacaacccccguuagcacguacauguuaacuaauagugaacugcucucucuuauuaacgacaugccuaucacaaaugaucaaaagaagcugauguccaacaaugugcagaucguaagacagcagagcuauucgauuaugucuauaaucaaagaagagguguuggcuuacgucgugcaacuaccacuguacggaguuauugacacccccugcuggaagcuccauacuuccccucuguguacaaccaacacgaaagaaggcucaaauaucugccuuaccaggacagaucggggcugguauugugacaacgccgggagugugagcuuuuucccacaggcagagacuugcaagguccaguccaaucgcguguuuugugauaccaugaacucucugacauugcccagcgagguaaaccucugcaauauagacauuuucaacccuaaauacgauuguaagaucaugacuucaaagaccgacguuaguuccagcgugaucacaucucugggagcuauugucucaugcuaugguaaaaccaagugcacugccaguaauaaaaaccgaggcaucauuaagacguuuagcaaugggugugauuacguguccaacaaaggagucgacacagugucuguuggcaauaccuuauauuacgugaacaagcaagaagguaagucgcuguauguaaaaggggagccaauaaucaauuucuacgacccgcuagucuuucccagcgaugaguucgacgcguccauuucacaggugaacgaaaagaucaaucagagucucgccuucaucagaaaaucugaugaacugcuucacaacguuaaugugggaaagagcacuaccaacauuaugauaacaaccaucauuaucgucauuaucgugauauugcugcuccugaucgcaguaggccuuuuucuguacugcaaagcuagguccacuccugugacauugucaaaggaccagcucagcggcauuaauaacaucgccuucucuaacugaggacuaguaauaaggaaacuguaugaaugucugugggcaggaagugaagagauccuucuguaaagguuuuuggaauuaugucugcugaauaauaaacuuuuuugaaauaauaaaucugguagaaaaaugagaucuaaaaaaaaaaaaaaaaaaaaaaaaaaaaaaaaaaaaaaaaaaaaaaaaaaaaaaaaaaaaaaaaugcaucccccccccccccccccccccccccccccccaaaggcucuuuucagagccaccagaauu

SEQ ID NO: 11803 - RNA, 2065 nt, Artificial Sequence
  mRNA product Design b-4 comprising derived and/or modified sequence from HRSV(Memphis-37)__AIY60640.1__F0 (opt4)
gggagagucccgcagucggcguccagcggcucugcuuguucgugugugugucguugcaggccuuauucaagcuuaccauggagcugcccauccugaagaccaacgccaucaccaccauccuggccgccgugacccugugcuucgccagcagccagaacaucaccgaggaguucuaccagagcaccugcagcgccgugagcaagggcuaccugagcgcccugagaaccggcugguacaccagcgugaucaccaucgagcugagcaacaucaaggagaacaagugcaacggcaccgacgccaaggugaagcugaucaagcaggagcuggacaaguacaagaacgccgugaccgagcugcagcugcugaugcagagcacccccgccgccaacaacagagccagaagagagcugcccagauucaugaacuacacccugaacaacaccaagaacaacaacgugacccugagcaagaagagaaagagaagauuccugggcuuccugcugggcgugggcagcgccaucgccagcggcaucgccgugagcaaggugcugcaccuggagggcgaggugaacaagaucaagaacgcccugcugagcaccaacaaggccguggugagccugagcaacggcgugagcgugcugaccagcaaggugcuggaccugaagaacuacaucgacaagcagcugcugcccaucgugaacaagcagagcugcagcaucagcaacaucgagaccgugaucgaguuccagcagaagaacaacagacugcuggagaucaccagagaguucagcgugaacgccggcgugaccacccccgugagcaccuacaugcugaccaacagcgagcugcugagccugaucaacgacaugcccaucaccaacgaccagaagaagcugaugagcaacaacgugcagaucgugagacagcagagcuacagcaucaugagcaucaucaaggaggaggugcuggccuacguggugcagcugccccuguacggcgugaucgacacccccugcuggaagcugcacaccagcccccugugcaccaccaacaccaaggagggcagcaacaucugccugaccagaaccgacagaggcugguacugcgacaacgccggcagcgugagcuucuucccccaggccgagaccugcaaggugcagagcaacagaguguucugcgacaccaugaacagccugacccugcccagcgaggugaaccugugcaacaucgacaucuucaaccccaaguacgacugcaagaucaugaccagcaagaccgacgugagcagcagcgugaucaccagccugggcgccaucgugagcugcuacggcaagaccaagugcaccgccagcaacaagaacagaggcaucaucaagaccuucagcaacggcugcgacuacgugagcaacaagggcguggacaccgugagcgugggcaacacccuguacuacgugaacaagcaggagggcaagagccuguacgugaagggcgagcccaucaucaacuucuacgacccccugguguuccccagcgacgaguucgacgccagcaucagccaggugaacgagaagaucaaccagagccuggccuucaucagaaagagcgacgagcugcugcacaacgugaacgugggcaagagcaccaccaacaucaugaucaccaccaucaucaucgugaucaucgugauccugcugcugcugaucgccgugggccuguuccuguacugcaaggccagaagcacccccgugacccugagcaaggaccagcugagcggcaucaacaacaucgccuucagcaacugaggacuaguaauaaggaaacuguaugaaugucugugggcaggaagugaagagauccuucuguaaagguuuuuggaauuaugucugcugaauaauaaacuuuuuugaaauaauaaaucugguagaaaaaugagaucuaaaaaaaaaaaaaaaaaaaaaaaaaaaaaaaaaaaaaaaaaaaaaaaaaaaaaaaaaaaaaaaaugcaucccccccccccccccccccccccccccccccaaaggcucuuuucagagccaccagaauu

SEQ ID NO: 11804 - RNA, 2065 nt, Artificial Sequence
  mRNA product Design b-4 comprising derived and/or modified sequence from HRSV(Memphis-37)__AIY60640.1__F0 (opt5)
gggagagucccgcagucggcguccagcggcucugcuuguucgugugugugucguugcaggccuuauucaagcuuaccauggagcugcccauccucaagaccaacgccauuacaacgauccuggcugccgugacccuuugcuucgcgagcucccagaauauuacagaagaguuuuaccaaucuaccuguagcgcugucuccaaaggcuaucugucugcccucagaacagggugguacaccagcguuaucacaauugaacuguccaacaucaaggagaauaaaugcaacggaaccgacgccaaggugaaacuuaucaagcaggaacuggauaaguauaaaaaugcugugacggagcuccagcugcugaugcagucuaccccugccgcuaacaaucgggcccgcagagagcucccgcgguucaugaacuacacacugaauaacaccaagaauaacaaugucacacuuagcaaaaagcgcaaaagacgguuucugggcuuccuccugggggugggauccgcgauugccagcggcaucgcuguuucuaaggugcuucaccuggaaggggaggucaacaagauuaaaaaugcccuccuguccaccaacaaggcugugguuagccugucuaacggaguguccguccucacgagcaaagugcuggaccuuaagaauuauaucgauaaacaacugcuccccauugugaacaagcagucuuguuccaucagcaauauugaaacagucaucgaguuucagcagaaaaacaaucgccugcuugagaucaccagagaauuuuccguuaacgccggcgugacaaccccugugucuaccuacaugcugacaaauagcgagcuccugucccugauuaacgacaugcccaucacgaaugaucaaaagaagcucaugagcaacaauguccagauugugcggcagcagucuuauuccaucaugagcauuaucaaagaagagguucuggcguacgugguccaacuuccucuguacggcgugaucgacacccccugcuggaagcuccauacaucuccucuguguaccacaaacaccaaagaagggagcaauauuugccuuacgcgcacagauagaggaugguauugugacaacgccggcuccguuucuuucuucccgcaggcugagaccugcaaggugcagagcaaucgggucuuuugugauaccaugaacucccugacacuccccagcgaggugaaccugugcaauaucgacauuuucaacccuaaauacgauuguaagaucaugaccucuaagacagacgucuccagcucugugauuacgucccugggggccaucguuagcugcuauggaaaaaccaagugcacagcuuccaauaaaaaccgcggcaucauuaagaccuuuucuaaugggugugauuacgugagcaacaaaggagucgacacaguguccguuggcaauacccucuauuacgugaacaagcaagaaggcaagucucuguaugucaaaggggagcccaucauuaauuucuacgacccucuuguguuucccagcgaugaguucgacgccuccaucagccaggugaacgaaaagauuaaucagucucuggccuucaucagaaaauccgaugaacuccugcacaacguuaaugucggaaagagcacgaccaacauuaugaucacaaccaucauuaucgugauuaucgugauucugcuucuccugaucgcugucggccuguuucucuacugcaaagcgcggucuacaccggugacccuguccaaggaccagcuuagcgggaucaauaacauugccuucucuaacugaggacuaguaauaaggaaacuguaugaaugucugugggcaggaagugaagagauccuucuguaaagguuuuuggaauuaugucugcugaauaauaaacuuuuuugaaauaauaaaucugguagaaaaaugagaucuaaaaaaaaaaaaaaaaaaaaaaaaaaaaaaaaaaaaaaaaaaaaaaaaaaaaaaaaaaaaaaaaugcaucccccccccccccccccccccccccccccccaaaggcucuuuucagagccaccagaauu

SEQ ID NO: 11805 - RNA, 2065 nt, Artificial Sequence
  mRNA product Design b-4 comprising derived and/or modified sequence from HRSV(Memphis-37)__AIY60640.1__F0 (opt6)
gggagagucccgcagucggcguccagcggcucugcuuguucgugugugugucguugcaggccuuauucaagcuuaccauggaacugccuauucuaaaaacaaaugccauaacaacaauucuugcagcaguaacauuauguuuugcaucaucacaaaacauuacagaagaauuuuaccaauccacuugcucagccguaucaaaaggauaccuaucagccuuaagaacagguugguacaccucaguaauaaccauagaacuaucaaacauaaaagaaaacaaaugcaaugguacugaugcaaaagucaaacuaaucaaacaagaacuggacaaauacaaaaaugcaguaaccgaacuacaacuccuaaugcaauccacaccugcagccaacaacagagcaagacgcgaacuaccaagauuuaugaauuacacauuaaacaacaccaagaacaacaauguaacucucucaaaaaaaagaaaaagacgcuuucuagguuuccuccuaggcgucggaucugcaauagccucaggaauagcaguaucaaaaguucuacaccuagaaggagaaguaaacaaaauuaaaaacgcauuacuaucaaccaacaaagcaguuguaucccuuucaaauggagucucuguacuuacaucaaaaguacucgaccuaaaaaacuauauagacaaacaacuacucccaauagucaauaagcaaucaugcagcauaucaaacauagaaacaguuauagaauuucaacaaaaaaacaacagacuacucgaaauaaccagagaauuuagcgucaacgcaggcguaaccacaccgguauccacauacaugcuuacaaacucagaacuccucucacuaauaaacgacaugccaauaacuaaugaccaaaaaaaacuaaugucaaacaauguccaaauaguccgucaacaaucauacucaauaaugucaauaauaaaagaagaaguauuagcauauguaguccaacuaccauuauacggcguuauagacacaccuuguuggaaacuucacacauccccacucuguacaaccaacacaaaagaagguuccaauauaugccuaacuagaaccgacagaggaugguauugcgacaacgcaggaucuguaucauucuuuccccaagcagaaacauguaaaguacaaaguaaccgcguauucugcgacaccaugaacucauuaacccucccauccgaaguuaauuuaugcaauauagacauauuuaauccuaaauacgacugcaaaauaaugacaucaaaaacagacguuaguuccuccguaaucacaucuuugggcgcaauagucucaugcuauggaaaaacaaaaugcacagccucaaacaaaaauagaggaauaauaaaaacauucagcaacggcugugauuauguauccaacaaaggaguagacacaguauccguaggcaauacccuuuacuacguuaauaaacaagaaggaaaaucauuauacgucaaaggagaaccuaucauaaauuucuacgacccauuaguauucccuucagacgaauuugaugccucaauaucccaagucaaugaaaaaaucaaccaaucacuagccuuuauccgcaaaucagacgaauuacuacacaacguaaacguaggcaaaucaacaacuaauauaaugauaacaacaauaauaauaguaauuauaguaauauuauuacuacuaaucgccguagguuuauucuuauacuguaaagcacgaucaacaccaguuacacucucaaaagaucaacuaucaggaauaaacaacauagcauuuuccaauuaaggacuaguaauaaggaaacuguaugaaugucugugggcaggaagugaagagauccuucuguaaagguuuuuggaauuaugucugcugaauaauaaacuuuuuugaaauaauaaaucugguagaaaaaugagaucuaaaaaaaaaaaaaaaaaaaaaaaaaaaaaaaaaaaaaaaaaaaaaaaaaaaaaaaaaaaaaaaaugcaucccccccccccccccccccccccccccccccaaaggcucuuuucagagccaccagaauu

SEQ ID NO: 11806 - RNA, 2065 nt, Artificial Sequence
  mRNA product Design b-4 comprising derived and/or modified sequence from HRSV(Memphis-37)__AIY60640.1__F0 (opt11)
gggagagucccgcagucggcguccagcggcucugcuuguucgugugugugucguugcaggccuuauucaagcuuaccauggaacuccccauccucaaaacaaacgccauaaccacuauccucgccgccgucacccucugcuucgccuccucccaaaacaucacagaggaguucuaccaauccacaugcuccgccgucuccaaaggcuaccucagcgcccuacguaccggcugguacaccagcgucaucacaauagaacucuccaacaucaaggaaaacaaaugcaacggcaccgaugccaaaguaaaacucaucaaacaagaacucgauaaauacaaaaacgccgucaccgaacuacaacuccuaaugcaaagcacacccgccgccaacaacagagcacggcgcgaacugccccgcuucaugaacuacacccucaacaacaccaaaaauaacaacgucacccuauccaagaaacgcaaacgccgauuccucgguuuccuacucggcguaggaagcgccauagccucaggcaucgccgucuccaaaguccuccaucuggaaggcgaagucaacaaaaucaaaaacgcacucuuauccaccaacaaagccgucgucucccucucgaacggggucuccguccuuaccuccaaaguccucgaccuuaaaaacuacaucgacaaacaacuacuaccaauagucaauaaacaauccugcuccaucucaaacauagaaaccgucauagaguuccaacagaagaacaaucgccuccucgaaauaacucgcgaguucuccgucaacgcaggcgucacgaccccugucucaacauacaugcuaacuaacucagaacuccuaagccuaaucaacgacaugcccaucacaaacgaccaaaagaaacucaugagcaacaauguccagauagucagacagcaauccuauagcaucaugucuauaauaaaagaagaagugcucgccuacguaguccaacucccucuuuacggcgucauagacacacccugcuggaaacuccacacaucuccucucugcaccaccaacacaaaagaaggcagcaacaucugccugacccgaaccgaccgcggaugguacugcgacaacgcuggcuccgugucuuucuuuccccaagccgaaaccugcaaaguccaguccaaccgcgucuucugcgacacaaugaacucccucacccuacccuccgaaguuaaccucugcaacaucgacaucuucaauccaaaauacgacugcaaaaucaugaccucgaaaacggacguauccuccuccgucauaacaucacuuggagccaucguuagcugcuacggaaaaaccaaauguaccgccuccaacaaaaaccgcggaauaaucaaaacauucuccaacggcugcgacuacguaagcaacaaaggggucgauacugucuccguagguaacacccuauacuacgucaacaaacaagaaggaaaaucacuauacguuaaaggcgaacccauuaucaacuucuacgacccccucguuuucccauccgacgaguucgacgccuccauaagccaaguuaacgaaaagauaaaccaaucgcucgcauucauccgcaaauccgacgaacuccuacacaacgucaacgugggcaaauccacaacaaacaucaugaucaccaccaucauuaucgucauaauagucauccuccuccugcucaucgccgugggacuauuccuauacugcaaagcccgcucgacgcccgucacacuuuccaaagaccaacuaagcggaaucaacaacauagcguucagcaauuaaggacuaguaauaaggaaacuguaugaaugucugugggcaggaagugaagagauccuucuguaaagguuuuuggaauuaugucugcugaauaauaaacuuuuuugaaauaauaaaucugguagaaaaaugagaucuaaaaaaaaaaaaaaaaaaaaaaaaaaaaaaaaaaaaaaaaaaaaaaaaaaaaaaaaaaaaaaaaugcaucccccccccccccccccccccccccccccccaaaggcucuuuucagagccaccagaauu

SEQ ID NO: 11807 - RNA, 2127 nt, Artificial Sequence
  mRNA product Design b-5 comprising derived and/or modified sequence from HRSV(Memphis-37)__AIY60640.1__F0 (wt)
gggagacuccugucgggcggaaguaggaggaguagaguuuaaaaacaguacucuuuuuccgguucgggacguaguugaagcaacgacaagccggauaaccgcucuugagacaggaagcuuaccauggaguugccaauccucaaaacaaaugcaauuaccacaauccuugcugcagucacacucuguuucgcuuccagucaaaacaucacugaagaauuuuaucaaucaacaugcagugcaguuagcaaaggcuaucuuagugcuuuaagaacugguugguauacuaguguuauaacuauagaauuaaguaauaucaaggaaaauaaguguaauggaacagaugcuaagguaaaauugauaaaacaagaauuagauaaauauaaaaaugcuguaacagaauugcaguugcucaugcaaagcacaccagcagccaacaaucgagccagaagagaacuaccaagguuuaugaauuauacacucaacaauaccaaaaauaacaauguaacauuaagcaagaaaaggaaaagaagauuucuuggcuuuuuguuagguguuggaucugcaaucgccaguggcauugcuguaucuaaaguccugcaccuagaaggggaagugaacaaaaucaaaaaugcucuacuauccacaaacaaggcuguagucagcuuaucaaauggaguuagugucuuaaccagcaaaguguuagaccucaaaaacuauauagauaaacaguuguuacccauugugaacaagcaaagcugcagcauaucaaacauugaaacugugauagaauuccaacaaaagaacaacagacuacuagagauuaccagggaauuuaguguuaaugcagguguaacuacaccuguaagcacuuauauguuaacaaauagugaauuauuaucauuaaucaaugauaugccuauaacaaaugaucagaaaaaguuaauguccaacaauguucaaauaguuagacagcaaaguuacucuaucauguccauaauaaaggaggaagucuuagcauauguaguucaauuaccacuauaugguguaauagauacaccuuguuggaaacuacacacauccccucuaugcacaaccaacacaaaggaaggguccaacaucuguuuaacaagaaccgacagaggaugguacugugacaaugcaggaucagugucuuucuucccacaagcugaaacaugcaaaguucaaucgaaucgaguauuuugugacacaaugaacagucuaacauuaccaagugaaguaaaucucugcaacauugacauauucaacccuaaauaugauugcaaaauuaugacuucaaaaacagaugugagcagcuccguuaucacaucucuaggagccauugugucaugcuauggcaaaacuaaauguacagcauccaauaaaaaucguggaaucauaaagacauuuucuaacgggugugauuauguaucaaauaaggggguggacacuguaucuguagguaauacauuauauuauguaaauaagcaagaaggaaaaagccucuauguaaaaggugaaccaauaauaaauuucuaugacccauuaguguucccuucugaugaauuugaugcaucaauaucucaagucaaugagaagauuaaccagagccuagcauuuauucguaaauccgaugaauuauuacauaauguaaauguugguaaauccaccacaaauaucaugauaacuacuauaauuauagugauuauaguaauauuguuauuauuaauugcaguugggcuguuccuauacugcaaggccagaagcacaccagucacacuaagcaaggaucaacugagugguauaaauaauauugcauuuaguaacugaggacuaguacuggcugcaucucccuuuccucuguccuccauccuucucccaggauggugaagggggaccugguacccagugauccccaccccaggauccuaaaucaugacuuaccugcuaauaaaaacucauuggaaaagugagaagaucuaaaaaaaaaaaaaaaaaaaaaaaaaaaaaaaaaaaaaaaaaaaaaaaaaaaaaaaaaaaaaaaaugcaucccccccccccccccccccccccccccccccaaaggcucuuuucagagccaccagaauu

SEQ ID NO: 11808 - RNA, 2127 nt, Artificial Sequence
  mRNA product Design b-5 comprising derived and/or modified sequence from HRSV(Memphis-37)__AIY60640.1__F0 (opt1)
gggagacuccugucgggcggaaguaggaggaguagaguuuaaaaacaguacucuuuuuccgguucgggacguaguugaagcaacgacaagccggauaaccgcucuugagacaggaagcuuaccauggagcugcccauccucaagaccaacgccaucaccacgauccuggccgcggugacccugugcuucgccagcucccagaacaucaccgaggaguucuaccagagcacgugcuccgccgucagcaagggcuaccucuccgcccugcgcaccgggugguacaccagcgugaucaccaucgagcuguccaacaucaaggagaacaagugcaacggcaccgacgccaaggugaagcucaucaagcaggagcuggacaaguacaagaacgcggucacggagcugcagcuccugaugcagagcaccccggccgccaacaaccgggcccgccgggagcugccccgcuucaugaacuacacccucaacaacaccaagaacaacaacgugacgcuguccaagaagcggaagcgccgguuccugggguuccuccugggcguggggagcgcgaucgccuccggcaucgccgucagcaaggugcugcaccucgagggcgaggugaacaagaucaagaacgcccugcuguccaccaacaaggccgucgugagccucuccaacggggugagcguccugaccuccaaggugcuggaccucaagaacuacaucgacaagcagcugcugcccaucgugaacaagcagagcugcuccaucagcaacaucgagaccgucaucgaguuccagcagaagaacaaccgccuccuggagaucacgcgggaguucagcgugaacgcgggcgugaccacccccgucuccaccuacaugcugacgaacagcgagcuccugucccugaucaacgacaugccgaucaccaacgaccagaagaagcucaugagcaacaacgugcagaucgugcgccagcaguccuacagcaucauguccaucaucaaggaggagguccuggccuacguggugcagcugccccucuacggggucaucgacacccccugcuggaagcugcacaccagcccccugugcacgaccaacaccaaggagggcuccaacaucugccucacccggacggaccgcgggugguacugcgacaacgccggcagcguguccuucuucccgcaggccgagaccugcaagguccagagcaaccggguguucugcgacaccaugaacucccugacccugcccagcgaggugaaccucugcaacaucgacaucuucaaccccaaguacgacugcaagaucaugacguccaagaccgacgucagcuccagcgugaucaccucccugggcgccaucgugagcugcuacgggaagaccaagugcacggcgagcaacaagaaccgcggcaucaucaagaccuucuccaacgggugcgacuacgucagcaacaagggcguggacaccguguccgucggcaacacccuguacuacgugaacaagcaggagggcaagagccucuacgugaagggggagcccaucaucaacuucuacgacccgcuggucuuccccuccgacgaguucgacgccagcaucucccaggugaacgagaagaucaaccagagccuggccuucauccggaaguccgacgagcuccugcacaacgugaacgucggcaagagcaccacgaacaucaugaucaccaccaucaucaucgugaucaucgugauccugcugcuccugaucgccgucgggcuguuccucuacugcaaggcccgcuccacccccgugacgcugagcaaggaccagcuguccgggaucaacaacaucgcguucagcaacugaggacuaguacuggcugcaucucccuuuccucuguccuccauccuucucccaggauggugaagggggaccugguacccagugauccccaccccaggauccuaaaucaugacuuaccugcuaauaaaaacucauuggaaaagugagaagaucuaaaaaaaaaaaaaaaaaaaaaaaaaaaaaaaaaaaaaaaaaaaaaaaaaaaaaaaaaaaaaaaaugcaucccccccccccccccccccccccccccccccaaaggcucuuuucagagccaccagaauu

SEQ ID NO: 11809 - RNA, 2127 nt, Artificial Sequence
  mRNA product Design b-5 comprising derived and/or modified sequence from HRSV(Memphis-37)__AIY60640.1__F0 (opt2)
gggagacuccugucgggcggaaguaggaggaguagaguuuaaaaacaguacucuuuuuccgguucgggacguaguugaagcaacgacaagccggauaaccgcucuugagacaggaagcuuaccauggagcuccccauccucaagaccaacgccaucaccaccauccucgccgccgucacccucugcuucgccuccucccagaacaucaccgaggaguucuaccaguccaccugcuccgccgucuccaagggcuaccucuccgcccuccgcaccggcugguacaccuccgucaucaccaucgagcucuccaacaucaaggagaacaagugcaacggcaccgacgccaaggucaagcucaucaagcaggagcucgacaaguacaagaacgccgucaccgagcuccagcuccucaugcaguccacccccgccgccaacaaccgcgcccgccgcgagcucccccgcuucaugaacuacacccucaacaacaccaagaacaacaacgucacccucuccaagaagcgcaagcgccgcuuccucggcuuccuccucggcgucggcuccgccaucgccuccggcaucgccgucuccaagguccuccaccucgagggcgaggucaacaagaucaagaacgcccuccucuccaccaacaaggccgucgucucccucuccaacggcgucuccguccucaccuccaagguccucgaccucaagaacuacaucgacaagcagcuccuccccaucgucaacaagcaguccugcuccaucuccaacaucgagaccgucaucgaguuccagcagaagaacaaccgccuccucgagaucacccgcgaguucuccgucaacgccggcgucaccacccccgucuccaccuacaugcucaccaacuccgagcuccucucccucaucaacgacaugcccaucaccaacgaccagaagaagcucauguccaacaacguccagaucguccgccagcaguccuacuccaucauguccaucaucaaggaggagguccucgccuacgucguccagcucccccucuacggcgucaucgacacccccugcuggaagcuccacaccuccccccucugcaccaccaacaccaaggagggcuccaacaucugccucacccgcaccgaccgcggcugguacugcgacaacgccggcuccgucuccuucuucccccaggccgagaccugcaagguccaguccaaccgcgucuucugcgacaccaugaacucccucacccuccccuccgaggucaaccucugcaacaucgacaucuucaaccccaaguacgacugcaagaucaugaccuccaagaccgacgucuccuccuccgucaucaccucccucggcgccaucgucuccugcuacggcaagaccaagugcaccgccuccaacaagaaccgcggcaucaucaagaccuucuccaacggcugcgacuacgucuccaacaagggcgucgacaccgucuccgucggcaacacccucuacuacgucaacaagcaggagggcaagucccucuacgucaagggcgagcccaucaucaacuucuacgacccccucgucuuccccuccgacgaguucgacgccuccaucucccaggucaacgagaagaucaaccagucccucgccuucauccgcaaguccgacgagcuccuccacaacgucaacgucggcaaguccaccaccaacaucaugaucaccaccaucaucaucgucaucaucgucauccuccuccuccucaucgccgucggccucuuccucuacugcaaggcccgcuccacccccgucacccucuccaaggaccagcucuccggcaucaacaacaucgccuucuccaacugaggacuaguacuggcugcaucucccuuuccucuguccuccauccuucucccaggauggugaagggggaccugguacccagugauccccaccccaggauccuaaaucaugacuuaccugcuaauaaaaacucauuggaaaagugagaagaucuaaaaaaaaaaaaaaaaaaaaaaaaaaaaaaaaaaaaaaaaaaaaaaaaaaaaaaaaaaaaaaaaugcaucccccccccccccccccccccccccccccccaaaggcucuuuucagagccaccagaauu

SEQ ID NO: 11810 - RNA, 2127 nt, Artificial Sequence
  mRNA product Design b-5 comprising derived and/or modified sequence from HRSV(Memphis-37)__AIY60640.1__F0 (opt3)
gggagacuccugucgggcggaaguaggaggaguagaguuuaaaaacaguacucuuuuuccgguucgggacguaguugaagcaacgacaagccggauaaccgcucuugagacaggaagcuuaccauggagcugcccauccucaagaccaacgccauuacaacuauacuugcugcagugacgcugugcuucgccagcucccagaauaucaccgaagaguuuuaccaaucuacauguucagcggucaguaaaggcuauuugagcgcuuuaagaacugggugguacaccuccguuauuacaaucgaacugucuaacauuaaggagaauaaaugcaacggaaccgacgccaaggugaaacuaaucaagcaggaacucgauaaguauaaaaaugcaguaacugagcugcagcuucugaugcagucgaccccugccgcuaacaauagggcacggcgcgaguugccacgauucaugaacuacacacucaauaacacgaagaauaacaaugugacucugagcaaaaagcguaaaagaagguuucuggguuuccucuuaggcgucgggucagccauagcuaguggaaucgccguguccaagguucugcaccuugaaggcgaggugaacaagauuaaaaaugcguugcugucuaccaacaaggcagucgugagccuauccaacgguguaucaguucucacaaguaaagugcuggaccuuaagaauuauaucgauaaacaacuguugccgauugucaacaagcagagcuguucuaucuccaauauagaaacugugauugaguuucagcagaaaaacaaucggcuccuggagaucacccgcgaguucucagugaacgccggggucacaacccccguuagcacguacauguuaacuaauagugaacugcucucucuuauuaacgacaugccuaucacaaaugaucaaaagaagcugauguccaacaaugugcagaucguaagacagcagagcuauucgauuaugucuauaaucaaagaagagguguuggcuuacgucgugcaacuaccacuguacggaguuauugacacccccugcuggaagcuccauacuuccccucuguguacaaccaacacgaaagaaggcucaaauaucugccuuaccaggacagaucggggcugguauugugacaacgccgggagugugagcuuuuucccacaggcagagacuugcaagguccaguccaaucgcguguuuugugauaccaugaacucucugacauugcccagcgagguaaaccucugcaauauagacauuuucaacccuaaauacgauuguaagaucaugacuucaaagaccgacguuaguuccagcgugaucacaucucugggagcuauugucucaugcuaugguaaaaccaagugcacugccaguaauaaaaaccgaggcaucauuaagacguuuagcaaugggugugauuacguguccaacaaaggagucgacacagugucuguuggcaauaccuuauauuacgugaacaagcaagaagguaagucgcuguauguaaaaggggagccaauaaucaauuucuacgacccgcuagucuuucccagcgaugaguucgacgcguccauuucacaggugaacgaaaagaucaaucagagucucgccuucaucagaaaaucugaugaacugcuucacaacguuaaugugggaaagagcacuaccaacauuaugauaacaaccaucauuaucgucauuaucgugauauugcugcuccugaucgcaguaggccuuuuucuguacugcaaagcuagguccacuccugugacauugucaaaggaccagcucagcggcauuaauaacaucgccuucucuaacugaggacuaguacuggcugcaucucccuuuccucuguccuccauccuucucccaggauggugaagggggaccugguacccagugauccccaccccaggauccuaaaucaugacuuaccugcuaauaaaaacucauuggaaaagugagaagaucuaaaaaaaaaaaaaaaaaaaaaaaaaaaaaaaaaaaaaaaaaaaaaaaaaaaaaaaaaaaaaaaaugcaucccccccccccccccccccccccccccccccaaaggcucuuuucagagccaccagaauu

SEQ ID NO: 11811 - RNA, 2127 nt, Artificial Sequence
  mRNA product Design b-5 comprising derived and/or modified sequence from HRSV(Memphis-37)__AIY60640.1__F0 (opt4)
gggagacuccugucgggcggaaguaggaggaguagaguuuaaaaacaguacucuuuuuccgguucgggacguaguugaagcaacgacaagccggauaaccgcucuugagacaggaagcuuaccauggagcugcccauccugaagaccaacgccaucaccaccauccuggccgccgugacccugugcuucgccagcagccagaacaucaccgaggaguucuaccagagcaccugcagcgccgugagcaagggcuaccugagcgcccugagaaccggcugguacaccagcgugaucaccaucgagcugagcaacaucaaggagaacaagugcaacggcaccgacgccaaggugaagcugaucaagcaggagcuggacaaguacaagaacgccgugaccgagcugcagcugcugaugcagagcacccccgccgccaacaacagagccagaagagagcugcccagauucaugaacuacacccugaacaacaccaagaacaacaacgugacccugagcaagaagagaaagagaagauuccugggcuuccugcugggcgugggcagcgccaucgccagcggcaucgccgugagcaaggugcugcaccuggagggcgaggugaacaagaucaagaacgcccugcugagcaccaacaaggccguggugagccugagcaacggcgugagcgugcugaccagcaaggugcuggaccugaagaacuacaucgacaagcagcugcugcccaucgugaacaagcagagcugcagcaucagcaacaucgagaccgugaucgaguuccagcagaagaacaacagacugcuggagaucaccagagaguucagcgugaacgccggcgugaccacccccgugagcaccuacaugcugaccaacagcgagcugcugagccugaucaacgacaugcccaucaccaacgaccagaagaagcugaugagcaacaacgugcagaucgugagacagcagagcuacagcaucaugagcaucaucaaggaggaggugcuggccuacguggugcagcugccccuguacggcgugaucgacacccccugcuggaagcugcacaccagcccccugugcaccaccaacaccaaggagggcagcaacaucugccugaccagaaccgacagaggcugguacugcgacaacgccggcagcgugagcuucuucccccaggccgagaccugcaaggugcagagcaacagaguguucugcgacaccaugaacagccugacccugcccagcgaggugaaccugugcaacaucgacaucuucaaccccaaguacgacugcaagaucaugaccagcaagaccgacgugagcagcagcgugaucaccagccugggcgccaucgugagcugcuacggcaagaccaagugcaccgccagcaacaagaacagaggcaucaucaagaccuucagcaacggcugcgacuacgugagcaacaagggcguggacaccgugagcgugggcaacacccuguacuacgugaacaagcaggagggcaagagccuguacgugaagggcgagcccaucaucaacuucuacgacccccugguguuccccagcgacgaguucgacgccagcaucagccaggugaacgagaagaucaaccagagccuggccuucaucagaaagagcgacgagcugcugcacaacgugaacgugggcaagagcaccaccaacaucaugaucaccaccaucaucaucgugaucaucgugauccugcugcugcugaucgccgugggccuguuccuguacugcaaggccagaagcacccccgugacccugagcaaggaccagcugagcggcaucaacaacaucgccuucagcaacugaggacuaguacuggcugcaucucccuuuccucuguccuccauccuucucccaggauggugaagggggaccugguacccagugauccccaccccaggauccuaaaucaugacuuaccugcuaauaaaaacucauuggaaaagugagaagaucuaaaaaaaaaaaaaaaaaaaaaaaaaaaaaaaaaaaaaaaaaaaaaaaaaaaaaaaaaaaaaaaaugcaucccccccccccccccccccccccccccccccaaaggcucuuuucagagccaccagaauu

SEQ ID NO: 11812 - RNA, 2127 nt, Artificial Sequence
  mRNA product Design b-5 comprising derived and/or modified sequence from HRSV(Memphis-37)__AIY60640.1__F0 (opt5)
gggagacuccugucgggcggaaguaggaggaguagaguuuaaaaacaguacucuuuuuccgguucgggacguaguugaagcaacgacaagccggauaaccgcucuugagacaggaagcuuaccauggagcugcccauccucaagaccaacgccauuacaacgauccuggcugccgugacccuuugcuucgcgagcucccagaauauuacagaagaguuuuaccaaucuaccuguagcgcugucuccaaaggcuaucugucugcccucagaacagggugguacaccagcguuaucacaauugaacuguccaacaucaaggagaauaaaugcaacggaaccgacgccaaggugaaacuuaucaagcaggaacuggauaaguauaaaaaugcugugacggagcuccagcugcugaugcagucuaccccugccgcuaacaaucgggcccgcagagagcucccgcgguucaugaacuacacacugaauaacaccaagaauaacaaugucacacuuagcaaaaagcgcaaaagacgguuucugggcuuccuccugggggugggauccgcgauugccagcggcaucgcuguuucuaaggugcuucaccuggaaggggaggucaacaagauuaaaaaugcccuccuguccaccaacaaggcugugguuagccugucuaacggaguguccguccucacgagcaaagugcuggaccuuaagaauuauaucgauaaacaacugcuccccauugugaacaagcagucuuguuccaucagcaauauugaaacagucaucgaguuucagcagaaaaacaaucgccugcuugagaucaccagagaauuuuccguuaacgccggcgugacaaccccugugucuaccuacaugcugacaaauagcgagcuccugucccugauuaacgacaugcccaucacgaaugaucaaaagaagcucaugagcaacaauguccagauugugcggcagcagucuuauuccaucaugagcauuaucaaagaagagguucuggcguacgugguccaacuuccucuguacggcgugaucgacacccccugcuggaagcuccauacaucuccucuguguaccacaaacaccaaagaagggagcaauauuugccuuacgcgcacagauagaggaugguauugugacaacgccggcuccguuucuuucuucccgcaggcugagaccugcaaggugcagagcaaucgggucuuuugugauaccaugaacucccugacacuccccagcgaggugaaccugugcaauaucgacauuuucaacccuaaauacgauuguaagaucaugaccucuaagacagacgucuccagcucugugauuacgucccugggggccaucguuagcugcuauggaaaaaccaagugcacagcuuccaauaaaaaccgcggcaucauuaagaccuuuucuaaugggugugauuacgugagcaacaaaggagucgacacaguguccguuggcaauacccucuauuacgugaacaagcaagaaggcaagucucuguaugucaaaggggagcccaucauuaauuucuacgacccucuuguguuucccagcgaugaguucgacgccuccaucagccaggugaacgaaaagauuaaucagucucuggccuucaucagaaaauccgaugaacuccugcacaacguuaaugucggaaagagcacgaccaacauuaugaucacaaccaucauuaucgugauuaucgugauucugcuucuccugaucgcugucggccuguuucucuacugcaaagcgcggucuacaccggugacccuguccaaggaccagcuuagcgggaucaauaacauugccuucucuaacugaggacuaguacuggcugcaucucccuuuccucuguccuccauccuucucccaggauggugaagggggaccugguacccagugauccccaccccaggauccuaaaucaugacuuaccugcuaauaaaaacucauuggaaaagugagaagaucuaaaaaaaaaaaaaaaaaaaaaaaaaaaaaaaaaaaaaaaaaaaaaaaaaaaaaaaaaaaaaaaaugcaucccccccccccccccccccccccccccccccaaaggcucuuuucagagccaccagaauu

SEQ ID NO: 11813 - RNA, 2127 nt, Artificial Sequence
  mRNA product Design b-5 comprising derived and/or modified sequence from HRSV(Memphis-37)__AIY60640.1__F0 (opt6)
gggagacuccugucgggcggaaguaggaggaguagaguuuaaaaacaguacucuuuuuccgguucgggacguaguugaagcaacgacaagccggauaaccgcucuugagacaggaagcuuaccauggaacugccuauucuaaaaacaaaugccauaacaacaauucuugcagcaguaacauuauguuuugcaucaucacaaaacauuacagaagaauuuuaccaauccacuugcucagccguaucaaaaggauaccuaucagccuuaagaacagguugguacaccucaguaauaaccauagaacuaucaaacauaaaagaaaacaaaugcaaugguacugaugcaaaagucaaacuaaucaaacaagaacuggacaaauacaaaaaugcaguaaccgaacuacaacuccuaaugcaauccacaccugcagccaacaacagagcaagacgcgaacuaccaagauuuaugaauuacacauuaaacaacaccaagaacaacaauguaacucucucaaaaaaaagaaaaagacgcuuucuagguuuccuccuaggcgucggaucugcaauagccucaggaauagcaguaucaaaaguucuacaccuagaaggagaaguaaacaaaauuaaaaacgcauuacuaucaaccaacaaagcaguuguaucccuuucaaauggagucucuguacuuacaucaaaaguacucgaccuaaaaaacuauauagacaaacaacuacucccaauagucaauaagcaaucaugcagcauaucaaacauagaaacaguuauagaauuucaacaaaaaaacaacagacuacucgaaauaaccagagaauuuagcgucaacgcaggcguaaccacaccgguauccacauacaugcuuacaaacucagaacuccucucacuaauaaacgacaugccaauaacuaaugaccaaaaaaaacuaaugucaaacaauguccaaauaguccgucaacaaucauacucaauaaugucaauaauaaaagaagaaguauuagcauauguaguccaacuaccauuauacggcguuauagacacaccuuguuggaaacuucacacauccccacucuguacaaccaacacaaaagaagguuccaauauaugccuaacuagaaccgacagaggaugguauugcgacaacgcaggaucuguaucauucuuuccccaagcagaaacauguaaaguacaaaguaaccgcguauucugcgacaccaugaacucauuaacccucccauccgaaguuaauuuaugcaauauagacauauuuaauccuaaauacgacugcaaaauaaugacaucaaaaacagacguuaguuccuccguaaucacaucuuugggcgcaauagucucaugcuauggaaaaacaaaaugcacagccucaaacaaaaauagaggaauaauaaaaacauucagcaacggcugugauuauguauccaacaaaggaguagacacaguauccguaggcaauacccuuuacuacguuaauaaacaagaaggaaaaucauuauacgucaaaggagaaccuaucauaaauuucuacgacccauuaguauucccuucagacgaauuugaugccucaauaucccaagucaaugaaaaaaucaaccaaucacuagccuuuauccgcaaaucagacgaauuacuacacaacguaaacguaggcaaaucaacaacuaauauaaugauaacaacaauaauaauaguaauuauaguaauauuauuacuacuaaucgccguagguuuauucuuauacuguaaagcacgaucaacaccaguuacacucucaaaagaucaacuaucaggaauaaacaacauagcauuuuccaauuaaggacuaguacuggcugcaucucccuuuccucuguccuccauccuucucccaggauggugaagggggaccugguacccagugauccccaccccaggauccuaaaucaugacuuaccugcuaauaaaaacucauuggaaaagugagaagaucuaaaaaaaaaaaaaaaaaaaaaaaaaaaaaaaaaaaaaaaaaaaaaaaaaaaaaaaaaaaaaaaaugcaucccccccccccccccccccccccccccccccaaaggcucuuuucagagccaccagaauu

SEQ ID NO: 11814 - RNA, 2127 nt, Artificial Sequence
  mRNA product Design b-5 comprising derived and/or modified sequence from HRSV(Memphis-37)__AIY60640.1__F0 (opt11)
gggagacuccugucgggcggaaguaggaggaguagaguuuaaaaacaguacucuuuuuccgguucgggacguaguugaagcaacgacaagccggauaaccgcucuugagacaggaagcuuaccauggaacuccccauccucaaaacaaacgccauaaccacuauccucgccgccgucacccucugcuucgccuccucccaaaacaucacagaggaguucuaccaauccacaugcuccgccgucuccaaaggcuaccucagcgcccuacguaccggcugguacaccagcgucaucacaauagaacucuccaacaucaaggaaaacaaaugcaacggcaccgaugccaaaguaaaacucaucaaacaagaacucgauaaauacaaaaacgccgucaccgaacuacaacuccuaaugcaaagcacacccgccgccaacaacagagcacggcgcgaacugccccgcuucaugaacuacacccucaacaacaccaaaaauaacaacgucacccuauccaagaaacgcaaacgccgauuccucgguuuccuacucggcguaggaagcgccauagccucaggcaucgccgucuccaaaguccuccaucuggaaggcgaagucaacaaaaucaaaaacgcacucuuauccaccaacaaagccgucgucucccucucgaacggggucuccguccuuaccuccaaaguccucgaccuuaaaaacuacaucgacaaacaacuacuaccaauagucaauaaacaauccugcuccaucucaaacauagaaaccgucauagaguuccaacagaagaacaaucgccuccucgaaauaacucgcgaguucuccgucaacgcaggcgucacgaccccugucucaacauacaugcuaacuaacucagaacuccuaagccuaaucaacgacaugcccaucacaaacgaccaaaagaaacucaugagcaacaauguccagauagucagacagcaauccuauagcaucaugucuauaauaaaagaagaagugcucgccuacguaguccaacucccucuuuacggcgucauagacacacccugcuggaaacuccacacaucuccucucugcaccaccaacacaaaagaaggcagcaacaucugccugacccgaaccgaccgcggaugguacugcgacaacgcuggcuccgugucuuucuuuccccaagccgaaaccugcaaaguccaguccaaccgcgucuucugcgacacaaugaacucccucacccuacccuccgaaguuaaccucugcaacaucgacaucuucaauccaaaauacgacugcaaaaucaugaccucgaaaacggacguauccuccuccgucauaacaucacuuggagccaucguuagcugcuacggaaaaaccaaauguaccgccuccaacaaaaaccgcggaauaaucaaaacauucuccaacggcugcgacuacguaagcaacaaaggggucgauacugucuccguagguaacacccuauacuacgucaacaaacaagaaggaaaaucacuauacguuaaaggcgaacccauuaucaacuucuacgacccccucguuuucccauccgacgaguucgacgccuccauaagccaaguuaacgaaaagauaaaccaaucgcucgcauucauccgcaaauccgacgaacuccuacacaacgucaacgugggcaaauccacaacaaacaucaugaucaccaccaucauuaucgucauaauagucauccuccuccugcucaucgccgugggacuauuccuauacugcaaagcccgcucgacgcccgucacacuuuccaaagaccaacuaagcggaaucaacaacauagcguucagcaauuaaggacuaguacuggcugcaucucccuuuccucuguccuccauccuucucccaggauggugaagggggaccugguacccagugauccccaccccaggauccuaaaucaugacuuaccugcuaauaaaaacucauuggaaaagugagaagaucuaaaaaaaaaaaaaaaaaaaaaaaaaaaaaaaaaaaaaaaaaaaaaaaaaaaaaaaaaaaaaaaaugcaucccccccccccccccccccccccccccccccaaaggcucuuuucagagccaccagaauu

SEQ ID NO: 11815 - RNA, 2033 nt, Artificial Sequence
  mRNA product Design c-1 comprising derived and/or modified sequence from HRSV(Memphis-37)__AIY60640.1__F0 (wt)
gggagaguccgcucagccagguugcagaagcggcuuagcguguguccuaaucuucucucugcguguagguaggccugugccgcaaacaagcuuaccauggaguugccaauccucaaaacaaaugcaauuaccacaauccuugcugcagucacacucuguuucgcuuccagucaaaacaucacugaagaauuuuaucaaucaacaugcagugcaguuagcaaaggcuaucuuagugcuuuaagaacugguugguauacuaguguuauaacuauagaauuaaguaauaucaaggaaaauaaguguaauggaacagaugcuaagguaaaauugauaaaacaagaauuagauaaauauaaaaaugcuguaacagaauugcaguugcucaugcaaagcacaccagcagccaacaaucgagccagaagagaacuaccaagguuuaugaauuauacacucaacaauaccaaaaauaacaauguaacauuaagcaagaaaaggaaaagaagauuucuuggcuuuuuguuagguguuggaucugcaaucgccaguggcauugcuguaucuaaaguccugcaccuagaaggggaagugaacaaaaucaaaaaugcucuacuauccacaaacaaggcuguagucagcuuaucaaauggaguuagugucuuaaccagcaaaguguuagaccucaaaaacuauauagauaaacaguuguuacccauugugaacaagcaaagcugcagcauaucaaacauugaaacugugauagaauuccaacaaaagaacaacagacuacuagagauuaccagggaauuuaguguuaaugcagguguaacuacaccuguaagcacuuauauguuaacaaauagugaauuauuaucauuaaucaaugauaugccuauaacaaaugaucagaaaaaguuaauguccaacaauguucaaauaguuagacagcaaaguuacucuaucauguccauaauaaaggaggaagucuuagcauauguaguucaauuaccacuauaugguguaauagauacaccuuguuggaaacuacacacauccccucuaugcacaaccaacacaaaggaaggguccaacaucuguuuaacaagaaccgacagaggaugguacugugacaaugcaggaucagugucuuucuucccacaagcugaaacaugcaaaguucaaucgaaucgaguauuuugugacacaaugaacagucuaacauuaccaagugaaguaaaucucugcaacauugacauauucaacccuaaauaugauugcaaaauuaugacuucaaaaacagaugugagcagcuccguuaucacaucucuaggagccauugugucaugcuauggcaaaacuaaauguacagcauccaauaaaaaucguggaaucauaaagacauuuucuaacgggugugauuauguaucaaauaaggggguggacacuguaucuguagguaauacauuauauuauguaaauaagcaagaaggaaaaagccucuauguaaaaggugaaccaauaauaaauuucuaugacccauuaguguucccuucugaugaauuugaugcaucaauaucucaagucaaugagaagauuaaccagagccuagcauuuauucguaaauccgaugaauuauuacauaauguaaauguugguaaauccaccacaaauaucaugauaacuacuauaauuauagugauuauaguaauauuguuauuauuaauugcaguugggcuguuccuauacugcaaggccagaagcacaccagucacacuaagcaaggaucaacugagugguauaaauaauauugcauuuaguaacugaggacuaguguccaccugucccuccugggcugcuggauugucucguuuuccugccaaauaaacaggaucagcgcuuuacagaucuaaaaaaaaaaaaaaaaaaaaaaaaaaaaaaaaaaaaaaaaaaaaaaaaaaaaaaaaaaaaaaaaugcaucccccccccccccccccccccccccccccccaaaggcucuuuucagagccaccagaauu

SEQ ID NO: 11816 - RNA, 2033 nt, Artificial Sequence
  mRNA product Design c-1 comprising derived and/or modified sequence from HRSV(Memphis-37)__AIY60640.1__F0 (opt1)
gggagaguccgcucagccagguugcagaagcggcuuagcguguguccuaaucuucucucugcguguagguaggccugugccgcaaacaagcuuaccauggagcugcccauccucaagaccaacgccaucaccacgauccuggccgcggugacccugugcuucgccagcucccagaacaucaccgaggaguucuaccagagcacgugcuccgccgucagcaagggcuaccucuccgcccugcgcaccgggugguacaccagcgugaucaccaucgagcuguccaacaucaaggagaacaagugcaacggcaccgacgccaaggugaagcucaucaagcaggagcuggacaaguacaagaacgcggucacggagcugcagcuccugaugcagagcaccccggccgccaacaaccgggcccgccgggagcugccccgcuucaugaacuacacccucaacaacaccaagaacaacaacgugacgcuguccaagaagcggaagcgccgguuccugggguuccuccugggcguggggagcgcgaucgccuccggcaucgccgucagcaaggugcugcaccucgagggcgaggugaacaagaucaagaacgcccugcuguccaccaacaaggccgucgugagccucuccaacggggugagcguccugaccuccaaggugcuggaccucaagaacuacaucgacaagcagcugcugcccaucgugaacaagcagagcugcuccaucagcaacaucgagaccgucaucgaguuccagcagaagaacaaccgccuccuggagaucacgcgggaguucagcgugaacgcgggcgugaccacccccgucuccaccuacaugcugacgaacagcgagcuccugucccugaucaacgacaugccgaucaccaacgaccagaagaagcucaugagcaacaacgugcagaucgugcgccagcaguccuacagcaucauguccaucaucaaggaggagguccuggccuacguggugcagcugccccucuacggggucaucgacacccccugcuggaagcugcacaccagcccccugugcacgaccaacaccaaggagggcuccaacaucugccucacccggacggaccgcgggugguacugcgacaacgccggcagcguguccuucuucccgcaggccgagaccugcaagguccagagcaaccggguguucugcgacaccaugaacucccugacccugcccagcgaggugaaccucugcaacaucgacaucuucaaccccaaguacgacugcaagaucaugacguccaagaccgacgucagcuccagcgugaucaccucccugggcgccaucgugagcugcuacgggaagaccaagugcacggcgagcaacaagaaccgcggcaucaucaagaccuucuccaacgggugcgacuacgucagcaacaagggcguggacaccguguccgucggcaacacccuguacuacgugaacaagcaggagggcaagagccucuacgugaagggggagcccaucaucaacuucuacgacccgcuggucuuccccuccgacgaguucgacgccagcaucucccaggugaacgagaagaucaaccagagccuggccuucauccggaaguccgacgagcuccugcacaacgugaacgucggcaagagcaccacgaacaucaugaucaccaccaucaucaucgugaucaucgugauccugcugcuccugaucgccgucgggcuguuccucuacugcaaggcccgcuccacccccgugacgcugagcaaggaccagcuguccgggaucaacaacaucgcguucagcaacugaggacuaguguccaccugucccuccugggcugcuggauugucucguuuuccugccaaauaaacaggaucagcgcuuuacagaucuaaaaaaaaaaaaaaaaaaaaaaaaaaaaaaaaaaaaaaaaaaaaaaaaaaaaaaaaaaaaaaaaugcaucccccccccccccccccccccccccccccccaaaggcucuuuucagagccaccagaauu

SEQ ID NO: 11817 - RNA, 2033 nt, Artificial Sequence
  mRNA product Design c-1 comprising derived and/or modified sequence from HRSV(Memphis-37)__AIY60640.1__F0 (opt2)
gggagaguccgcucagccagguugcagaagcggcuuagcguguguccuaaucuucucucugcguguagguaggccugugccgcaaacaagcuuaccauggagcuccccauccucaagaccaacgccaucaccaccauccucgccgccgucacccucugcuucgccuccucccagaacaucaccgaggaguucuaccaguccaccugcuccgccgucuccaagggcuaccucuccgcccuccgcaccggcugguacaccuccgucaucaccaucgagcucuccaacaucaaggagaacaagugcaacggcaccgacgccaaggucaagcucaucaagcaggagcucgacaaguacaagaacgccgucaccgagcuccagcuccucaugcaguccacccccgccgccaacaaccgcgcccgccgcgagcucccccgcuucaugaacuacacccucaacaacaccaagaacaacaacgucacccucuccaagaagcgcaagcgccgcuuccucggcuuccuccucggcgucggcuccgccaucgccuccggcaucgccgucuccaagguccuccaccucgagggcgaggucaacaagaucaagaacgcccuccucuccaccaacaaggccgucgucucccucuccaacggcgucuccguccucaccuccaagguccucgaccucaagaacuacaucgacaagcagcuccuccccaucgucaacaagcaguccugcuccaucuccaacaucgagaccgucaucgaguuccagcagaagaacaaccgccuccucgagaucacccgcgaguucuccgucaacgccggcgucaccacccccgucuccaccuacaugcucaccaacuccgagcuccucucccucaucaacgacaugcccaucaccaacgaccagaagaagcucauguccaacaacguccagaucguccgccagcaguccuacuccaucauguccaucaucaaggaggagguccucgccuacgucguccagcucccccucuacggcgucaucgacacccccugcuggaagcuccacaccuccccccucugcaccaccaacaccaaggagggcuccaacaucugccucacccgcaccgaccgcggcugguacugcgacaacgccggcuccgucuccuucuucccccaggccgagaccugcaagguccaguccaaccgcgucuucugcgacaccaugaacucccucacccuccccuccgaggucaaccucugcaacaucgacaucuucaaccccaaguacgacugcaagaucaugaccuccaagaccgacgucuccuccuccgucaucaccucccucggcgccaucgucuccugcuacggcaagaccaagugcaccgccuccaacaagaaccgcggcaucaucaagaccuucuccaacggcugcgacuacgucuccaacaagggcgucgacaccgucuccgucggcaacacccucuacuacgucaacaagcaggagggcaagucccucuacgucaagggcgagcccaucaucaacuucuacgacccccucgucuuccccuccgacgaguucgacgccuccaucucccaggucaacgagaagaucaaccagucccucgccuucauccgcaaguccgacgagcuccuccacaacgucaacgucggcaaguccaccaccaacaucaugaucaccaccaucaucaucgucaucaucgucauccuccuccuccucaucgccgucggccucuuccucuacugcaaggcccgcuccacccccgucacccucuccaaggaccagcucuccggcaucaacaacaucgccuucuccaacugaggacuaguguccaccugucccuccugggcugcuggauugucucguuuuccugccaaauaaacaggaucagcgcuuuacagaucuaaaaaaaaaaaaaaaaaaaaaaaaaaaaaaaaaaaaaaaaaaaaaaaaaaaaaaaaaaaaaaaaugcaucccccccccccccccccccccccccccccccaaaggcucuuuucagagccaccagaauu

SEQ ID NO: 11818 - RNA, 2033 nt, Artificial Sequence
  mRNA product Design c-1 comprising derived and/or modified sequence from HRSV(Memphis-37)__AIY60640.1__F0 (opt3)
gggagaguccgcucagccagguugcagaagcggcuuagcguguguccuaaucuucucucugcguguagguaggccugugccgcaaacaagcuuaccauggagcugcccauccucaagaccaacgccauuacaacuauacuugcugcagugacgcugugcuucgccagcucccagaauaucaccgaagaguuuuaccaaucuacauguucagcggucaguaaaggcuauuugagcgcuuuaagaacugggugguacaccuccguuauuacaaucgaacugucuaacauuaaggagaauaaaugcaacggaaccgacgccaaggugaaacuaaucaagcaggaacucgauaaguauaaaaaugcaguaacugagcugcagcuucugaugcagucgaccccugccgcuaacaauagggcacggcgcgaguugccacgauucaugaacuacacacucaauaacacgaagaauaacaaugugacucugagcaaaaagcguaaaagaagguuucuggguuuccucuuaggcgucgggucagccauagcuaguggaaucgccguguccaagguucugcaccuugaaggcgaggugaacaagauuaaaaaugcguugcugucuaccaacaaggcagucgugagccuauccaacgguguaucaguucucacaaguaaagugcuggaccuuaagaauuauaucgauaaacaacuguugccgauugucaacaagcagagcuguucuaucuccaauauagaaacugugauugaguuucagcagaaaaacaaucggcuccuggagaucacccgcgaguucucagugaacgccggggucacaacccccguuagcacguacauguuaacuaauagugaacugcucucucuuauuaacgacaugccuaucacaaaugaucaaaagaagcugauguccaacaaugugcagaucguaagacagcagagcuauucgauuaugucuauaaucaaagaagagguguuggcuuacgucgugcaacuaccacuguacggaguuauugacacccccugcuggaagcuccauacuuccccucuguguacaaccaacacgaaagaaggcucaaauaucugccuuaccaggacagaucggggcugguauugugacaacgccgggagugugagcuuuuucccacaggcagagacuugcaagguccaguccaaucgcguguuuugugauaccaugaacucucugacauugcccagcgagguaaaccucugcaauauagacauuuucaacccuaaauacgauuguaagaucaugacuucaaagaccgacguuaguuccagcgugaucacaucucugggagcuauugucucaugcuaugguaaaaccaagugcacugccaguaauaaaaaccgaggcaucauuaagacguuuagcaaugggugugauuacguguccaacaaaggagucgacacagugucuguuggcaauaccuuauauuacgugaacaagcaagaagguaagucgcuguauguaaaaggggagccaauaaucaauuucuacgacccgcuagucuuucccagcgaugaguucgacgcguccauuucacaggugaacgaaaagaucaaucagagucucgccuucaucagaaaaucugaugaacugcuucacaacguuaaugugggaaagagcacuaccaacauuaugauaacaaccaucauuaucgucauuaucgugauauugcugcuccugaucgcaguaggccuuuuucuguacugcaaagcuagguccacuccugugacauugucaaaggaccagcucagcggcauuaauaacaucgccuucucuaacugaggacuaguguccaccugucccuccugggcugcuggauugucucguuuuccugccaaauaaacaggaucagcgcuuuacagaucuaaaaaaaaaaaaaaaaaaaaaaaaaaaaaaaaaaaaaaaaaaaaaaaaaaaaaaaaaaaaaaaaugcaucccccccccccccccccccccccccccccccaaaggcucuuuucagagccaccagaauu

SEQ ID NO: 11819 - RNA, 2033 nt, Artificial Sequence
  mRNA product Design c-1 comprising derived and/or modified sequence from HRSV(Memphis-37)__AIY60640.1__F0 (opt4)
gggagaguccgcucagccagguugcagaagcggcuuagcguguguccuaaucuucucucugcguguagguaggccugugccgcaaacaagcuuaccauggagcugcccauccugaagaccaacgccaucaccaccauccuggccgccgugacccugugcuucgccagcagccagaacaucaccgaggaguucuaccagagcaccugcagcgccgugagcaagggcuaccugagcgcccugagaaccggcugguacaccagcgugaucaccaucgagcugagcaacaucaaggagaacaagugcaacggcaccgacgccaaggugaagcugaucaagcaggagcuggacaaguacaagaacgccgugaccgagcugcagcugcugaugcagagcacccccgccgccaacaacagagccagaagagagcugcccagauucaugaacuacacccugaacaacaccaagaacaacaacgugacccugagcaagaagagaaagagaagauuccugggcuuccugcugggcgugggcagcgccaucgccagcggcaucgccgugagcaaggugcugcaccuggagggcgaggugaacaagaucaagaacgcccugcugagcaccaacaaggccguggugagccugagcaacggcgugagcgugcugaccagcaaggugcuggaccugaagaacuacaucgacaagcagcugcugcccaucgugaacaagcagagcugcagcaucagcaacaucgagaccgugaucgaguuccagcagaagaacaacagacugcuggagaucaccagagaguucagcgugaacgccggcgugaccacccccgugagcaccuacaugcugaccaacagcgagcugcugagccugaucaacgacaugcccaucaccaacgaccagaagaagcugaugagcaacaacgugcagaucgugagacagcagagcuacagcaucaugagcaucaucaaggaggaggugcuggccuacguggugcagcugccccuguacggcgugaucgacacccccugcuggaagcugcacaccagcccccugugcaccaccaacaccaaggagggcagcaacaucugccugaccagaaccgacagaggcugguacugcgacaacgccggcagcgugagcuucuucccccaggccgagaccugcaaggugcagagcaacagaguguucugcgacaccaugaacagccugacccugcccagcgaggugaaccugugcaacaucgacaucuucaaccccaaguacgacugcaagaucaugaccagcaagaccgacgugagcagcagcgugaucaccagccugggcgccaucgugagcugcuacggcaagaccaagugcaccgccagcaacaagaacagaggcaucaucaagaccuucagcaacggcugcgacuacgugagcaacaagggcguggacaccgugagcgugggcaacacccuguacuacgugaacaagcaggagggcaagagccuguacgugaagggcgagcccaucaucaacuucuacgacccccugguguuccccagcgacgaguucgacgccagcaucagccaggugaacgagaagaucaaccagagccuggccuucaucagaaagagcgacgagcugcugcacaacgugaacgugggcaagagcaccaccaacaucaugaucaccaccaucaucaucgugaucaucgugauccugcugcugcugaucgccgugggccuguuccuguacugcaaggccagaagcacccccgugacccugagcaaggaccagcugagcggcaucaacaacaucgccuucagcaacugaggacuaguguccaccugucccuccugggcugcuggauugucucguuuuccugccaaauaaacaggaucagcgcuuuacagaucuaaaaaaaaaaaaaaaaaaaaaaaaaaaaaaaaaaaaaaaaaaaaaaaaaaaaaaaaaaaaaaaaugcaucccccccccccccccccccccccccccccccaaaggcucuuuucagagccaccagaauu

SEQ ID NO: 11820 - RNA, 2033 nt, Artificial Sequence
  mRNA product Design c-1 comprising derived and/or modified sequence from HRSV(Memphis-37)__AIY60640.1__F0 (opt5)
gggagaguccgcucagccagguugcagaagcggcuuagcguguguccuaaucuucucucugcguguagguaggccugugccgcaaacaagcuuaccauggagcugcccauccucaagaccaacgccauuacaacgauccuggcugccgugacccuuugcuucgcgagcucccagaauauuacagaagaguuuuaccaaucuaccuguagcgcugucuccaaaggcuaucugucugcccucagaacagggugguacaccagcguuaucacaauugaacuguccaacaucaaggagaauaaaugcaacggaaccgacgccaaggugaaacuuaucaagcaggaacuggauaaguauaaaaaugcugugacggagcuccagcugcugaugcagucuaccccugccgcuaacaaucgggcccgcagagagcucccgcgguucaugaacuacacacugaauaacaccaagaauaacaaugucacacuuagcaaaaagcgcaaaagacgguuucugggcuuccuccugggggugggauccgcgauugccagcggcaucgcuguuucuaaggugcuucaccuggaaggggaggucaacaagauuaaaaaugcccuccuguccaccaacaaggcugugguuagccugucuaacggaguguccguccucacgagcaaagugcuggaccuuaagaauuauaucgauaaacaacugcuccccauugugaacaagcagucuuguuccaucagcaauauugaaacagucaucgaguuucagcagaaaaacaaucgccugcuugagaucaccagagaauuuuccguuaacgccggcgugacaaccccugugucuaccuacaugcugacaaauagcgagcuccugucccugauuaacgacaugcccaucacgaaugaucaaaagaagcucaugagcaacaauguccagauugugcggcagcagucuuauuccaucaugagcauuaucaaagaagagguucuggcguacgugguccaacuuccucuguacggcgugaucgacacccccugcuggaagcuccauacaucuccucuguguaccacaaacaccaaagaagggagcaauauuugccuuacgcgcacagauagaggaugguauugugacaacgccggcuccguuucuuucuucccgcaggcugagaccugcaaggugcagagcaaucgggucuuuugugauaccaugaacucccugacacuccccagcgaggugaaccugugcaauaucgacauuuucaacccuaaauacgauuguaagaucaugaccucuaagacagacgucuccagcucugugauuacgucccugggggccaucguuagcugcuauggaaaaaccaagugcacagcuuccaauaaaaaccgcggcaucauuaagaccuuuucuaaugggugugauuacgugagcaacaaaggagucgacacaguguccguuggcaauacccucuauuacgugaacaagcaagaaggcaagucucuguaugucaaaggggagcccaucauuaauuucuacgacccucuuguguuucccagcgaugaguucgacgccuccaucagccaggugaacgaaaagauuaaucagucucuggccuucaucagaaaauccgaugaacuccugcacaacguuaaugucggaaagagcacgaccaacauuaugaucacaaccaucauuaucgugauuaucgugauucugcuucuccugaucgcugucggccuguuucucuacugcaaagcgcggucuacaccggugacccuguccaaggaccagcuuagcgggaucaauaacauugccuucucuaacugaggacuaguguccaccugucccuccugggcugcuggauugucucguuuuccugccaaauaaacaggaucagcgcuuuacagaucuaaaaaaaaaaaaaaaaaaaaaaaaaaaaaaaaaaaaaaaaaaaaaaaaaaaaaaaaaaaaaaaaugcaucccccccccccccccccccccccccccccccaaaggcucuuuucagagccaccagaauu

SEQ ID NO: 11821 - RNA, 2033 nt, Artificial Sequence
  mRNA product Design c-1 comprising derived and/or modified sequence from HRSV(Memphis-37)__AIY60640.1__F0 (opt6)
gggagaguccgcucagccagguugcagaagcggcuuagcguguguccuaaucuucucucugcguguagguaggccugugccgcaaacaagcuuaccauggaacugccuauucuaaaaacaaaugccauaacaacaauucuugcagcaguaacauuauguuuugcaucaucacaaaacauuacagaagaauuuuaccaauccacuugcucagccguaucaaaaggauaccuaucagccuuaagaacagguugguacaccucaguaauaaccauagaacuaucaaacauaaaagaaaacaaaugcaaugguacugaugcaaaagucaaacuaaucaaacaagaacuggacaaauacaaaaaugcaguaaccgaacuacaacuccuaaugcaauccacaccugcagccaacaacagagcaagacgcgaacuaccaagauuuaugaauuacacauuaaacaacaccaagaacaacaauguaacucucucaaaaaaaagaaaaagacgcuuucuagguuuccuccuaggcgucggaucugcaauagccucaggaauagcaguaucaaaaguucuacaccuagaaggagaaguaaacaaaauuaaaaacgcauuacuaucaaccaacaaagcaguuguaucccuuucaaauggagucucuguacuuacaucaaaaguacucgaccuaaaaaacuauauagacaaacaacuacucccaauagucaauaagcaaucaugcagcauaucaaacauagaaacaguuauagaauuucaacaaaaaaacaacagacuacucgaaauaaccagagaauuuagcgucaacgcaggcguaaccacaccgguauccacauacaugcuuacaaacucagaacuccucucacuaauaaacgacaugccaauaacuaaugaccaaaaaaaacuaaugucaaacaauguccaaauaguccgucaacaaucauacucaauaaugucaauaauaaaagaagaaguauuagcauauguaguccaacuaccauuauacggcguuauagacacaccuuguuggaaacuucacacauccccacucuguacaaccaacacaaaagaagguuccaauauaugccuaacuagaaccgacagaggaugguauugcgacaacgcaggaucuguaucauucuuuccccaagcagaaacauguaaaguacaaaguaaccgcguauucugcgacaccaugaacucauuaacccucccauccgaaguuaauuuaugcaauauagacauauuuaauccuaaauacgacugcaaaauaaugacaucaaaaacagacguuaguuccuccguaaucacaucuuugggcgcaauagucucaugcuauggaaaaacaaaaugcacagccucaaacaaaaauagaggaauaauaaaaacauucagcaacggcugugauuauguauccaacaaaggaguagacacaguauccguaggcaauacccuuuacuacguuaauaaacaagaaggaaaaucauuauacgucaaaggagaaccuaucauaaauuucuacgacccauuaguauucccuucagacgaauuugaugccucaauaucccaagucaaugaaaaaaucaaccaaucacuagccuuuauccgcaaaucagacgaauuacuacacaacguaaacguaggcaaaucaacaacuaauauaaugauaacaacaauaauaauaguaauuauaguaauauuauuacuacuaaucgccguagguuuauucuuauacuguaaagcacgaucaacaccaguuacacucucaaaagaucaacuaucaggaauaaacaacauagcauuuuccaauuaaggacuaguguccaccugucccuccugggcugcuggauugucucguuuuccugccaaauaaacaggaucagcgcuuuacagaucuaaaaaaaaaaaaaaaaaaaaaaaaaaaaaaaaaaaaaaaaaaaaaaaaaaaaaaaaaaaaaaaaugcaucccccccccccccccccccccccccccccccaaaggcucuuuucagagccaccagaauu

SEQ ID NO: 11822 - RNA, 2033 nt, Artificial Sequence
  mRNA product Design c-1 comprising derived and/or modified sequence from HRSV(Memphis-37)__AIY60640.1__F0 (opt11)
gggagaguccgcucagccagguugcagaagcggcuuagcguguguccuaaucuucucucugcguguagguaggccugugccgcaaacaagcuuaccauggaacuccccauccucaaaacaaacgccauaaccacuauccucgccgccgucacccucugcuucgccuccucccaaaacaucacagaggaguucuaccaauccacaugcuccgccgucuccaaaggcuaccucagcgcccuacguaccggcugguacaccagcgucaucacaauagaacucuccaacaucaaggaaaacaaaugcaacggcaccgaugccaaaguaaaacucaucaaacaagaacucgauaaauacaaaaacgccgucaccgaacuacaacuccuaaugcaaagcacacccgccgccaacaacagagcacggcgcgaacugccccgcuucaugaacuacacccucaacaacaccaaaaauaacaacgucacccuauccaagaaacgcaaacgccgauuccucgguuuccuacucggcguaggaagcgccauagccucaggcaucgccgucuccaaaguccuccaucuggaaggcgaagucaacaaaaucaaaaacgcacucuuauccaccaacaaagccgucgucucccucucgaacggggucuccguccuuaccuccaaaguccucgaccuuaaaaacuacaucgacaaacaacuacuaccaauagucaauaaacaauccugcuccaucucaaacauagaaaccgucauagaguuccaacagaagaacaaucgccuccucgaaauaacucgcgaguucuccgucaacgcaggcgucacgaccccugucucaacauacaugcuaacuaacucagaacuccuaagccuaaucaacgacaugcccaucacaaacgaccaaaagaaacucaugagcaacaauguccagauagucagacagcaauccuauagcaucaugucuauaauaaaagaagaagugcucgccuacguaguccaacucccucuuuacggcgucauagacacacccugcuggaaacuccacacaucuccucucugcaccaccaacacaaaagaaggcagcaacaucugccugacccgaaccgaccgcggaugguacugcgacaacgcuggcuccgugucuuucuuuccccaagccgaaaccugcaaaguccaguccaaccgcgucuucugcgacacaaugaacucccucacccuacccuccgaaguuaaccucugcaacaucgacaucuucaauccaaaauacgacugcaaaaucaugaccucgaaaacggacguauccuccuccgucauaacaucacuuggagccaucguuagcugcuacggaaaaaccaaauguaccgccuccaacaaaaaccgcggaauaaucaaaacauucuccaacggcugcgacuacguaagcaacaaaggggucgauacugucuccguagguaacacccuauacuacgucaacaaacaagaaggaaaaucacuauacguuaaaggcgaacccauuaucaacuucuacgacccccucguuuucccauccgacgaguucgacgccuccauaagccaaguuaacgaaaagauaaaccaaucgcucgcauucauccgcaaauccgacgaacuccuacacaacgucaacgugggcaaauccacaacaaacaucaugaucaccaccaucauuaucgucauaauagucauccuccuccugcucaucgccgugggacuauuccuauacugcaaagcccgcucgacgcccgucacacuuuccaaagaccaacuaagcggaaucaacaacauagcguucagcaauuaaggacuaguguccaccugucccuccugggcugcuggauugucucguuuuccugccaaauaaacaggaucagcgcuuuacagaucuaaaaaaaaaaaaaaaaaaaaaaaaaaaaaaaaaaaaaaaaaaaaaaaaaaaaaaaaaaaaaaaaugcaucccccccccccccccccccccccccccccccaaaggcucuuuucagagccaccagaauu

SEQ ID NO: 11823 - RNA, 2123 nt, Artificial Sequence
  mRNA product Design c-2 comprising derived and/or modified sequence from HRSV(Memphis-37)__AIY60640.1__F0 (wt)
gggagacuccugucgggcggaaguaggaggaguagaguuuaaaaacaguacucuuuuuccgguucgggacguaguugaagcaacgacaagccggauaaccgcucuugagacaggaagcuuaccauggaguugccaauccucaaaacaaaugcaauuaccacaauccuugcugcagucacacucuguuucgcuuccagucaaaacaucacugaagaauuuuaucaaucaacaugcagugcaguuagcaaaggcuaucuuagugcuuuaagaacugguugguauacuaguguuauaacuauagaauuaaguaauaucaaggaaaauaaguguaauggaacagaugcuaagguaaaauugauaaaacaagaauuagauaaauauaaaaaugcuguaacagaauugcaguugcucaugcaaagcacaccagcagccaacaaucgagccagaagagaacuaccaagguuuaugaauuauacacucaacaauaccaaaaauaacaauguaacauuaagcaagaaaaggaaaagaagauuucuuggcuuuuuguuagguguuggaucugcaaucgccaguggcauugcuguaucuaaaguccugcaccuagaaggggaagugaacaaaaucaaaaaugcucuacuauccacaaacaaggcuguagucagcuuaucaaauggaguuagugucuuaaccagcaaaguguuagaccucaaaaacuauauagauaaacaguuguuacccauugugaacaagcaaagcugcagcauaucaaacauugaaacugugauagaauuccaacaaaagaacaacagacuacuagagauuaccagggaauuuaguguuaaugcagguguaacuacaccuguaagcacuuauauguuaacaaauagugaauuauuaucauuaaucaaugauaugccuauaacaaaugaucagaaaaaguuaauguccaacaauguucaaauaguuagacagcaaaguuacucuaucauguccauaauaaaggaggaagucuuagcauauguaguucaauuaccacuauaugguguaauagauacaccuuguuggaaacuacacacauccccucuaugcacaaccaacacaaaggaaggguccaacaucuguuuaacaagaaccgacagaggaugguacugugacaaugcaggaucagugucuuucuucccacaagcugaaacaugcaaaguucaaucgaaucgaguauuuugugacacaaugaacagucuaacauuaccaagugaaguaaaucucugcaacauugacauauucaacccuaaauaugauugcaaaauuaugacuucaaaaacagaugugagcagcuccguuaucacaucucuaggagccauugugucaugcuauggcaaaacuaaauguacagcauccaauaaaaaucguggaaucauaaagacauuuucuaacgggugugauuauguaucaaauaaggggguggacacuguaucuguagguaauacauuauauuauguaaauaagcaagaaggaaaaagccucuauguaaaaggugaaccaauaauaaauuucuaugacccauuaguguucccuucugaugaauuugaugcaucaauaucucaagucaaugagaagauuaaccagagccuagcauuuauucguaaauccgaugaauuauuacauaauguaaauguugguaaauccaccacaaauaucaugauaacuacuauaauuauagugauuauaguaauauuguuauuauuaauugcaguugggcuguuccuauacugcaaggccagaagcacaccagucacacuaagcaaggaucaacugagugguauaaauaauauugcauuuaguaacugaggacuaguggaagcauuuuccuggcugauuaaaagaaauuacucagcuauggucaucuguuccuguuagaaggcuaugcagcauauuauauacuaugcgcauguuaugaaaugcauaauaaaaaauuuuaaaaaaucuaaaagaucuaaaaaaaaaaaaaaaaaaaaaaaaaaaaaaaaaaaaaaaaaaaaaaaaaaaaaaaaaaaaaaaaugcaucccccccccccccccccccccccccccccccaaaggcucuuuucagagccaccagaauu

SEQ ID NO: 11824 - RNA, 2123 nt, Artificial Sequence
  mRNA product Design c-2 comprising derived and/or modified sequence from HRSV(Memphis-37)__AIY60640.1__F0 (opt1)
gggagacuccugucgggcggaaguaggaggaguagaguuuaaaaacaguacucuuuuuccgguucgggacguaguugaagcaacgacaagccggauaaccgcucuugagacaggaagcuuaccauggagcugcccauccucaagaccaacgccaucaccacgauccuggccgcggugacccugugcuucgccagcucccagaacaucaccgaggaguucuaccagagcacgugcuccgccgucagcaagggcuaccucuccgcccugcgcaccgggugguacaccagcgugaucaccaucgagcuguccaacaucaaggagaacaagugcaacggcaccgacgccaaggugaagcucaucaagcaggagcuggacaaguacaagaacgcggucacggagcugcagcuccugaugcagagcaccccggccgccaacaaccgggcccgccgggagcugccccgcuucaugaacuacacccucaacaacaccaagaacaacaacgugacgcuguccaagaagcggaagcgccgguuccugggguuccuccugggcguggggagcgcgaucgccuccggcaucgccgucagcaaggugcugcaccucgagggcgaggugaacaagaucaagaacgcccugcuguccaccaacaaggccgucgugagccucuccaacggggugagcguccugaccuccaaggugcuggaccucaagaacuacaucgacaagcagcugcugcccaucgugaacaagcagagcugcuccaucagcaacaucgagaccgucaucgaguuccagcagaagaacaaccgccuccuggagaucacgcgggaguucagcgugaacgcgggcgugaccacccccgucuccaccuacaugcugacgaacagcgagcuccugucccugaucaacgacaugccgaucaccaacgaccagaagaagcucaugagcaacaacgugcagaucgugcgccagcaguccuacagcaucauguccaucaucaaggaggagguccuggccuacguggugcagcugccccucuacggggucaucgacacccccugcuggaagcugcacaccagcccccugugcacgaccaacaccaaggagggcuccaacaucugccucacccggacggaccgcgggugguacugcgacaacgccggcagcguguccuucuucccgcaggccgagaccugcaagguccagagcaaccggguguucugcgacaccaugaacucccugacccugcccagcgaggugaaccucugcaacaucgacaucuucaaccccaaguacgacugcaagaucaugacguccaagaccgacgucagcuccagcgugaucaccucccugggcgccaucgugagcugcuacgggaagaccaagugcacggcgagcaacaagaaccgcggcaucaucaagaccuucuccaacgggugcgacuacgucagcaacaagggcguggacaccguguccgucggcaacacccuguacuacgugaacaagcaggagggcaagagccucuacgugaagggggagcccaucaucaacuucuacgacccgcuggucuuccccuccgacgaguucgacgccagcaucucccaggugaacgagaagaucaaccagagccuggccuucauccggaaguccgacgagcuccugcacaacgugaacgucggcaagagcaccacgaacaucaugaucaccaccaucaucaucgugaucaucgugauccugcugcuccugaucgccgucgggcuguuccucuacugcaaggcccgcuccacccccgugacgcugagcaaggaccagcuguccgggaucaacaacaucgcguucagcaacugaggacuaguggaagcauuuuccuggcugauuaaaagaaauuacucagcuauggucaucuguuccuguuagaaggcuaugcagcauauuauauacuaugcgcauguuaugaaaugcauaauaaaaaauuuuaaaaaaucuaaaagaucuaaaaaaaaaaaaaaaaaaaaaaaaaaaaaaaaaaaaaaaaaaaaaaaaaaaaaaaaaaaaaaaaugcaucccccccccccccccccccccccccccccccaaaggcucuuuucagagccaccagaauu

SEQ ID NO: 11825 - RNA, 2123 nt, Artificial Sequence
  mRNA product Design c-2 comprising derived and/or modified sequence from HRSV(Memphis-37)__AIY60640.1__F0 (opt2)
gggagacuccugucgggcggaaguaggaggaguagaguuuaaaaacaguacucuuuuuccgguucgggacguaguugaagcaacgacaagccggauaaccgcucuugagacaggaagcuuaccauggagcuccccauccucaagaccaacgccaucaccaccauccucgccgccgucacccucugcuucgccuccucccagaacaucaccgaggaguucuaccaguccaccugcuccgccgucuccaagggcuaccucuccgcccuccgcaccggcugguacaccuccgucaucaccaucgagcucuccaacaucaaggagaacaagugcaacggcaccgacgccaaggucaagcucaucaagcaggagcucgacaaguacaagaacgccgucaccgagcuccagcuccucaugcaguccacccccgccgccaacaaccgcgcccgccgcgagcucccccgcuucaugaacuacacccucaacaacaccaagaacaacaacgucacccucuccaagaagcgcaagcgccgcuuccucggcuuccuccucggcgucggcuccgccaucgccuccggcaucgccgucuccaagguccuccaccucgagggcgaggucaacaagaucaagaacgcccuccucuccaccaacaaggccgucgucucccucuccaacggcgucuccguccucaccuccaagguccucgaccucaagaacuacaucgacaagcagcuccuccccaucgucaacaagcaguccugcuccaucuccaacaucgagaccgucaucgaguuccagcagaagaacaaccgccuccucgagaucacccgcgaguucuccgucaacgccggcgucaccacccccgucuccaccuacaugcucaccaacuccgagcuccucucccucaucaacgacaugcccaucaccaacgaccagaagaagcucauguccaacaacguccagaucguccgccagcaguccuacuccaucauguccaucaucaaggaggagguccucgccuacgucguccagcucccccucuacggcgucaucgacacccccugcuggaagcuccacaccuccccccucugcaccaccaacaccaaggagggcuccaacaucugccucacccgcaccgaccgcggcugguacugcgacaacgccggcuccgucuccuucuucccccaggccgagaccugcaagguccaguccaaccgcgucuucugcgacaccaugaacucccucacccuccccuccgaggucaaccucugcaacaucgacaucuucaaccccaaguacgacugcaagaucaugaccuccaagaccgacgucuccuccuccgucaucaccucccucggcgccaucgucuccugcuacggcaagaccaagugcaccgccuccaacaagaaccgcggcaucaucaagaccuucuccaacggcugcgacuacgucuccaacaagggcgucgacaccgucuccgucggcaacacccucuacuacgucaacaagcaggagggcaagucccucuacgucaagggcgagcccaucaucaacuucuacgacccccucgucuuccccuccgacgaguucgacgccuccaucucccaggucaacgagaagaucaaccagucccucgccuucauccgcaaguccgacgagcuccuccacaacgucaacgucggcaaguccaccaccaacaucaugaucaccaccaucaucaucgucaucaucgucauccuccuccuccucaucgccgucggccucuuccucuacugcaaggcccgcuccacccccgucacccucuccaaggaccagcucuccggcaucaacaacaucgccuucuccaacugaggacuaguggaagcauuuuccuggcugauuaaaagaaauuacucagcuauggucaucuguuccuguuagaaggcuaugcagcauauuauauacuaugcgcauguuaugaaaugcauaauaaaaaauuuuaaaaaaucuaaaagaucuaaaaaaaaaaaaaaaaaaaaaaaaaaaaaaaaaaaaaaaaaaaaaaaaaaaaaaaaaaaaaaaaugcaucccccccccccccccccccccccccccccccaaaggcucuuuucagagccaccagaauu

SEQ ID NO: 11826 - RNA, 2123 nt, Artificial Sequence
  mRNA product Design c-2 comprising derived and/or modified sequence from HRSV(Memphis-37)__AIY60640.1__F0 (opt3)
gggagacuccugucgggcggaaguaggaggaguagaguuuaaaaacaguacucuuuuuccgguucgggacguaguugaagcaacgacaagccggauaaccgcucuugagacaggaagcuuaccauggagcugcccauccucaagaccaacgccauuacaacuauacuugcugcagugacgcugugcuucgccagcucccagaauaucaccgaagaguuuuaccaaucuacauguucagcggucaguaaaggcuauuugagcgcuuuaagaacugggugguacaccuccguuauuacaaucgaacugucuaacauuaaggagaauaaaugcaacggaaccgacgccaaggugaaacuaaucaagcaggaacucgauaaguauaaaaaugcaguaacugagcugcagcuucugaugcagucgaccccugccgcuaacaauagggcacggcgcgaguugccacgauucaugaacuacacacucaauaacacgaagaauaacaaugugacucugagcaaaaagcguaaaagaagguuucuggguuuccucuuaggcgucgggucagccauagcuaguggaaucgccguguccaagguucugcaccuugaaggcgaggugaacaagauuaaaaaugcguugcugucuaccaacaaggcagucgugagccuauccaacgguguaucaguucucacaaguaaagugcuggaccuuaagaauuauaucgauaaacaacuguugccgauugucaacaagcagagcuguucuaucuccaauauagaaacugugauugaguuucagcagaaaaacaaucggcuccuggagaucacccgcgaguucucagugaacgccggggucacaacccccguuagcacguacauguuaacuaauagugaacugcucucucuuauuaacgacaugccuaucacaaaugaucaaaagaagcugauguccaacaaugugcagaucguaagacagcagagcuauucgauuaugucuauaaucaaagaagagguguuggcuuacgucgugcaacuaccacuguacggaguuauugacacccccugcuggaagcuccauacuuccccucuguguacaaccaacacgaaagaaggcucaaauaucugccuuaccaggacagaucggggcugguauugugacaacgccgggagugugagcuuuuucccacaggcagagacuugcaagguccaguccaaucgcguguuuugugauaccaugaacucucugacauugcccagcgagguaaaccucugcaauauagacauuuucaacccuaaauacgauuguaagaucaugacuucaaagaccgacguuaguuccagcgugaucacaucucugggagcuauugucucaugcuaugguaaaaccaagugcacugccaguaauaaaaaccgaggcaucauuaagacguuuagcaaugggugugauuacguguccaacaaaggagucgacacagugucuguuggcaauaccuuauauuacgugaacaagcaagaagguaagucgcuguauguaaaaggggagccaauaaucaauuucuacgacccgcuagucuuucccagcgaugaguucgacgcguccauuucacaggugaacgaaaagaucaaucagagucucgccuucaucagaaaaucugaugaacugcuucacaacguuaaugugggaaagagcacuaccaacauuaugauaacaaccaucauuaucgucauuaucgugauauugcugcuccugaucgcaguaggccuuuuucuguacugcaaagcuagguccacuccugugacauugucaaaggaccagcucagcggcauuaauaacaucgccuucucuaacugaggacuaguggaagcauuuuccuggcugauuaaaagaaauuacucagcuauggucaucuguuccuguuagaaggcuaugcagcauauuauauacuaugcgcauguuaugaaaugcauaauaaaaaauuuuaaaaaaucuaaaagaucuaaaaaaaaaaaaaaaaaaaaaaaaaaaaaaaaaaaaaaaaaaaaaaaaaaaaaaaaaaaaaaaaugcaucccccccccccccccccccccccccccccccaaaggcucuuuucagagccaccagaauu

SEQ ID NO: 11827 - RNA, 2123 nt, Artificial Sequence
  mRNA product Design c-2 comprising derived and/or modified sequence from HRSV(Memphis-37)__AIY60640.1__F0 (opt4)
gggagacuccugucgggcggaaguaggaggaguagaguuuaaaaacaguacucuuuuuccgguucgggacguaguugaagcaacgacaagccggauaaccgcucuugagacaggaagcuuaccauggagcugcccauccugaagaccaacgccaucaccaccauccuggccgccgugacccugugcuucgccagcagccagaacaucaccgaggaguucuaccagagcaccugcagcgccgugagcaagggcuaccugagcgcccugagaaccggcugguacaccagcgugaucaccaucgagcugagcaacaucaaggagaacaagugcaacggcaccgacgccaaggugaagcugaucaagcaggagcuggacaaguacaagaacgccgugaccgagcugcagcugcugaugcagagcacccccgccgccaacaacagagccagaagagagcugcccagauucaugaacuacacccugaacaacaccaagaacaacaacgugacccugagcaagaagagaaagagaagauuccugggcuuccugcugggcgugggcagcgccaucgccagcggcaucgccgugagcaaggugcugcaccuggagggcgaggugaacaagaucaagaacgcccugcugagcaccaacaaggccguggugagccugagcaacggcgugagcgugcugaccagcaaggugcuggaccugaagaacuacaucgacaagcagcugcugcccaucgugaacaagcagagcugcagcaucagcaacaucgagaccgugaucgaguuccagcagaagaacaacagacugcuggagaucaccagagaguucagcgugaacgccggcgugaccacccccgugagcaccuacaugcugaccaacagcgagcugcugagccugaucaacgacaugcccaucaccaacgaccagaagaagcugaugagcaacaacgugcagaucgugagacagcagagcuacagcaucaugagcaucaucaaggaggaggugcuggccuacguggugcagcugccccuguacggcgugaucgacacccccugcuggaagcugcacaccagcccccugugcaccaccaacaccaaggagggcagcaacaucugccugaccagaaccgacagaggcugguacugcgacaacgccggcagcgugagcuucuucccccaggccgagaccugcaaggugcagagcaacagaguguucugcgacaccaugaacagccugacccugcccagcgaggugaaccugugcaacaucgacaucuucaaccccaaguacgacugcaagaucaugaccagcaagaccgacgugagcagcagcgugaucaccagccugggcgccaucgugagcugcuacggcaagaccaagugcaccgccagcaacaagaacagaggcaucaucaagaccuucagcaacggcugcgacuacgugagcaacaagggcguggacaccgugagcgugggcaacacccuguacuacgugaacaagcaggagggcaagagccuguacgugaagggcgagcccaucaucaacuucuacgacccccugguguuccccagcgacgaguucgacgccagcaucagccaggugaacgagaagaucaaccagagccuggccuucaucagaaagagcgacgagcugcugcacaacgugaacgugggcaagagcaccaccaacaucaugaucaccaccaucaucaucgugaucaucgugauccugcugcugcugaucgccgugggccuguuccuguacugcaaggccagaagcacccccgugacccugagcaaggaccagcugagcggcaucaacaacaucgccuucagcaacugaggacuaguggaagcauuuuccuggcugauuaaaagaaauuacucagcuauggucaucuguuccuguuagaaggcuaugcagcauauuauauacuaugcgcauguuaugaaaugcauaauaaaaaauuuuaaaaaaucuaaaagaucuaaaaaaaaaaaaaaaaaaaaaaaaaaaaaaaaaaaaaaaaaaaaaaaaaaaaaaaaaaaaaaaaugcaucccccccccccccccccccccccccccccccaaaggcucuuuucagagccaccagaauu

SEQ ID NO: 11828 - RNA, 2123 nt, Artificial Sequence
  mRNA product Design c-2 comprising derived and/or modified sequence from HRSV(Memphis-37)__AIY60640.1__F0 (opt5)
gggagacuccugucgggcggaaguaggaggaguagaguuuaaaaacaguacucuuuuuccgguucgggacguaguugaagcaacgacaagccggauaaccgcucuugagacaggaagcuuaccauggagcugcccauccucaagaccaacgccauuacaacgauccuggcugccgugacccuuugcuucgcgagcucccagaauauuacagaagaguuuuaccaaucuaccuguagcgcugucuccaaaggcuaucugucugcccucagaacagggugguacaccagcguuaucacaauugaacuguccaacaucaaggagaauaaaugcaacggaaccgacgccaaggugaaacuuaucaagcaggaacuggauaaguauaaaaaugcugugacggagcuccagcugcugaugcagucuaccccugccgcuaacaaucgggcccgcagagagcucccgcgguucaugaacuacacacugaauaacaccaagaauaacaaugucacacuuagcaaaaagcgcaaaagacgguuucugggcuuccuccugggggugggauccgcgauugccagcggcaucgcuguuucuaaggugcuucaccuggaaggggaggucaacaagauuaaaaaugcccuccuguccaccaacaaggcugugguuagccugucuaacggaguguccguccucacgagcaaagugcuggaccuuaagaauuauaucgauaaacaacugcuccccauugugaacaagcagucuuguuccaucagcaauauugaaacagucaucgaguuucagcagaaaaacaaucgccugcuugagaucaccagagaauuuuccguuaacgccggcgugacaaccccugugucuaccuacaugcugacaaauagcgagcuccugucccugauuaacgacaugcccaucacgaaugaucaaaagaagcucaugagcaacaauguccagauugugcggcagcagucuuauuccaucaugagcauuaucaaagaagagguucuggcguacgugguccaacuuccucuguacggcgugaucgacacccccugcuggaagcuccauacaucuccucuguguaccacaaacaccaaagaagggagcaauauuugccuuacgcgcacagauagaggaugguauugugacaacgccggcuccguuucuuucuucccgcaggcugagaccugcaaggugcagagcaaucgggucuuuugugauaccaugaacucccugacacuccccagcgaggugaaccugugcaauaucgacauuuucaacccuaaauacgauuguaagaucaugaccucuaagacagacgucuccagcucugugauuacgucccugggggccaucguuagcugcuauggaaaaaccaagugcacagcuuccaauaaaaaccgcggcaucauuaagaccuuuucuaaugggugugauuacgugagcaacaaaggagucgacacaguguccguuggcaauacccucuauuacgugaacaagcaagaaggcaagucucuguaugucaaaggggagcccaucauuaauuucuacgacccucuuguguuucccagcgaugaguucgacgccuccaucagccaggugaacgaaaagauuaaucagucucuggccuucaucagaaaauccgaugaacuccugcacaacguuaaugucggaaagagcacgaccaacauuaugaucacaaccaucauuaucgugauuaucgugauucugcuucuccugaucgcugucggccuguuucucuacugcaaagcgcggucuacaccggugacccuguccaaggaccagcuuagcgggaucaauaacauugccuucucuaacugaggacuaguggaagcauuuuccuggcugauuaaaagaaauuacucagcuauggucaucuguuccuguuagaaggcuaugcagcauauuauauacuaugcgcauguuaugaaaugcauaauaaaaaauuuuaaaaaaucuaaaagaucuaaaaaaaaaaaaaaaaaaaaaaaaaaaaaaaaaaaaaaaaaaaaaaaaaaaaaaaaaaaaaaaaugcaucccccccccccccccccccccccccccccccaaaggcucuuuucagagccaccagaauu

SEQ ID NO: 11829 - RNA, 2123 nt, Artificial Sequence
  mRNA product Design c-2 comprising derived and/or modified sequence from HRSV(Memphis-37)__AIY60640.1__F0 (opt6)
gggagacuccugucgggcggaaguaggaggaguagaguuuaaaaacaguacucuuuuuccgguucgggacguaguugaagcaacgacaagccggauaaccgcucuugagacaggaagcuuaccauggaacugccuauucuaaaaacaaaugccauaacaacaauucuugcagcaguaacauuauguuuugcaucaucacaaaacauuacagaagaauuuuaccaauccacuugcucagccguaucaaaaggauaccuaucagccuuaagaacagguugguacaccucaguaauaaccauagaacuaucaaacauaaaagaaaacaaaugcaaugguacugaugcaaaagucaaacuaaucaaacaagaacuggacaaauacaaaaaugcaguaaccgaacuacaacuccuaaugcaauccacaccugcagccaacaacagagcaagacgcgaacuaccaagauuuaugaauuacacauuaaacaacaccaagaacaacaauguaacucucucaaaaaaaagaaaaagacgcuuucuagguuuccuccuaggcgucggaucugcaauagccucaggaauagcaguaucaaaaguucuacaccuagaaggagaaguaaacaaaauuaaaaacgcauuacuaucaaccaacaaagcaguuguaucccuuucaaauggagucucuguacuuacaucaaaaguacucgaccuaaaaaacuauauagacaaacaacuacucccaauagucaauaagcaaucaugcagcauaucaaacauagaaacaguuauagaauuucaacaaaaaaacaacagacuacucgaaauaaccagagaauuuagcgucaacgcaggcguaaccacaccgguauccacauacaugcuuacaaacucagaacuccucucacuaauaaacgacaugccaauaacuaaugaccaaaaaaaacuaaugucaaacaauguccaaauaguccgucaacaaucauacucaauaaugucaauaauaaaagaagaaguauuagcauauguaguccaacuaccauuauacggcguuauagacacaccuuguuggaaacuucacacauccccacucuguacaaccaacacaaaagaagguuccaauauaugccuaacuagaaccgacagaggaugguauugcgacaacgcaggaucuguaucauucuuuccccaagcagaaacauguaaaguacaaaguaaccgcguauucugcgacaccaugaacucauuaacccucccauccgaaguuaauuuaugcaauauagacauauuuaauccuaaauacgacugcaaaauaaugacaucaaaaacagacguuaguuccuccguaaucacaucuuugggcgcaauagucucaugcuauggaaaaacaaaaugcacagccucaaacaaaaauagaggaauaauaaaaacauucagcaacggcugugauuauguauccaacaaaggaguagacacaguauccguaggcaauacccuuuacuacguuaauaaacaagaaggaaaaucauuauacgucaaaggagaaccuaucauaaauuucuacgacccauuaguauucccuucagacgaauuugaugccucaauaucccaagucaaugaaaaaaucaaccaaucacuagccuuuauccgcaaaucagacgaauuacuacacaacguaaacguaggcaaaucaacaacuaauauaaugauaacaacaauaauaauaguaauuauaguaauauuauuacuacuaaucgccguagguuuauucuuauacuguaaagcacgaucaacaccaguuacacucucaaaagaucaacuaucaggaauaaacaacauagcauuuuccaauuaaggacuaguggaagcauuuuccuggcugauuaaaagaaauuacucagcuauggucaucuguuccuguuagaaggcuaugcagcauauuauauacuaugcgcauguuaugaaaugcauaauaaaaaauuuuaaaaaaucuaaaagaucuaaaaaaaaaaaaaaaaaaaaaaaaaaaaaaaaaaaaaaaaaaaaaaaaaaaaaaaaaaaaaaaaugcaucccccccccccccccccccccccccccccccaaaggcucuuuucagagccaccagaauu

SEQ ID NO: 11830 - RNA, 2123 nt, Artificial Sequence
  mRNA product Design c-2 comprising derived and/or modified sequence from HRSV(Memphis-37)__AIY60640.1__F0 (opt11)
gggagacuccugucgggcggaaguaggaggaguagaguuuaaaaacaguacucuuuuuccgguucgggacguaguugaagcaacgacaagccggauaaccgcucuugagacaggaagcuuaccauggaacuccccauccucaaaacaaacgccauaaccacuauccucgccgccgucacccucugcuucgccuccucccaaaacaucacagaggaguucuaccaauccacaugcuccgccgucuccaaaggcuaccucagcgcccuacguaccggcugguacaccagcgucaucacaauagaacucuccaacaucaaggaaaacaaaugcaacggcaccgaugccaaaguaaaacucaucaaacaagaacucgauaaauacaaaaacgccgucaccgaacuacaacuccuaaugcaaagcacacccgccgccaacaacagagcacggcgcgaacugccccgcuucaugaacuacacccucaacaacaccaaaaauaacaacgucacccuauccaagaaacgcaaacgccgauuccucgguuuccuacucggcguaggaagcgccauagccucaggcaucgccgucuccaaaguccuccaucuggaaggcgaagucaacaaaaucaaaaacgcacucuuauccaccaacaaagccgucgucucccucucgaacggggucuccguccuuaccuccaaaguccucgaccuuaaaaacuacaucgacaaacaacuacuaccaauagucaauaaacaauccugcuccaucucaaacauagaaaccgucauagaguuccaacagaagaacaaucgccuccucgaaauaacucgcgaguucuccgucaacgcaggcgucacgaccccugucucaacauacaugcuaacuaacucagaacuccuaagccuaaucaacgacaugcccaucacaaacgaccaaaagaaacucaugagcaacaauguccagauagucagacagcaauccuauagcaucaugucuauaauaaaagaagaagugcucgccuacguaguccaacucccucuuuacggcgucauagacacacccugcuggaaacuccacacaucuccucucugcaccaccaacacaaaagaaggcagcaacaucugccugacccgaaccgaccgcggaugguacugcgacaacgcuggcuccgugucuuucuuuccccaagccgaaaccugcaaaguccaguccaaccgcgucuucugcgacacaaugaacucccucacccuacccuccgaaguuaaccucugcaacaucgacaucuucaauccaaaauacgacugcaaaaucaugaccucgaaaacggacguauccuccuccgucauaacaucacuuggagccaucguuagcugcuacggaaaaaccaaauguaccgccuccaacaaaaaccgcggaauaaucaaaacauucuccaacggcugcgacuacguaagcaacaaaggggucgauacugucuccguagguaacacccuauacuacgucaacaaacaagaaggaaaaucacuauacguuaaaggcgaacccauuaucaacuucuacgacccccucguuuucccauccgacgaguucgacgccuccauaagccaaguuaacgaaaagauaaaccaaucgcucgcauucauccgcaaauccgacgaacuccuacacaacgucaacgugggcaaauccacaacaaacaucaugaucaccaccaucauuaucgucauaauagucauccuccuccugcucaucgccgugggacuauuccuauacugcaaagcccgcucgacgcccgucacacuuuccaaagaccaacuaagcggaaucaacaacauagcguucagcaauuaaggacuaguggaagcauuuuccuggcugauuaaaagaaauuacucagcuauggucaucuguuccuguuagaaggcuaugcagcauauuauauacuaugcgcauguuaugaaaugcauaauaaaaaauuuuaaaaaaucuaaaagaucuaaaaaaaaaaaaaaaaaaaaaaaaaaaaaaaaaaaaaaaaaaaaaaaaaaaaaaaaaaaaaaaaugcaucccccccccccccccccccccccccccccccaaaggcucuuuucagagccaccagaauu

SEQ ID NO: 11831 - RNA, 2100 nt, Artificial Sequence
  mRNA product Design c-3 comprising derived and/or modified sequence from HRSV(Memphis-37)__AIY60640.1__F0 (wt)
gggagaguccgcucagccagguugcagaagcggcuuagcguguguccuaaucuucucucugcguguagguaggccugugccgcaaacaagcuuaccauggaguugccaauccucaaaacaaaugcaauuaccacaauccuugcugcagucacacucuguuucgcuuccagucaaaacaucacugaagaauuuuaucaaucaacaugcagugcaguuagcaaaggcuaucuuagugcuuuaagaacugguugguauacuaguguuauaacuauagaauuaaguaauaucaaggaaaauaaguguaauggaacagaugcuaagguaaaauugauaaaacaagaauuagauaaauauaaaaaugcuguaacagaauugcaguugcucaugcaaagcacaccagcagccaacaaucgagccagaagagaacuaccaagguuuaugaauuauacacucaacaauaccaaaaauaacaauguaacauuaagcaagaaaaggaaaagaagauuucuuggcuuuuuguuagguguuggaucugcaaucgccaguggcauugcuguaucuaaaguccugcaccuagaaggggaagugaacaaaaucaaaaaugcucuacuauccacaaacaaggcuguagucagcuuaucaaauggaguuagugucuuaaccagcaaaguguuagaccucaaaaacuauauagauaaacaguuguuacccauugugaacaagcaaagcugcagcauaucaaacauugaaacugugauagaauuccaacaaaagaacaacagacuacuagagauuaccagggaauuuaguguuaaugcagguguaacuacaccuguaagcacuuauauguuaacaaauagugaauuauuaucauuaaucaaugauaugccuauaacaaaugaucagaaaaaguuaauguccaacaauguucaaauaguuagacagcaaaguuacucuaucauguccauaauaaaggaggaagucuuagcauauguaguucaauuaccacuauaugguguaauagauacaccuuguuggaaacuacacacauccccucuaugcacaaccaacacaaaggaaggguccaacaucuguuuaacaagaaccgacagaggaugguacugugacaaugcaggaucagugucuuucuucccacaagcugaaacaugcaaaguucaaucgaaucgaguauuuugugacacaaugaacagucuaacauuaccaagugaaguaaaucucugcaacauugacauauucaacccuaaauaugauugcaaaauuaugacuucaaaaacagaugugagcagcuccguuaucacaucucuaggagccauugugucaugcuauggcaaaacuaaauguacagcauccaauaaaaaucguggaaucauaaagacauuuucuaacgggugugauuauguaucaaauaaggggguggacacuguaucuguagguaauacauuauauuauguaaauaagcaagaaggaaaaagccucuauguaaaaggugaaccaauaauaaauuucuaugacccauuaguguucccuucugaugaauuugaugcaucaauaucucaagucaaugagaagauuaaccagagccuagcauuuauucguaaauccgaugaauuauuacauaauguaaauguugguaaauccaccacaaauaucaugauaacuacuauaauuauagugauuauaguaauauuguuauuauuaauugcaguugggcuguuccuauacugcaaggccagaagcacaccagucacacuaagcaaggaucaacugagugguauaaauaauauugcauuuaguaacugaggacuaguacuggcugcaucucccuuuccucuguccuccauccuucucccaggauggugaagggggaccugguacccagugauccccaccccaggauccuaaaucaugacuuaccugcuaauaaaaacucauuggaaaagugagaagaucuaaaaaaaaaaaaaaaaaaaaaaaaaaaaaaaaaaaaaaaaaaaaaaaaaaaaaaaaaaaaaaaaugcaucccccccccccccccccccccccccccccccaaaggcucuuuucagagccaccagaauu

SEQ ID NO: 11832 - RNA, 2100 nt, Artificial Sequence
  mRNA product Design c-3 comprising derived and/or modified sequence from HRSV(Memphis-37)__AIY60640.1__F0 (opt1)
gggagaguccgcucagccagguugcagaagcggcuuagcguguguccuaaucuucucucugcguguagguaggccugugccgcaaacaagcuuaccauggagcugcccauccucaagaccaacgccaucaccacgauccuggccgcggugacccugugcuucgccagcucccagaacaucaccgaggaguucuaccagagcacgugcuccgccgucagcaagggcuaccucuccgcccugcgcaccgggugguacaccagcgugaucaccaucgagcuguccaacaucaaggagaacaagugcaacggcaccgacgccaaggugaagcucaucaagcaggagcuggacaaguacaagaacgcggucacggagcugcagcuccugaugcagagcaccccggccgccaacaaccgggcccgccgggagcugccccgcuucaugaacuacacccucaacaacaccaagaacaacaacgugacgcuguccaagaagcggaagcgccgguuccugggguuccuccugggcguggggagcgcgaucgccuccggcaucgccgucagcaaggugcugcaccucgagggcgaggugaacaagaucaagaacgcccugcuguccaccaacaaggccgucgugagccucuccaacggggugagcguccugaccuccaaggugcuggaccucaagaacuacaucgacaagcagcugcugcccaucgugaacaagcagagcugcuccaucagcaacaucgagaccgucaucgaguuccagcagaagaacaaccgccuccuggagaucacgcgggaguucagcgugaacgcgggcgugaccacccccgucuccaccuacaugcugacgaacagcgagcuccugucccugaucaacgacaugccgaucaccaacgaccagaagaagcucaugagcaacaacgugcagaucgugcgccagcaguccuacagcaucauguccaucaucaaggaggagguccuggccuacguggugcagcugccccucuacggggucaucgacacccccugcuggaagcugcacaccagcccccugugcacgaccaacaccaaggagggcuccaacaucugccucacccggacggaccgcgggugguacugcgacaacgccggcagcguguccuucuucccgcaggccgagaccugcaagguccagagcaaccggguguucugcgacaccaugaacucccugacccugcccagcgaggugaaccucugcaacaucgacaucuucaaccccaaguacgacugcaagaucaugacguccaagaccgacgucagcuccagcgugaucaccucccugggcgccaucgugagcugcuacgggaagaccaagugcacggcgagcaacaagaaccgcggcaucaucaagaccuucuccaacgggugcgacuacgucagcaacaagggcguggacaccguguccgucggcaacacccuguacuacgugaacaagcaggagggcaagagccucuacgugaagggggagcccaucaucaacuucuacgacccgcuggucuuccccuccgacgaguucgacgccagcaucucccaggugaacgagaagaucaaccagagccuggccuucauccggaaguccgacgagcuccugcacaacgugaacgucggcaagagcaccacgaacaucaugaucaccaccaucaucaucgugaucaucgugauccugcugcuccugaucgccgucgggcuguuccucuacugcaaggcccgcuccacccccgugacgcugagcaaggaccagcuguccgggaucaacaacaucgcguucagcaacugaggacuaguacuggcugcaucucccuuuccucuguccuccauccuucucccaggauggugaagggggaccugguacccagugauccccaccccaggauccuaaaucaugacuuaccugcuaauaaaaacucauuggaaaagugagaagaucuaaaaaaaaaaaaaaaaaaaaaaaaaaaaaaaaaaaaaaaaaaaaaaaaaaaaaaaaaaaaaaaaugcaucccccccccccccccccccccccccccccccaaaggcucuuuucagagccaccagaauu

SEQ ID NO: 11833 - RNA, 2100 nt, Artificial Sequence
  mRNA product Design c-3 comprising derived and/or modified sequence from HRSV(Memphis-37)__AIY60640.1__F0 (opt2)
gggagaguccgcucagccagguugcagaagcggcuuagcguguguccuaaucuucucucugcguguagguaggccugugccgcaaacaagcuuaccauggagcuccccauccucaagaccaacgccaucaccaccauccucgccgccgucacccucugcuucgccuccucccagaacaucaccgaggaguucuaccaguccaccugcuccgccgucuccaagggcuaccucuccgcccuccgcaccggcugguacaccuccgucaucaccaucgagcucuccaacaucaaggagaacaagugcaacggcaccgacgccaaggucaagcucaucaagcaggagcucgacaaguacaagaacgccgucaccgagcuccagcuccucaugcaguccacccccgccgccaacaaccgcgcccgccgcgagcucccccgcuucaugaacuacacccucaacaacaccaagaacaacaacgucacccucuccaagaagcgcaagcgccgcuuccucggcuuccuccucggcgucggcuccgccaucgccuccggcaucgccgucuccaagguccuccaccucgagggcgaggucaacaagaucaagaacgcccuccucuccaccaacaaggccgucgucucccucuccaacggcgucuccguccucaccuccaagguccucgaccucaagaacuacaucgacaagcagcuccuccccaucgucaacaagcaguccugcuccaucuccaacaucgagaccgucaucgaguuccagcagaagaacaaccgccuccucgagaucacccgcgaguucuccgucaacgccggcgucaccacccccgucuccaccuacaugcucaccaacuccgagcuccucucccucaucaacgacaugcccaucaccaacgaccagaagaagcucauguccaacaacguccagaucguccgccagcaguccuacuccaucauguccaucaucaaggaggagguccucgccuacgucguccagcucccccucuacggcgucaucgacacccccugcuggaagcuccacaccuccccccucugcaccaccaacaccaaggagggcuccaacaucugccucacccgcaccgaccgcggcugguacugcgacaacgccggcuccgucuccuucuucccccaggccgagaccugcaagguccaguccaaccgcgucuucugcgacaccaugaacucccucacccuccccuccgaggucaaccucugcaacaucgacaucuucaaccccaaguacgacugcaagaucaugaccuccaagaccgacgucuccuccuccgucaucaccucccucggcgccaucgucuccugcuacggcaagaccaagugcaccgccuccaacaagaaccgcggcaucaucaagaccuucuccaacggcugcgacuacgucuccaacaagggcgucgacaccgucuccgucggcaacacccucuacuacgucaacaagcaggagggcaagucccucuacgucaagggcgagcccaucaucaacuucuacgacccccucgucuuccccuccgacgaguucgacgccuccaucucccaggucaacgagaagaucaaccagucccucgccuucauccgcaaguccgacgagcuccuccacaacgucaacgucggcaaguccaccaccaacaucaugaucaccaccaucaucaucgucaucaucgucauccuccuccuccucaucgccgucggccucuuccucuacugcaaggcccgcuccacccccgucacccucuccaaggaccagcucuccggcaucaacaacaucgccuucuccaacugaggacuaguacuggcugcaucucccuuuccucuguccuccauccuucucccaggauggugaagggggaccugguacccagugauccccaccccaggauccuaaaucaugacuuaccugcuaauaaaaacucauuggaaaagugagaagaucuaaaaaaaaaaaaaaaaaaaaaaaaaaaaaaaaaaaaaaaaaaaaaaaaaaaaaaaaaaaaaaaaugcaucccccccccccccccccccccccccccccccaaaggcucuuuucagagccaccagaauu

SEQ ID NO: 11834 - RNA, 2100 nt, Artificial Sequence
  mRNA product Design c-3 comprising derived and/or modified sequence from HRSV(Memphis-37)__AIY60640.1__F0 (opt3)
gggagaguccgcucagccagguugcagaagcggcuuagcguguguccuaaucuucucucugcguguagguaggccugugccgcaaacaagcuuaccauggagcugcccauccucaagaccaacgccauuacaacuauacuugcugcagugacgcugugcuucgccagcucccagaauaucaccgaagaguuuuaccaaucuacauguucagcggucaguaaaggcuauuugagcgcuuuaagaacugggugguacaccuccguuauuacaaucgaacugucuaacauuaaggagaauaaaugcaacggaaccgacgccaaggugaaacuaaucaagcaggaacucgauaaguauaaaaaugcaguaacugagcugcagcuucugaugcagucgaccccugccgcuaacaauagggcacggcgcgaguugccacgauucaugaacuacacacucaauaacacgaagaauaacaaugugacucugagcaaaaagcguaaaagaagguuucuggguuuccucuuaggcgucgggucagccauagcuaguggaaucgccguguccaagguucugcaccuugaaggcgaggugaacaagauuaaaaaugcguugcugucuaccaacaaggcagucgugagccuauccaacgguguaucaguucucacaaguaaagugcuggaccuuaagaauuauaucgauaaacaacuguugccgauugucaacaagcagagcuguucuaucuccaauauagaaacugugauugaguuucagcagaaaaacaaucggcuccuggagaucacccgcgaguucucagugaacgccggggucacaacccccguuagcacguacauguuaacuaauagugaacugcucucucuuauuaacgacaugccuaucacaaaugaucaaaagaagcugauguccaacaaugugcagaucguaagacagcagagcuauucgauuaugucuauaaucaaagaagagguguuggcuuacgucgugcaacuaccacuguacggaguuauugacacccccugcuggaagcuccauacuuccccucuguguacaaccaacacgaaagaaggcucaaauaucugccuuaccaggacagaucggggcugguauugugacaacgccgggagugugagcuuuuucccacaggcagagacuugcaagguccaguccaaucgcguguuuugugauaccaugaacucucugacauugcccagcgagguaaaccucugcaauauagacauuuucaacccuaaauacgauuguaagaucaugacuucaaagaccgacguuaguuccagcgugaucacaucucugggagcuauugucucaugcuaugguaaaaccaagugcacugccaguaauaaaaaccgaggcaucauuaagacguuuagcaaugggugugauuacguguccaacaaaggagucgacacagugucuguuggcaauaccuuauauuacgugaacaagcaagaagguaagucgcuguauguaaaaggggagccaauaaucaauuucuacgacccgcuagucuuucccagcgaugaguucgacgcguccauuucacaggugaacgaaaagaucaaucagagucucgccuucaucagaaaaucugaugaacugcuucacaacguuaaugugggaaagagcacuaccaacauuaugauaacaaccaucauuaucgucauuaucgugauauugcugcuccugaucgcaguaggccuuuuucuguacugcaaagcuagguccacuccugugacauugucaaaggaccagcucagcggcauuaauaacaucgccuucucuaacugaggacuaguacuggcugcaucucccuuuccucuguccuccauccuucucccaggauggugaagggggaccugguacccagugauccccaccccaggauccuaaaucaugacuuaccugcuaauaaaaacucauuggaaaagugagaagaucuaaaaaaaaaaaaaaaaaaaaaaaaaaaaaaaaaaaaaaaaaaaaaaaaaaaaaaaaaaaaaaaaugcaucccccccccccccccccccccccccccccccaaaggcucuuuucagagccaccagaauu

SEQ ID NO: 11835 - RNA, 2100 nt, Artificial Sequence
  mRNA product Design c-3 comprising derived and/or modified sequence from HRSV(Memphis-37)__AIY60640.1__F0 (opt4)
gggagaguccgcucagccagguugcagaagcggcuuagcguguguccuaaucuucucucugcguguagguaggccugugccgcaaacaagcuuaccauggagcugcccauccugaagaccaacgccaucaccaccauccuggccgccgugacccugugcuucgccagcagccagaacaucaccgaggaguucuaccagagcaccugcagcgccgugagcaagggcuaccugagcgcccugagaaccggcugguacaccagcgugaucaccaucgagcugagcaacaucaaggagaacaagugcaacggcaccgacgccaaggugaagcugaucaagcaggagcuggacaaguacaagaacgccgugaccgagcugcagcugcugaugcagagcacccccgccgccaacaacagagccagaagagagcugcccagauucaugaacuacacccugaacaacaccaagaacaacaacgugacccugagcaagaagagaaagagaagauuccugggcuuccugcugggcgugggcagcgccaucgccagcggcaucgccgugagcaaggugcugcaccuggagggcgaggugaacaagaucaagaacgcccugcugagcaccaacaaggccguggugagccugagcaacggcgugagcgugcugaccagcaaggugcuggaccugaagaacuacaucgacaagcagcugcugcccaucgugaacaagcagagcugcagcaucagcaacaucgagaccgugaucgaguuccagcagaagaacaacagacugcuggagaucaccagagaguucagcgugaacgccggcgugaccacccccgugagcaccuacaugcugaccaacagcgagcugcugagccugaucaacgacaugcccaucaccaacgaccagaagaagcugaugagcaacaacgugcagaucgugagacagcagagcuacagcaucaugagcaucaucaaggaggaggugcuggccuacguggugcagcugccccuguacggcgugaucgacacccccugcuggaagcugcacaccagcccccugugcaccaccaacaccaaggagggcagcaacaucugccugaccagaaccgacagaggcugguacugcgacaacgccggcagcgugagcuucuucccccaggccgagaccugcaaggugcagagcaacagaguguucugcgacaccaugaacagccugacccugcccagcgaggugaaccugugcaacaucgacaucuucaaccccaaguacgacugcaagaucaugaccagcaagaccgacgugagcagcagcgugaucaccagccugggcgccaucgugagcugcuacggcaagaccaagugcaccgccagcaacaagaacagaggcaucaucaagaccuucagcaacggcugcgacuacgugagcaacaagggcguggacaccgugagcgugggcaacacccuguacuacgugaacaagcaggagggcaagagccuguacgugaagggcgagcccaucaucaacuucuacgacccccugguguuccccagcgacgaguucgacgccagcaucagccaggugaacgagaagaucaaccagagccuggccuucaucagaaagagcgacgagcugcugcacaacgugaacgugggcaagagcaccaccaacaucaugaucaccaccaucaucaucgugaucaucgugauccugcugcugcugaucgccgugggccuguuccuguacugcaaggccagaagcacccccgugacccugagcaaggaccagcugagcggcaucaacaacaucgccuucagcaacugaggacuaguacuggcugcaucucccuuuccucuguccuccauccuucucccaggauggugaagggggaccugguacccagugauccccaccccaggauccuaaaucaugacuuaccugcuaauaaaaacucauuggaaaagugagaagaucuaaaaaaaaaaaaaaaaaaaaaaaaaaaaaaaaaaaaaaaaaaaaaaaaaaaaaaaaaaaaaaaaugcaucccccccccccccccccccccccccccccccaaaggcucuuuucagagccaccagaauu

SEQ ID NO: 11836 - RNA, 2100 nt, Artificial Sequence
  mRNA product Design c-3 comprising derived and/or modified sequence from HRSV(Memphis-37)__AIY60640.1__F0 (opt5)
gggagaguccgcucagccagguugcagaagcggcuuagcguguguccuaaucuucucucugcguguagguaggccugugccgcaaacaagcuuaccauggagcugcccauccucaagaccaacgccauuacaacgauccuggcugccgugacccuuugcuucgcgagcucccagaauauuacagaagaguuuuaccaaucuaccuguagcgcugucuccaaaggcuaucugucugcccucagaacagggugguacaccagcguuaucacaauugaacuguccaacaucaaggagaauaaaugcaacggaaccgacgccaaggugaaacuuaucaagcaggaacuggauaaguauaaaaaugcugugacggagcuccagcugcugaugcagucuaccccugccgcuaacaaucgggcccgcagagagcucccgcgguucaugaacuacacacugaauaacaccaagaauaacaaugucacacuuagcaaaaagcgcaaaagacgguuucugggcuuccuccugggggugggauccgcgauugccagcggcaucgcuguuucuaaggugcuucaccuggaaggggaggucaacaagauuaaaaaugcccuccuguccaccaacaaggcugugguuagccugucuaacggaguguccguccucacgagcaaagugcuggaccuuaagaauuauaucgauaaacaacugcuccccauugugaacaagcagucuuguuccaucagcaauauugaaacagucaucgaguuucagcagaaaaacaaucgccugcuugagaucaccagagaauuuuccguuaacgccggcgugacaaccccugugucuaccuacaugcugacaaauagcgagcuccugucccugauuaacgacaugcccaucacgaaugaucaaaagaagcucaugagcaacaauguccagauugugcggcagcagucuuauuccaucaugagcauuaucaaagaagagguucuggcguacgugguccaacuuccucuguacggcgugaucgacacccccugcuggaagcuccauacaucuccucuguguaccacaaacaccaaagaagggagcaauauuugccuuacgcgcacagauagaggaugguauugugacaacgccggcuccguuucuuucuucccgcaggcugagaccugcaaggugcagagcaaucgggucuuuugugauaccaugaacucccugacacuccccagcgaggugaaccugugcaauaucgacauuuucaacccuaaauacgauuguaagaucaugaccucuaagacagacgucuccagcucugugauuacgucccugggggccaucguuagcugcuauggaaaaaccaagugcacagcuuccaauaaaaaccgcggcaucauuaagaccuuuucuaaugggugugauuacgugagcaacaaaggagucgacacaguguccguuggcaauacccucuauuacgugaacaagcaagaaggcaagucucuguaugucaaaggggagcccaucauuaauuucuacgacccucuuguguuucccagcgaugaguucgacgccuccaucagccaggugaacgaaaagauuaaucagucucuggccuucaucagaaaauccgaugaacuccugcacaacguuaaugucggaaagagcacgaccaacauuaugaucacaaccaucauuaucgugauuaucgugauucugcuucuccugaucgcugucggccuguuucucuacugcaaagcgcggucuacaccggugacccuguccaaggaccagcuuagcgggaucaauaacauugccuucucuaacugaggacuaguacuggcugcaucucccuuuccucuguccuccauccuucucccaggauggugaagggggaccugguacccagugauccccaccccaggauccuaaaucaugacuuaccugcuaauaaaaacucauuggaaaagugagaagaucuaaaaaaaaaaaaaaaaaaaaaaaaaaaaaaaaaaaaaaaaaaaaaaaaaaaaaaaaaaaaaaaaugcaucccccccccccccccccccccccccccccccaaaggcucuuuucagagccaccagaauu

SEQ ID NO: 11837 - RNA, 2100 nt, Artificial Sequence
  mRNA product Design c-3 comprising derived and/or modified sequence from HRSV(Memphis-37)__AIY60640.1__F0 (opt6)
gggagaguccgcucagccagguugcagaagcggcuuagcguguguccuaaucuucucucugcguguagguaggccugugccgcaaacaagcuuaccauggaacugccuauucuaaaaacaaaugccauaacaacaauucuugcagcaguaacauuauguuuugcaucaucacaaaacauuacagaagaauuuuaccaauccacuugcucagccguaucaaaaggauaccuaucagccuuaagaacagguugguacaccucaguaauaaccauagaacuaucaaacauaaaagaaaacaaaugcaaugguacugaugcaaaagucaaacuaaucaaacaagaacuggacaaauacaaaaaugcaguaaccgaacuacaacuccuaaugcaauccacaccugcagccaacaacagagcaagacgcgaacuaccaagauuuaugaauuacacauuaaacaacaccaagaacaacaauguaacucucucaaaaaaaagaaaaagacgcuuucuagguuuccuccuaggcgucggaucugcaauagccucaggaauagcaguaucaaaaguucuacaccuagaaggagaaguaaacaaaauuaaaaacgcauuacuaucaaccaacaaagcaguuguaucccuuucaaauggagucucuguacuuacaucaaaaguacucgaccuaaaaaacuauauagacaaacaacuacucccaauagucaauaagcaaucaugcagcauaucaaacauagaaacaguuauagaauuucaacaaaaaaacaacagacuacucgaaauaaccagagaauuuagcgucaacgcaggcguaaccacaccgguauccacauacaugcuuacaaacucagaacuccucucacuaauaaacgacaugccaauaacuaaugaccaaaaaaaacuaaugucaaacaauguccaaauaguccgucaacaaucauacucaauaaugucaauaauaaaagaagaaguauuagcauauguaguccaacuaccauuauacggcguuauagacacaccuuguuggaaacuucacacauccccacucuguacaaccaacacaaaagaagguuccaauauaugccuaacuagaaccgacagaggaugguauugcgacaacgcaggaucuguaucauucuuuccccaagcagaaacauguaaaguacaaaguaaccgcguauucugcgacaccaugaacucauuaacccucccauccgaaguuaauuuaugcaauauagacauauuuaauccuaaauacgacugcaaaauaaugacaucaaaaacagacguuaguuccuccguaaucacaucuuugggcgcaauagucucaugcuauggaaaaacaaaaugcacagccucaaacaaaaauagaggaauaauaaaaacauucagcaacggcugugauuauguauccaacaaaggaguagacacaguauccguaggcaauacccuuuacuacguuaauaaacaagaaggaaaaucauuauacgucaaaggagaaccuaucauaaauuucuacgacccauuaguauucccuucagacgaauuugaugccucaauaucccaagucaaugaaaaaaucaaccaaucacuagccuuuauccgcaaaucagacgaauuacuacacaacguaaacguaggcaaaucaacaacuaauauaaugauaacaacaauaauaauaguaauuauaguaauauuauuacuacuaaucgccguagguuuauucuuauacuguaaagcacgaucaacaccaguuacacucucaaaagaucaacuaucaggaauaaacaacauagcauuuuccaauuaaggacuaguacuggcugcaucucccuuuccucuguccuccauccuucucccaggauggugaagggggaccugguacccagugauccccaccccaggauccuaaaucaugacuuaccugcuaauaaaaacucauuggaaaagugagaagaucuaaaaaaaaaaaaaaaaaaaaaaaaaaaaaaaaaaaaaaaaaaaaaaaaaaaaaaaaaaaaaaaaugcaucccccccccccccccccccccccccccccccaaaggcucuuuucagagccaccagaauu

SEQ ID NO: 11838 - RNA, 2100 nt, Artificial Sequence
  mRNA product Design c-3 comprising derived and/or modified sequence from HRSV(Memphis-37)__AIY60640.1__F0 (opt11)
gggagaguccgcucagccagguugcagaagcggcuuagcguguguccuaaucuucucucugcguguagguaggccugugccgcaaacaagcuuaccauggaacuccccauccucaaaacaaacgccauaaccacuauccucgccgccgucacccucugcuucgccuccucccaaaacaucacagaggaguucuaccaauccacaugcuccgccgucuccaaaggcuaccucagcgcccuacguaccggcugguacaccagcgucaucacaauagaacucuccaacaucaaggaaaacaaaugcaacggcaccgaugccaaaguaaaacucaucaaacaagaacucgauaaauacaaaaacgccgucaccgaacuacaacuccuaaugcaaagcacacccgccgccaacaacagagcacggcgcgaacugccccgcuucaugaacuacacccucaacaacaccaaaaauaacaacgucacccuauccaagaaacgcaaacgccgauuccucgguuuccuacucggcguaggaagcgccauagccucaggcaucgccgucuccaaaguccuccaucuggaaggcgaagucaacaaaaucaaaaacgcacucuuauccaccaacaaagccgucgucucccucucgaacggggucuccguccuuaccuccaaaguccucgaccuuaaaaacuacaucgacaaacaacuacuaccaauagucaauaaacaauccugcuccaucucaaacauagaaaccgucauagaguuccaacagaagaacaaucgccuccucgaaauaacucgcgaguucuccgucaacgcaggcgucacgaccccugucucaacauacaugcuaacuaacucagaacuccuaagccuaaucaacgacaugcccaucacaaacgaccaaaagaaacucaugagcaacaauguccagauagucagacagcaauccuauagcaucaugucuauaauaaaagaagaagugcucgccuacguaguccaacucccucuuuacggcgucauagacacacccugcuggaaacuccacacaucuccucucugcaccaccaacacaaaagaaggcagcaacaucugccugacccgaaccgaccgcggaugguacugcgacaacgcuggcuccgugucuuucuuuccccaagccgaaaccugcaaaguccaguccaaccgcgucuucugcgacacaaugaacucccucacccuacccuccgaaguuaaccucugcaacaucgacaucuucaauccaaaauacgacugcaaaaucaugaccucgaaaacggacguauccuccuccgucauaacaucacuuggagccaucguuagcugcuacggaaaaaccaaauguaccgccuccaacaaaaaccgcggaauaaucaaaacauucuccaacggcugcgacuacguaagcaacaaaggggucgauacugucuccguagguaacacccuauacuacgucaacaaacaagaaggaaaaucacuauacguuaaaggcgaacccauuaucaacuucuacgacccccucguuuucccauccgacgaguucgacgccuccauaagccaaguuaacgaaaagauaaaccaaucgcucgcauucauccgcaaauccgacgaacuccuacacaacgucaacgugggcaaauccacaacaaacaucaugaucaccaccaucauuaucgucauaauagucauccuccuccugcucaucgccgugggacuauuccuauacugcaaagcccgcucgacgcccgucacacuuuccaaagaccaacuaagcggaaucaacaacauagcguucagcaauuaaggacuaguacuggcugcaucucccuuuccucuguccuccauccuucucccaggauggugaagggggaccugguacccagugauccccaccccaggauccuaaaucaugacuuaccugcuaauaaaaacucauuggaaaagugagaagaucuaaaaaaaaaaaaaaaaaaaaaaaaaaaaaaaaaaaaaaaaaaaaaaaaaaaaaaaaaaaaaaaaugcaucccccccccccccccccccccccccccccccaaaggcucuuuucagagccaccagaauu

SEQ ID NO: 11839 - RNA, 2096 nt, Artificial Sequence
  mRNA product Design c-4 comprising derived and/or modified sequence from HRSV(Memphis-37)__AIY60640.1__F0 (wt)
gggagaguccgcucagccagguugcagaagcggcuuagcguguguccuaaucuucucucugcguguagguaggccugugccgcaaacaagcuuaccauggaguugccaauccucaaaacaaaugcaauuaccacaauccuugcugcagucacacucuguuucgcuuccagucaaaacaucacugaagaauuuuaucaaucaacaugcagugcaguuagcaaaggcuaucuuagugcuuuaagaacugguugguauacuaguguuauaacuauagaauuaaguaauaucaaggaaaauaaguguaauggaacagaugcuaagguaaaauugauaaaacaagaauuagauaaauauaaaaaugcuguaacagaauugcaguugcucaugcaaagcacaccagcagccaacaaucgagccagaagagaacuaccaagguuuaugaauuauacacucaacaauaccaaaaauaacaauguaacauuaagcaagaaaaggaaaagaagauuucuuggcuuuuuguuagguguuggaucugcaaucgccaguggcauugcuguaucuaaaguccugcaccuagaaggggaagugaacaaaaucaaaaaugcucuacuauccacaaacaaggcuguagucagcuuaucaaauggaguuagugucuuaaccagcaaaguguuagaccucaaaaacuauauagauaaacaguuguuacccauugugaacaagcaaagcugcagcauaucaaacauugaaacugugauagaauuccaacaaaagaacaacagacuacuagagauuaccagggaauuuaguguuaaugcagguguaacuacaccuguaagcacuuauauguuaacaaauagugaauuauuaucauuaaucaaugauaugccuauaacaaaugaucagaaaaaguuaauguccaacaauguucaaauaguuagacagcaaaguuacucuaucauguccauaauaaaggaggaagucuuagcauauguaguucaauuaccacuauaugguguaauagauacaccuuguuggaaacuacacacauccccucuaugcacaaccaacacaaaggaaggguccaacaucuguuuaacaagaaccgacagaggaugguacugugacaaugcaggaucagugucuuucuucccacaagcugaaacaugcaaaguucaaucgaaucgaguauuuugugacacaaugaacagucuaacauuaccaagugaaguaaaucucugcaacauugacauauucaacccuaaauaugauugcaaaauuaugacuucaaaaacagaugugagcagcuccguuaucacaucucuaggagccauugugucaugcuauggcaaaacuaaauguacagcauccaauaaaaaucguggaaucauaaagacauuuucuaacgggugugauuauguaucaaauaaggggguggacacuguaucuguagguaauacauuauauuauguaaauaagcaagaaggaaaaagccucuauguaaaaggugaaccaauaauaaauuucuaugacccauuaguguucccuucugaugaauuugaugcaucaauaucucaagucaaugagaagauuaaccagagccuagcauuuauucguaaauccgaugaauuauuacauaauguaaauguugguaaauccaccacaaauaucaugauaacuacuauaauuauagugauuauaguaauauuguuauuauuaauugcaguugggcuguuccuauacugcaaggccagaagcacaccagucacacuaagcaaggaucaacugagugguauaaauaauauugcauuuaguaacugaggacuaguggaagcauuuuccuggcugauuaaaagaaauuacucagcuauggucaucuguuccuguuagaaggcuaugcagcauauuauauacuaugcgcauguuaugaaaugcauaauaaaaaauuuuaaaaaaucuaaaagaucuaaaaaaaaaaaaaaaaaaaaaaaaaaaaaaaaaaaaaaaaaaaaaaaaaaaaaaaaaaaaaaaaugcaucccccccccccccccccccccccccccccccaaaggcucuuuucagagccaccagaauu

SEQ ID NO: 11840 - RNA, 2096 nt, Artificial Sequence
  mRNA product Design c-4 comprising derived and/or modified sequence from HRSV(Memphis-37)__AIY60640.1__F0 (opt1)
gggagaguccgcucagccagguugcagaagcggcuuagcguguguccuaaucuucucucugcguguagguaggccugugccgcaaacaagcuuaccauggagcugcccauccucaagaccaacgccaucaccacgauccuggccgcggugacccugugcuucgccagcucccagaacaucaccgaggaguucuaccagagcacgugcuccgccgucagcaagggcuaccucuccgcccugcgcaccgggugguacaccagcgugaucaccaucgagcuguccaacaucaaggagaacaagugcaacggcaccgacgccaaggugaagcucaucaagcaggagcuggacaaguacaagaacgcggucacggagcugcagcuccugaugcagagcaccccggccgccaacaaccgggcccgccgggagcugccccgcuucaugaacuacacccucaacaacaccaagaacaacaacgugacgcuguccaagaagcggaagcgccgguuccugggguuccuccugggcguggggagcgcgaucgccuccggcaucgccgucagcaaggugcugcaccucgagggcgaggugaacaagaucaagaacgcccugcuguccaccaacaaggccgucgugagccucuccaacggggugagcguccugaccuccaaggugcuggaccucaagaacuacaucgacaagcagcugcugcccaucgugaacaagcagagcugcuccaucagcaacaucgagaccgucaucgaguuccagcagaagaacaaccgccuccuggagaucacgcgggaguucagcgugaacgcgggcgugaccacccccgucuccaccuacaugcugacgaacagcgagcuccugucccugaucaacgacaugccgaucaccaacgaccagaagaagcucaugagcaacaacgugcagaucgugcgccagcaguccuacagcaucauguccaucaucaaggaggagguccuggccuacguggugcagcugccccucuacggggucaucgacacccccugcuggaagcugcacaccagcccccugugcacgaccaacaccaaggagggcuccaacaucugccucacccggacggaccgcgggugguacugcgacaacgccggcagcguguccuucuucccgcaggccgagaccugcaagguccagagcaaccggguguucugcgacaccaugaacucccugacccugcccagcgaggugaaccucugcaacaucgacaucuucaaccccaaguacgacugcaagaucaugacguccaagaccgacgucagcuccagcgugaucaccucccugggcgccaucgugagcugcuacgggaagaccaagugcacggcgagcaacaagaaccgcggcaucaucaagaccuucuccaacgggugcgacuacgucagcaacaagggcguggacaccguguccgucggcaacacccuguacuacgugaacaagcaggagggcaagagccucuacgugaagggggagcccaucaucaacuucuacgacccgcuggucuuccccuccgacgaguucgacgccagcaucucccaggugaacgagaagaucaaccagagccuggccuucauccggaaguccgacgagcuccugcacaacgugaacgucggcaagagcaccacgaacaucaugaucaccaccaucaucaucgugaucaucgugauccugcugcuccugaucgccgucgggcuguuccucuacugcaaggcccgcuccacccccgugacgcugagcaaggaccagcuguccgggaucaacaacaucgcguucagcaacugaggacuaguggaagcauuuuccuggcugauuaaaagaaauuacucagcuauggucaucuguuccuguuagaaggcuaugcagcauauuauauacuaugcgcauguuaugaaaugcauaauaaaaaauuuuaaaaaaucuaaaagaucuaaaaaaaaaaaaaaaaaaaaaaaaaaaaaaaaaaaaaaaaaaaaaaaaaaaaaaaaaaaaaaaaugcaucccccccccccccccccccccccccccccccaaaggcucuuuucagagccaccagaauu

SEQ ID NO: 11841 - RNA, 2096 nt, Artificial Sequence
  mRNA product Design c-4 comprising derived and/or modified sequence from HRSV(Memphis-37)__AIY60640.1__F0 (opt2)
gggagaguccgcucagccagguugcagaagcggcuuagcguguguccuaaucuucucucugcguguagguaggccugugccgcaaacaagcuuaccauggagcuccccauccucaagaccaacgccaucaccaccauccucgccgccgucacccucugcuucgccuccucccagaacaucaccgaggaguucuaccaguccaccugcuccgccgucuccaagggcuaccucuccgcccuccgcaccggcugguacaccuccgucaucaccaucgagcucuccaacaucaaggagaacaagugcaacggcaccgacgccaaggucaagcucaucaagcaggagcucgacaaguacaagaacgccgucaccgagcuccagcuccucaugcaguccacccccgccgccaacaaccgcgcccgccgcgagcucccccgcuucaugaacuacacccucaacaacaccaagaacaacaacgucacccucuccaagaagcgcaagcgccgcuuccucggcuuccuccucggcgucggcuccgccaucgccuccggcaucgccgucuccaagguccuccaccucgagggcgaggucaacaagaucaagaacgcccuccucuccaccaacaaggccgucgucucccucuccaacggcgucuccguccucaccuccaagguccucgaccucaagaacuacaucgacaagcagcuccuccccaucgucaacaagcaguccugcuccaucuccaacaucgagaccgucaucgaguuccagcagaagaacaaccgccuccucgagaucacccgcgaguucuccgucaacgccggcgucaccacccccgucuccaccuacaugcucaccaacuccgagcuccucucccucaucaacgacaugcccaucaccaacgaccagaagaagcucauguccaacaacguccagaucguccgccagcaguccuacuccaucauguccaucaucaaggaggagguccucgccuacgucguccagcucccccucuacggcgucaucgacacccccugcuggaagcuccacaccuccccccucugcaccaccaacaccaaggagggcuccaacaucugccucacccgcaccgaccgcggcugguacugcgacaacgccggcuccgucuccuucuucccccaggccgagaccugcaagguccaguccaaccgcgucuucugcgacaccaugaacucccucacccuccccuccgaggucaaccucugcaacaucgacaucuucaaccccaaguacgacugcaagaucaugaccuccaagaccgacgucuccuccuccgucaucaccucccucggcgccaucgucuccugcuacggcaagaccaagugcaccgccuccaacaagaaccgcggcaucaucaagaccuucuccaacggcugcgacuacgucuccaacaagggcgucgacaccgucuccgucggcaacacccucuacuacgucaacaagcaggagggcaagucccucuacgucaagggcgagcccaucaucaacuucuacgacccccucgucuuccccuccgacgaguucgacgccuccaucucccaggucaacgagaagaucaaccagucccucgccuucauccgcaaguccgacgagcuccuccacaacgucaacgucggcaaguccaccaccaacaucaugaucaccaccaucaucaucgucaucaucgucauccuccuccuccucaucgccgucggccucuuccucuacugcaaggcccgcuccacccccgucacccucuccaaggaccagcucuccggcaucaacaacaucgccuucuccaacugaggacuaguggaagcauuuuccuggcugauuaaaagaaauuacucagcuauggucaucuguuccuguuagaaggcuaugcagcauauuauauacuaugcgcauguuaugaaaugcauaauaaaaaauuuuaaaaaaucuaaaagaucuaaaaaaaaaaaaaaaaaaaaaaaaaaaaaaaaaaaaaaaaaaaaaaaaaaaaaaaaaaaaaaaaugcaucccccccccccccccccccccccccccccccaaaggcucuuuucagagccaccagaauu

SEQ ID NO: 11842 - RNA, 2096 nt, Artificial Sequence
  mRNA product Design c-4 comprising derived and/or modified sequence from HRSV(Memphis-37)__AIY60640.1__F0 (opt3)
gggagaguccgcucagccagguugcagaagcggcuuagcguguguccuaaucuucucucugcguguagguaggccugugccgcaaacaagcuuaccauggagcugcccauccucaagaccaacgccauuacaacuauacuugcugcagugacgcugugcuucgccagcucccagaauaucaccgaagaguuuuaccaaucuacauguucagcggucaguaaaggcuauuugagcgcuuuaagaacugggugguacaccuccguuauuacaaucgaacugucuaacauuaaggagaauaaaugcaacggaaccgacgccaaggugaaacuaaucaagcaggaacucgauaaguauaaaaaugcaguaacugagcugcagcuucugaugcagucgaccccugccgcuaacaauagggcacggcgcgaguugccacgauucaugaacuacacacucaauaacacgaagaauaacaaugugacucugagcaaaaagcguaaaagaagguuucuggguuuccucuuaggcgucgggucagccauagcuaguggaaucgccguguccaagguucugcaccuugaaggcgaggugaacaagauuaaaaaugcguugcugucuaccaacaaggcagucgugagccuauccaacgguguaucaguucucacaaguaaagugcuggaccuuaagaauuauaucgauaaacaacuguugccgauugucaacaagcagagcuguucuaucuccaauauagaaacugugauugaguuucagcagaaaaacaaucggcuccuggagaucacccgcgaguucucagugaacgccggggucacaacccccguuagcacguacauguuaacuaauagugaacugcucucucuuauuaacgacaugccuaucacaaaugaucaaaagaagcugauguccaacaaugugcagaucguaagacagcagagcuauucgauuaugucuauaaucaaagaagagguguuggcuuacgucgugcaacuaccacuguacggaguuauugacacccccugcuggaagcuccauacuuccccucuguguacaaccaacacgaaagaaggcucaaauaucugccuuaccaggacagaucggggcugguauugugacaacgccgggagugugagcuuuuucccacaggcagagacuugcaagguccaguccaaucgcguguuuugugauaccaugaacucucugacauugcccagcgagguaaaccucugcaauauagacauuuucaacccuaaauacgauuguaagaucaugacuucaaagaccgacguuaguuccagcgugaucacaucucugggagcuauugucucaugcuaugguaaaaccaagugcacugccaguaauaaaaaccgaggcaucauuaagacguuuagcaaugggugugauuacguguccaacaaaggagucgacacagugucuguuggcaauaccuuauauuacgugaacaagcaagaagguaagucgcuguauguaaaaggggagccaauaaucaauuucuacgacccgcuagucuuucccagcgaugaguucgacgcguccauuucacaggugaacgaaaagaucaaucagagucucgccuucaucagaaaaucugaugaacugcuucacaacguuaaugugggaaagagcacuaccaacauuaugauaacaaccaucauuaucgucauuaucgugauauugcugcuccugaucgcaguaggccuuuuucuguacugcaaagcuagguccacuccugugacauugucaaaggaccagcucagcggcauuaauaacaucgccuucucuaacugaggacuaguggaagcauuuuccuggcugauuaaaagaaauuacucagcuauggucaucuguuccuguuagaaggcuaugcagcauauuauauacuaugcgcauguuaugaaaugcauaauaaaaaauuuuaaaaaaucuaaaagaucuaaaaaaaaaaaaaaaaaaaaaaaaaaaaaaaaaaaaaaaaaaaaaaaaaaaaaaaaaaaaaaaaugcaucccccccccccccccccccccccccccccccaaaggcucuuuucagagccaccagaauu

SEQ ID NO: 11843 - RNA, 2096 nt, Artificial Sequence
  mRNA product Design c-4 comprising derived and/or modified sequence from HRSV(Memphis-37)__AIY60640.1__F0 (opt4)
gggagaguccgcucagccagguugcagaagcggcuuagcguguguccuaaucuucucucugcguguagguaggccugugccgcaaacaagcuuaccauggagcugcccauccugaagaccaacgccaucaccaccauccuggccgccgugacccugugcuucgccagcagccagaacaucaccgaggaguucuaccagagcaccugcagcgccgugagcaagggcuaccugagcgcccugagaaccggcugguacaccagcgugaucaccaucgagcugagcaacaucaaggagaacaagugcaacggcaccgacgccaaggugaagcugaucaagcaggagcuggacaaguacaagaacgccgugaccgagcugcagcugcugaugcagagcacccccgccgccaacaacagagccagaagagagcugcccagauucaugaacuacacccugaacaacaccaagaacaacaacgugacccugagcaagaagagaaagagaagauuccugggcuuccugcugggcgugggcagcgccaucgccagcggcaucgccgugagcaaggugcugcaccuggagggcgaggugaacaagaucaagaacgcccugcugagcaccaacaaggccguggugagccugagcaacggcgugagcgugcugaccagcaaggugcuggaccugaagaacuacaucgacaagcagcugcugcccaucgugaacaagcagagcugcagcaucagcaacaucgagaccgugaucgaguuccagcagaagaacaacagacugcuggagaucaccagagaguucagcgugaacgccggcgugaccacccccgugagcaccuacaugcugaccaacagcgagcugcugagccugaucaacgacaugcccaucaccaacgaccagaagaagcugaugagcaacaacgugcagaucgugagacagcagagcuacagcaucaugagcaucaucaaggaggaggugcuggccuacguggugcagcugccccuguacggcgugaucgacacccccugcuggaagcugcacaccagcccccugugcaccaccaacaccaaggagggcagcaacaucugccugaccagaaccgacagaggcugguacugcgacaacgccggcagcgugagcuucuucccccaggccgagaccugcaaggugcagagcaacagaguguucugcgacaccaugaacagccugacccugcccagcgaggugaaccugugcaacaucgacaucuucaaccccaaguacgacugcaagaucaugaccagcaagaccgacgugagcagcagcgugaucaccagccugggcgccaucgugagcugcuacggcaagaccaagugcaccgccagcaacaagaacagaggcaucaucaagaccuucagcaacggcugcgacuacgugagcaacaagggcguggacaccgugagcgugggcaacacccuguacuacgugaacaagcaggagggcaagagccuguacgugaagggcgagcccaucaucaacuucuacgacccccugguguuccccagcgacgaguucgacgccagcaucagccaggugaacgagaagaucaaccagagccuggccuucaucagaaagagcgacgagcugcugcacaacgugaacgugggcaagagcaccaccaacaucaugaucaccaccaucaucaucgugaucaucgugauccugcugcugcugaucgccgugggccuguuccuguacugcaaggccagaagcacccccgugacccugagcaaggaccagcugagcggcaucaacaacaucgccuucagcaacugaggacuaguggaagcauuuuccuggcugauuaaaagaaauuacucagcuauggucaucuguuccuguuagaaggcuaugcagcauauuauauacuaugcgcauguuaugaaaugcauaauaaaaaauuuuaaaaaaucuaaaagaucuaaaaaaaaaaaaaaaaaaaaaaaaaaaaaaaaaaaaaaaaaaaaaaaaaaaaaaaaaaaaaaaaugcaucccccccccccccccccccccccccccccccaaaggcucuuuucagagccaccagaauu

SEQ ID NO: 11844 - RNA, 2096 nt, Artificial Sequence
  mRNA product Design c-4 comprising derived and/or modified sequence from HRSV(Memphis-37)__AIY60640.1__F0 (opt5)
gggagaguccgcucagccagguugcagaagcggcuuagcguguguccuaaucuucucucugcguguagguaggccugugccgcaaacaagcuuaccauggagcugcccauccucaagaccaacgccauuacaacgauccuggcugccgugacccuuugcuucgcgagcucccagaauauuacagaagaguuuuaccaaucuaccuguagcgcugucuccaaaggcuaucugucugcccucagaacagggugguacaccagcguuaucacaauugaacuguccaacaucaaggagaauaaaugcaacggaaccgacgccaaggugaaacuuaucaagcaggaacuggauaaguauaaaaaugcugugacggagcuccagcugcugaugcagucuaccccugccgcuaacaaucgggcccgcagagagcucccgcgguucaugaacuacacacugaauaacaccaagaauaacaaugucacacuuagcaaaaagcgcaaaagacgguuucugggcuuccuccugggggugggauccgcgauugccagcggcaucgcuguuucuaaggugcuucaccuggaaggggaggucaacaagauuaaaaaugcccuccuguccaccaacaaggcugugguuagccugucuaacggaguguccguccucacgagcaaagugcuggaccuuaagaauuauaucgauaaacaacugcuccccauugugaacaagcagucuuguuccaucagcaauauugaaacagucaucgaguuucagcagaaaaacaaucgccugcuugagaucaccagagaauuuuccguuaacgccggcgugacaaccccugugucuaccuacaugcugacaaauagcgagcuccugucccugauuaacgacaugcccaucacgaaugaucaaaagaagcucaugagcaacaauguccagauugugcggcagcagucuuauuccaucaugagcauuaucaaagaagagguucuggcguacgugguccaacuuccucuguacggcgugaucgacacccccugcuggaagcuccauacaucuccucuguguaccacaaacaccaaagaagggagcaauauuugccuuacgcgcacagauagaggaugguauugugacaacgccggcuccguuucuuucuucccgcaggcugagaccugcaaggugcagagcaaucgggucuuuugugauaccaugaacucccugacacuccccagcgaggugaaccugugcaauaucgacauuuucaacccuaaauacgauuguaagaucaugaccucuaagacagacgucuccagcucugugauuacgucccugggggccaucguuagcugcuauggaaaaaccaagugcacagcuuccaauaaaaaccgcggcaucauuaagaccuuuucuaaugggugugauuacgugagcaacaaaggagucgacacaguguccguuggcaauacccucuauuacgugaacaagcaagaaggcaagucucuguaugucaaaggggagcccaucauuaauuucuacgacccucuuguguuucccagcgaugaguucgacgccuccaucagccaggugaacgaaaagauuaaucagucucuggccuucaucagaaaauccgaugaacuccugcacaacguuaaugucggaaagagcacgaccaacauuaugaucacaaccaucauuaucgugauuaucgugauucugcuucuccugaucgcugucggccuguuucucuacugcaaagcgcggucuacaccggugacccuguccaaggaccagcuuagcgggaucaauaacauugccuucucuaacugaggacuaguggaagcauuuuccuggcugauuaaaagaaauuacucagcuauggucaucuguuccuguuagaaggcuaugcagcauauuauauacuaugcgcauguuaugaaaugcauaauaaaaaauuuuaaaaaaucuaaaagaucuaaaaaaaaaaaaaaaaaaaaaaaaaaaaaaaaaaaaaaaaaaaaaaaaaaaaaaaaaaaaaaaaugcaucccccccccccccccccccccccccccccccaaaggcucuuuucagagccaccagaauu

SEQ ID NO: 11845 - RNA, 2096 nt, Artificial Sequence
  mRNA product Design c-4 comprising derived and/or modified sequence from HRSV(Memphis-37)__AIY60640.1__F0 (opt6)
gggagaguccgcucagccagguugcagaagcggcuuagcguguguccuaaucuucucucugcguguagguaggccugugccgcaaacaagcuuaccauggaacugccuauucuaaaaacaaaugccauaacaacaauucuugcagcaguaacauuauguuuugcaucaucacaaaacauuacagaagaauuuuaccaauccacuugcucagccguaucaaaaggauaccuaucagccuuaagaacagguugguacaccucaguaauaaccauagaacuaucaaacauaaaagaaaacaaaugcaaugguacugaugcaaaagucaaacuaaucaaacaagaacuggacaaauacaaaaaugcaguaaccgaacuacaacuccuaaugcaauccacaccugcagccaacaacagagcaagacgcgaacuaccaagauuuaugaauuacacauuaaacaacaccaagaacaacaauguaacucucucaaaaaaaagaaaaagacgcuuucuagguuuccuccuaggcgucggaucugcaauagccucaggaauagcaguaucaaaaguucuacaccuagaaggagaaguaaacaaaauuaaaaacgcauuacuaucaaccaacaaagcaguuguaucccuuucaaauggagucucuguacuuacaucaaaaguacucgaccuaaaaaacuauauagacaaacaacuacucccaauagucaauaagcaaucaugcagcauaucaaacauagaaacaguuauagaauuucaacaaaaaaacaacagacuacucgaaauaaccagagaauuuagcgucaacgcaggcguaaccacaccgguauccacauacaugcuuacaaacucagaacuccucucacuaauaaacgacaugccaauaacuaaugaccaaaaaaaacuaaugucaaacaauguccaaauaguccgucaacaaucauacucaauaaugucaauaauaaaagaagaaguauuagcauauguaguccaacuaccauuauacggcguuauagacacaccuuguuggaaacuucacacauccccacucuguacaaccaacacaaaagaagguuccaauauaugccuaacuagaaccgacagaggaugguauugcgacaacgcaggaucuguaucauucuuuccccaagcagaaacauguaaaguacaaaguaaccgcguauucugcgacaccaugaacucauuaacccucccauccgaaguuaauuuaugcaauauagacauauuuaauccuaaauacgacugcaaaauaaugacaucaaaaacagacguuaguuccuccguaaucacaucuuugggcgcaauagucucaugcuauggaaaaacaaaaugcacagccucaaacaaaaauagaggaauaauaaaaacauucagcaacggcugugauuauguauccaacaaaggaguagacacaguauccguaggcaauacccuuuacuacguuaauaaacaagaaggaaaaucauuauacgucaaaggagaaccuaucauaaauuucuacgacccauuaguauucccuucagacgaauuugaugccucaauaucccaagucaaugaaaaaaucaaccaaucacuagccuuuauccgcaaaucagacgaauuacuacacaacguaaacguaggcaaaucaacaacuaauauaaugauaacaacaauaauaauaguaauuauaguaauauuauuacuacuaaucgccguagguuuauucuuauacuguaaagcacgaucaacaccaguuacacucucaaaagaucaacuaucaggaauaaacaacauagcauuuuccaauuaaggacuaguggaagcauuuuccuggcugauuaaaagaaauuacucagcuauggucaucuguuccuguuagaaggcuaugcagcauauuauauacuaugcgcauguuaugaaaugcauaauaaaaaauuuuaaaaaaucuaaaagaucuaaaaaaaaaaaaaaaaaaaaaaaaaaaaaaaaaaaaaaaaaaaaaaaaaaaaaaaaaaaaaaaaugcaucccccccccccccccccccccccccccccccaaaggcucuuuucagagccaccagaauu

SEQ ID NO: 11846 - RNA, 2096 nt, Artificial Sequence
  mRNA product Design c-4 comprising derived and/or modified sequence from HRSV(Memphis-37)__AIY60640.1__F0 (opt11)
gggagaguccgcucagccagguugcagaagcggcuuagcguguguccuaaucuucucucugcguguagguaggccugugccgcaaacaagcuuaccauggaacuccccauccucaaaacaaacgccauaaccacuauccucgccgccgucacccucugcuucgccuccucccaaaacaucacagaggaguucuaccaauccacaugcuccgccgucuccaaaggcuaccucagcgcccuacguaccggcugguacaccagcgucaucacaauagaacucuccaacaucaaggaaaacaaaugcaacggcaccgaugccaaaguaaaacucaucaaacaagaacucgauaaauacaaaaacgccgucaccgaacuacaacuccuaaugcaaagcacacccgccgccaacaacagagcacggcgcgaacugccccgcuucaugaacuacacccucaacaacaccaaaaauaacaacgucacccuauccaagaaacgcaaacgccgauuccucgguuuccuacucggcguaggaagcgccauagccucaggcaucgccgucuccaaaguccuccaucuggaaggcgaagucaacaaaaucaaaaacgcacucuuauccaccaacaaagccgucgucucccucucgaacggggucuccguccuuaccuccaaaguccucgaccuuaaaaacuacaucgacaaacaacuacuaccaauagucaauaaacaauccugcuccaucucaaacauagaaaccgucauagaguuccaacagaagaacaaucgccuccucgaaauaacucgcgaguucuccgucaacgcaggcgucacgaccccugucucaacauacaugcuaacuaacucagaacuccuaagccuaaucaacgacaugcccaucacaaacgaccaaaagaaacucaugagcaacaauguccagauagucagacagcaauccuauagcaucaugucuauaauaaaagaagaagugcucgccuacguaguccaacucccucuuuacggcgucauagacacacccugcuggaaacuccacacaucuccucucugcaccaccaacacaaaagaaggcagcaacaucugccugacccgaaccgaccgcggaugguacugcgacaacgcuggcuccgugucuuucuuuccccaagccgaaaccugcaaaguccaguccaaccgcgucuucugcgacacaaugaacucccucacccuacccuccgaaguuaaccucugcaacaucgacaucuucaauccaaaauacgacugcaaaaucaugaccucgaaaacggacguauccuccuccgucauaacaucacuuggagccaucguuagcugcuacggaaaaaccaaauguaccgccuccaacaaaaaccgcggaauaaucaaaacauucuccaacggcugcgacuacguaagcaacaaaggggucgauacugucuccguagguaacacccuauacuacgucaacaaacaagaaggaaaaucacuauacguuaaaggcgaacccauuaucaacuucuacgacccccucguuuucccauccgacgaguucgacgccuccauaagccaaguuaacgaaaagauaaaccaaucgcucgcauucauccgcaaauccgacgaacuccuacacaacgucaacgugggcaaauccacaacaaacaucaugaucaccaccaucauuaucgucauaauagucauccuccuccugcucaucgccgugggacuauuccuauacugcaaagcccgcucgacgcccgucacacuuuccaaagaccaacuaagcggaaucaacaacauagcguucagcaauuaaggacuaguggaagcauuuuccuggcugauuaaaagaaauuacucagcuauggucaucuguuccuguuagaaggcuaugcagcauauuauauacuaugcgcauguuaugaaaugcauaauaaaaaauuuuaaaaaaucuaaaagaucuaaaaaaaaaaaaaaaaaaaaaaaaaaaaaaaaaaaaaaaaaaaaaaaaaaaaaaaaaaaaaaaaugcaucccccccccccccccccccccccccccccccaaaggcucuuuucagagccaccagaauu

SEQ ID NO: 11847 - RNA, 2014 nt, Artificial Sequence
  mRNA product Design c-5 comprising derived and/or modified sequence from HRSV(Memphis-37)__AIY60640.1__F0 (wt)
gggagagcggcucggccauuuugucccagucaguccggaggcugcggcugcagaaguaccgccugcggaguaacugcaaagaagcuuaccauggaguugccaauccucaaaacaaaugcaauuaccacaauccuugcugcagucacacucuguuucgcuuccagucaaaacaucacugaagaauuuuaucaaucaacaugcagugcaguuagcaaaggcuaucuuagugcuuuaagaacugguugguauacuaguguuauaacuauagaauuaaguaauaucaaggaaaauaaguguaauggaacagaugcuaagguaaaauugauaaaacaagaauuagauaaauauaaaaaugcuguaacagaauugcaguugcucaugcaaagcacaccagcagccaacaaucgagccagaagagaacuaccaagguuuaugaauuauacacucaacaauaccaaaaauaacaauguaacauuaagcaagaaaaggaaaagaagauuucuuggcuuuuuguuagguguuggaucugcaaucgccaguggcauugcuguaucuaaaguccugcaccuagaaggggaagugaacaaaaucaaaaaugcucuacuauccacaaacaaggcuguagucagcuuaucaaauggaguuagugucuuaaccagcaaaguguuagaccucaaaaacuauauagauaaacaguuguuacccauugugaacaagcaaagcugcagcauaucaaacauugaaacugugauagaauuccaacaaaagaacaacagacuacuagagauuaccagggaauuuaguguuaaugcagguguaacuacaccuguaagcacuuauauguuaacaaauagugaauuauuaucauuaaucaaugauaugccuauaacaaaugaucagaaaaaguuaauguccaacaauguucaaauaguuagacagcaaaguuacucuaucauguccauaauaaaggaggaagucuuagcauauguaguucaauuaccacuauaugguguaauagauacaccuuguuggaaacuacacacauccccucuaugcacaaccaacacaaaggaaggguccaacaucuguuuaacaagaaccgacagaggaugguacugugacaaugcaggaucagugucuuucuucccacaagcugaaacaugcaaaguucaaucgaaucgaguauuuugugacacaaugaacagucuaacauuaccaagugaaguaaaucucugcaacauugacauauucaacccuaaauaugauugcaaaauuaugacuucaaaaacagaugugagcagcuccguuaucacaucucuaggagccauugugucaugcuauggcaaaacuaaauguacagcauccaauaaaaaucguggaaucauaaagacauuuucuaacgggugugauuauguaucaaauaaggggguggacacuguaucuguagguaauacauuauauuauguaaauaagcaagaaggaaaaagccucuauguaaaaggugaaccaauaauaaauuucuaugacccauuaguguucccuucugaugaauuugaugcaucaauaucucaagucaaugagaagauuaaccagagccuagcauuuauucguaaauccgaugaauuauuacauaauguaaauguugguaaauccaccacaaauaucaugauaacuacuauaauuauagugauuauaguaauauuguuauuauuaauugcaguugggcuguuccuauacugcaaggccagaagcacaccagucacacuaagcaaggaucaacugagugguauaaauaauauugcauuuaguaacugaggacuagucccuguucccagagcccacuuuuuuuucuuuuuuugaaauaaaauagccugucuuucagaucuaaaaaaaaaaaaaaaaaaaaaaaaaaaaaaaaaaaaaaaaaaaaaaaaaaaaaaaaaaaaaaaaugcaucccccccccccccccccccccccccccccccaaaggcucuuuucagagccaccagaauu

SEQ ID NO: 11848 - RNA, 2014 nt, Artificial Sequence
  mRNA product Design c-5 comprising derived and/or modified sequence from HRSV(Memphis-37)__AIY60640.1__F0 (opt1)
gggagagcggcucggccauuuugucccagucaguccggaggcugcggcugcagaaguaccgccugcggaguaacugcaaagaagcuuaccauggagcugcccauccucaagaccaacgccaucaccacgauccuggccgcggugacccugugcuucgccagcucccagaacaucaccgaggaguucuaccagagcacgugcuccgccgucagcaagggcuaccucuccgcccugcgcaccgggugguacaccagcgugaucaccaucgagcuguccaacaucaaggagaacaagugcaacggcaccgacgccaaggugaagcucaucaagcaggagcuggacaaguacaagaacgcggucacggagcugcagcuccugaugcagagcaccccggccgccaacaaccgggcccgccgggagcugccccgcuucaugaacuacacccucaacaacaccaagaacaacaacgugacgcuguccaagaagcggaagcgccgguuccugggguuccuccugggcguggggagcgcgaucgccuccggcaucgccgucagcaaggugcugcaccucgagggcgaggugaacaagaucaagaacgcccugcuguccaccaacaaggccgucgugagccucuccaacggggugagcguccugaccuccaaggugcuggaccucaagaacuacaucgacaagcagcugcugcccaucgugaacaagcagagcugcuccaucagcaacaucgagaccgucaucgaguuccagcagaagaacaaccgccuccuggagaucacgcgggaguucagcgugaacgcgggcgugaccacccccgucuccaccuacaugcugacgaacagcgagcuccugucccugaucaacgacaugccgaucaccaacgaccagaagaagcucaugagcaacaacgugcagaucgugcgccagcaguccuacagcaucauguccaucaucaaggaggagguccuggccuacguggugcagcugccccucuacggggucaucgacacccccugcuggaagcugcacaccagcccccugugcacgaccaacaccaaggagggcuccaacaucugccucacccggacggaccgcgggugguacugcgacaacgccggcagcguguccuucuucccgcaggccgagaccugcaagguccagagcaaccggguguucugcgacaccaugaacucccugacccugcccagcgaggugaaccucugcaacaucgacaucuucaaccccaaguacgacugcaagaucaugacguccaagaccgacgucagcuccagcgugaucaccucccugggcgccaucgugagcugcuacgggaagaccaagugcacggcgagcaacaagaaccgcggcaucaucaagaccuucuccaacgggugcgacuacgucagcaacaagggcguggacaccguguccgucggcaacacccuguacuacgugaacaagcaggagggcaagagccucuacgugaagggggagcccaucaucaacuucuacgacccgcuggucuuccccuccgacgaguucgacgccagcaucucccaggugaacgagaagaucaaccagagccuggccuucauccggaaguccgacgagcuccugcacaacgugaacgucggcaagagcaccacgaacaucaugaucaccaccaucaucaucgugaucaucgugauccugcugcuccugaucgccgucgggcuguuccucuacugcaaggcccgcuccacccccgugacgcugagcaaggaccagcuguccgggaucaacaacaucgcguucagcaacugaggacuagucccuguucccagagcccacuuuuuuuucuuuuuuugaaauaaaauagccugucuuucagaucuaaaaaaaaaaaaaaaaaaaaaaaaaaaaaaaaaaaaaaaaaaaaaaaaaaaaaaaaaaaaaaaaugcaucccccccccccccccccccccccccccccccaaaggcucuuuucagagccaccagaauu

SEQ ID NO: 11849 - RNA, 2014 nt, Artificial Sequence
  mRNA product Design c-5 comprising derived and/or modified sequence from HRSV(Memphis-37)__AIY60640.1__F0 (opt2)
gggagagcggcucggccauuuugucccagucaguccggaggcugcggcugcagaaguaccgccugcggaguaacugcaaagaagcuuaccauggagcuccccauccucaagaccaacgccaucaccaccauccucgccgccgucacccucugcuucgccuccucccagaacaucaccgaggaguucuaccaguccaccugcuccgccgucuccaagggcuaccucuccgcccuccgcaccggcugguacaccuccgucaucaccaucgagcucuccaacaucaaggagaacaagugcaacggcaccgacgccaaggucaagcucaucaagcaggagcucgacaaguacaagaacgccgucaccgagcuccagcuccucaugcaguccacccccgccgccaacaaccgcgcccgccgcgagcucccccgcuucaugaacuacacccucaacaacaccaagaacaacaacgucacccucuccaagaagcgcaagcgccgcuuccucggcuuccuccucggcgucggcuccgccaucgccuccggcaucgccgucuccaagguccuccaccucgagggcgaggucaacaagaucaagaacgcccuccucuccaccaacaaggccgucgucucccucuccaacggcgucuccguccucaccuccaagguccucgaccucaagaacuacaucgacaagcagcuccuccccaucgucaacaagcaguccugcuccaucuccaacaucgagaccgucaucgaguuccagcagaagaacaaccgccuccucgagaucacccgcgaguucuccgucaacgccggcgucaccacccccgucuccaccuacaugcucaccaacuccgagcuccucucccucaucaacgacaugcccaucaccaacgaccagaagaagcucauguccaacaacguccagaucguccgccagcaguccuacuccaucauguccaucaucaaggaggagguccucgccuacgucguccagcucccccucuacggcgucaucgacacccccugcuggaagcuccacaccuccccccucugcaccaccaacaccaaggagggcuccaacaucugccucacccgcaccgaccgcggcugguacugcgacaacgccggcuccgucuccuucuucccccaggccgagaccugcaagguccaguccaaccgcgucuucugcgacaccaugaacucccucacccuccccuccgaggucaaccucugcaacaucgacaucuucaaccccaaguacgacugcaagaucaugaccuccaagaccgacgucuccuccuccgucaucaccucccucggcgccaucgucuccugcuacggcaagaccaagugcaccgccuccaacaagaaccgcggcaucaucaagaccuucuccaacggcugcgacuacgucuccaacaagggcgucgacaccgucuccgucggcaacacccucuacuacgucaacaagcaggagggcaagucccucuacgucaagggcgagcccaucaucaacuucuacgacccccucgucuuccccuccgacgaguucgacgccuccaucucccaggucaacgagaagaucaaccagucccucgccuucauccgcaaguccgacgagcuccuccacaacgucaacgucggcaaguccaccaccaacaucaugaucaccaccaucaucaucgucaucaucgucauccuccuccuccucaucgccgucggccucuuccucuacugcaaggcccgcuccacccccgucacccucuccaaggaccagcucuccggcaucaacaacaucgccuucuccaacugaggacuagucccuguucccagagcccacuuuuuuuucuuuuuuugaaauaaaauagccugucuuucagaucuaaaaaaaaaaaaaaaaaaaaaaaaaaaaaaaaaaaaaaaaaaaaaaaaaaaaaaaaaaaaaaaaugcaucccccccccccccccccccccccccccccccaaaggcucuuuucagagccaccagaauu

SEQ ID NO: 11850 - RNA, 2014 nt, Artificial Sequence
  mRNA product Design c-5 comprising derived and/or modified sequence from HRSV(Memphis-37)__AIY60640.1__F0 (opt3)
gggagagcggcucggccauuuugucccagucaguccggaggcugcggcugcagaaguaccgccugcggaguaacugcaaagaagcuuaccauggagcugcccauccucaagaccaacgccauuacaacuauacuugcugcagugacgcugugcuucgccagcucccagaauaucaccgaagaguuuuaccaaucuacauguucagcggucaguaaaggcuauuugagcgcuuuaagaacugggugguacaccuccguuauuacaaucgaacugucuaacauuaaggagaauaaaugcaacggaaccgacgccaaggugaaacuaaucaagcaggaacucgauaaguauaaaaaugcaguaacugagcugcagcuucugaugcagucgaccccugccgcuaacaauagggcacggcgcgaguugccacgauucaugaacuacacacucaauaacacgaagaauaacaaugugacucugagcaaaaagcguaaaagaagguuucuggguuuccucuuaggcgucgggucagccauagcuaguggaaucgccguguccaagguucugcaccuugaaggcgaggugaacaagauuaaaaaugcguugcugucuaccaacaaggcagucgugagccuauccaacgguguaucaguucucacaaguaaagugcuggaccuuaagaauuauaucgauaaacaacuguugccgauugucaacaagcagagcuguucuaucuccaauauagaaacugugauugaguuucagcagaaaaacaaucggcuccuggagaucacccgcgaguucucagugaacgccggggucacaacccccguuagcacguacauguuaacuaauagugaacugcucucucuuauuaacgacaugccuaucacaaaugaucaaaagaagcugauguccaacaaugugcagaucguaagacagcagagcuauucgauuaugucuauaaucaaagaagagguguuggcuuacgucgugcaacuaccacuguacggaguuauugacacccccugcuggaagcuccauacuuccccucuguguacaaccaacacgaaagaaggcucaaauaucugccuuaccaggacagaucggggcugguauugugacaacgccgggagugugagcuuuuucccacaggcagagacuugcaagguccaguccaaucgcguguuuugugauaccaugaacucucugacauugcccagcgagguaaaccucugcaauauagacauuuucaacccuaaauacgauuguaagaucaugacuucaaagaccgacguuaguuccagcgugaucacaucucugggagcuauugucucaugcuaugguaaaaccaagugcacugccaguaauaaaaaccgaggcaucauuaagacguuuagcaaugggugugauuacguguccaacaaaggagucgacacagugucuguuggcaauaccuuauauuacgugaacaagcaagaagguaagucgcuguauguaaaaggggagccaauaaucaauuucuacgacccgcuagucuuucccagcgaugaguucgacgcguccauuucacaggugaacgaaaagaucaaucagagucucgccuucaucagaaaaucugaugaacugcuucacaacguuaaugugggaaagagcacuaccaacauuaugauaacaaccaucauuaucgucauuaucgugauauugcugcuccugaucgcaguaggccuuuuucuguacugcaaagcuagguccacuccugugacauugucaaaggaccagcucagcggcauuaauaacaucgccuucucuaacugaggacuagucccuguucccagagcccacuuuuuuuucuuuuuuugaaauaaaauagccugucuuucagaucuaaaaaaaaaaaaaaaaaaaaaaaaaaaaaaaaaaaaaaaaaaaaaaaaaaaaaaaaaaaaaaaaugcaucccccccccccccccccccccccccccccccaaaggcucuuuucagagccaccagaauu

SEQ ID NO: 11851 - RNA, 2014 nt, Artificial Sequence
  mRNA product Design c-5 comprising derived and/or modified sequence from HRSV(Memphis-37)__AIY60640.1__F0 (opt4)
gggagagcggcucggccauuuugucccagucaguccggaggcugcggcugcagaaguaccgccugcggaguaacugcaaagaagcuuaccauggagcugcccauccugaagaccaacgccaucaccaccauccuggccgccgugacccugugcuucgccagcagccagaacaucaccgaggaguucuaccagagcaccugcagcgccgugagcaagggcuaccugagcgcccugagaaccggcugguacaccagcgugaucaccaucgagcugagcaacaucaaggagaacaagugcaacggcaccgacgccaaggugaagcugaucaagcaggagcuggacaaguacaagaacgccgugaccgagcugcagcugcugaugcagagcacccccgccgccaacaacagagccagaagagagcugcccagauucaugaacuacacccugaacaacaccaagaacaacaacgugacccugagcaagaagagaaagagaagauuccugggcuuccugcugggcgugggcagcgccaucgccagcggcaucgccgugagcaaggugcugcaccuggagggcgaggugaacaagaucaagaacgcccugcugagcaccaacaaggccguggugagccugagcaacggcgugagcgugcugaccagcaaggugcuggaccugaagaacuacaucgacaagcagcugcugcccaucgugaacaagcagagcugcagcaucagcaacaucgagaccgugaucgaguuccagcagaagaacaacagacugcuggagaucaccagagaguucagcgugaacgccggcgugaccacccccgugagcaccuacaugcugaccaacagcgagcugcugagccugaucaacgacaugcccaucaccaacgaccagaagaagcugaugagcaacaacgugcagaucgugagacagcagagcuacagcaucaugagcaucaucaaggaggaggugcuggccuacguggugcagcugccccuguacggcgugaucgacacccccugcuggaagcugcacaccagcccccugugcaccaccaacaccaaggagggcagcaacaucugccugaccagaaccgacagaggcugguacugcgacaacgccggcagcgugagcuucuucccccaggccgagaccugcaaggugcagagcaacagaguguucugcgacaccaugaacagccugacccugcccagcgaggugaaccugugcaacaucgacaucuucaaccccaaguacgacugcaagaucaugaccagcaagaccgacgugagcagcagcgugaucaccagccugggcgccaucgugagcugcuacggcaagaccaagugcaccgccagcaacaagaacagaggcaucaucaagaccuucagcaacggcugcgacuacgugagcaacaagggcguggacaccgugagcgugggcaacacccuguacuacgugaacaagcaggagggcaagagccuguacgugaagggcgagcccaucaucaacuucuacgacccccugguguuccccagcgacgaguucgacgccagcaucagccaggugaacgagaagaucaaccagagccuggccuucaucagaaagagcgacgagcugcugcacaacgugaacgugggcaagagcaccaccaacaucaugaucaccaccaucaucaucgugaucaucgugauccugcugcugcugaucgccgugggccuguuccuguacugcaaggccagaagcacccccgugacccugagcaaggaccagcugagcggcaucaacaacaucgccuucagcaacugaggacuagucccuguucccagagcccacuuuuuuuucuuuuuuugaaauaaaauagccugucuuucagaucuaaaaaaaaaaaaaaaaaaaaaaaaaaaaaaaaaaaaaaaaaaaaaaaaaaaaaaaaaaaaaaaaugcaucccccccccccccccccccccccccccccccaaaggcucuuuucagagccaccagaauu

SEQ ID NO: 11852 - RNA, 2014 nt, Artificial Sequence
  mRNA product Design c-5 comprising derived and/or modified sequence from HRSV(Memphis-37)__AIY60640.1__F0 (opt5)
gggagagcggcucggccauuuugucccagucaguccggaggcugcggcugcagaaguaccgccugcggaguaacugcaaagaagcuuaccauggagcugcccauccucaagaccaacgccauuacaacgauccuggcugccgugacccuuugcuucgcgagcucccagaauauuacagaagaguuuuaccaaucuaccuguagcgcugucuccaaaggcuaucugucugcccucagaacagggugguacaccagcguuaucacaauugaacuguccaacaucaaggagaauaaaugcaacggaaccgacgccaaggugaaacuuaucaagcaggaacuggauaaguauaaaaaugcugugacggagcuccagcugcugaugcagucuaccccugccgcuaacaaucgggcccgcagagagcucccgcgguucaugaacuacacacugaauaacaccaagaauaacaaugucacacuuagcaaaaagcgcaaaagacgguuucugggcuuccuccugggggugggauccgcgauugccagcggcaucgcuguuucuaaggugcuucaccuggaaggggaggucaacaagauuaaaaaugcccuccuguccaccaacaaggcugugguuagccugucuaacggaguguccguccucacgagcaaagugcuggaccuuaagaauuauaucgauaaacaacugcuccccauugugaacaagcagucuuguuccaucagcaauauugaaacagucaucgaguuucagcagaaaaacaaucgccugcuugagaucaccagagaauuuuccguuaacgccggcgugacaaccccugugucuaccuacaugcugacaaauagcgagcuccugucccugauuaacgacaugcccaucacgaaugaucaaaagaagcucaugagcaacaauguccagauugugcggcagcagucuuauuccaucaugagcauuaucaaagaagagguucuggcguacgugguccaacuuccucuguacggcgugaucgacacccccugcuggaagcuccauacaucuccucuguguaccacaaacaccaaagaagggagcaauauuugccuuacgcgcacagauagaggaugguauugugacaacgccggcuccguuucuuucuucccgcaggcugagaccugcaaggugcagagcaaucgggucuuuugugauaccaugaacucccugacacuccccagcgaggugaaccugugcaauaucgacauuuucaacccuaaauacgauuguaagaucaugaccucuaagacagacgucuccagcucugugauuacgucccugggggccaucguuagcugcuauggaaaaaccaagugcacagcuuccaauaaaaaccgcggcaucauuaagaccuuuucuaaugggugugauuacgugagcaacaaaggagucgacacaguguccguuggcaauacccucuauuacgugaacaagcaagaaggcaagucucuguaugucaaaggggagcccaucauuaauuucuacgacccucuuguguuucccagcgaugaguucgacgccuccaucagccaggugaacgaaaagauuaaucagucucuggccuucaucagaaaauccgaugaacuccugcacaacguuaaugucggaaagagcacgaccaacauuaugaucacaaccaucauuaucgugauuaucgugauucugcuucuccugaucgcugucggccuguuucucuacugcaaagcgcggucuacaccggugacccuguccaaggaccagcuuagcgggaucaauaacauugccuucucuaacugaggacuagucccuguucccagagcccacuuuuuuuucuuuuuuugaaauaaaauagccugucuuucagaucuaaaaaaaaaaaaaaaaaaaaaaaaaaaaaaaaaaaaaaaaaaaaaaaaaaaaaaaaaaaaaaaaugcaucccccccccccccccccccccccccccccccaaaggcucuuuucagagccaccagaauu

SEQ ID NO: 11853 - RNA, 2014 nt, Artificial Sequence
  mRNA product Design c-5 comprising derived and/or modified sequence from HRSV(Memphis-37)__AIY60640.1__F0 (opt6)
gggagagcggcucggccauuuugucccagucaguccggaggcugcggcugcagaaguaccgccugcggaguaacugcaaagaagcuuaccauggaacugccuauucuaaaaacaaaugccauaacaacaauucuugcagcaguaacauuauguuuugcaucaucacaaaacauuacagaagaauuuuaccaauccacuugcucagccguaucaaaaggauaccuaucagccuuaagaacagguugguacaccucaguaauaaccauagaacuaucaaacauaaaagaaaacaaaugcaaugguacugaugcaaaagucaaacuaaucaaacaagaacuggacaaauacaaaaaugcaguaaccgaacuacaacuccuaaugcaauccacaccugcagccaacaacagagcaagacgcgaacuaccaagauuuaugaauuacacauuaaacaacaccaagaacaacaauguaacucucucaaaaaaaagaaaaagacgcuuucuagguuuccuccuaggcgucggaucugcaauagccucaggaauagcaguaucaaaaguucuacaccuagaaggagaaguaaacaaaauuaaaaacgcauuacuaucaaccaacaaagcaguuguaucccuuucaaauggagucucuguacuuacaucaaaaguacucgaccuaaaaaacuauauagacaaacaacuacucccaauagucaauaagcaaucaugcagcauaucaaacauagaaacaguuauagaauuucaacaaaaaaacaacagacuacucgaaauaaccagagaauuuagcgucaacgcaggcguaaccacaccgguauccacauacaugcuuacaaacucagaacuccucucacuaauaaacgacaugccaauaacuaaugaccaaaaaaaacuaaugucaaacaauguccaaauaguccgucaacaaucauacucaauaaugucaauaauaaaagaagaaguauuagcauauguaguccaacuaccauuauacggcguuauagacacaccuuguuggaaacuucacacauccccacucuguacaaccaacacaaaagaagguuccaauauaugccuaacuagaaccgacagaggaugguauugcgacaacgcaggaucuguaucauucuuuccccaagcagaaacauguaaaguacaaaguaaccgcguauucugcgacaccaugaacucauuaacccucccauccgaaguuaauuuaugcaauauagacauauuuaauccuaaauacgacugcaaaauaaugacaucaaaaacagacguuaguuccuccguaaucacaucuuugggcgcaauagucucaugcuauggaaaaacaaaaugcacagccucaaacaaaaauagaggaauaauaaaaacauucagcaacggcugugauuauguauccaacaaaggaguagacacaguauccguaggcaauacccuuuacuacguuaauaaacaagaaggaaaaucauuauacgucaaaggagaaccuaucauaaauuucuacgacccauuaguauucccuucagacgaauuugaugccucaauaucccaagucaaugaaaaaaucaaccaaucacuagccuuuauccgcaaaucagacgaauuacuacacaacguaaacguaggcaaaucaacaacuaauauaaugauaacaacaauaauaauaguaauuauaguaauauuauuacuacuaaucgccguagguuuauucuuauacuguaaagcacgaucaacaccaguuacacucucaaaagaucaacuaucaggaauaaacaacauagcauuuuccaauuaaggacuagucccuguucccagagcccacuuuuuuuucuuuuuuugaaauaaaauagccugucuuucagaucuaaaaaaaaaaaaaaaaaaaaaaaaaaaaaaaaaaaaaaaaaaaaaaaaaaaaaaaaaaaaaaaaugcaucccccccccccccccccccccccccccccccaaaggcucuuuucagagccaccagaauu

SEQ ID NO: 11854 - RNA, 2014 nt, Artificial Sequence
  mRNA product Design c-5 comprising derived and/or modified sequence from HRSV(Memphis-37)__AIY60640.1__F0 (opt11)
gggagagcggcucggccauuuugucccagucaguccggaggcugcggcugcagaaguaccgccugcggaguaacugcaaagaagcuuaccauggaacuccccauccucaaaacaaacgccauaaccacuauccucgccgccgucacccucugcuucgccuccucccaaaacaucacagaggaguucuaccaauccacaugcuccgccgucuccaaaggcuaccucagcgcccuacguaccggcugguacaccagcgucaucacaauagaacucuccaacaucaaggaaaacaaaugcaacggcaccgaugccaaaguaaaacucaucaaacaagaacucgauaaauacaaaaacgccgucaccgaacuacaacuccuaaugcaaagcacacccgccgccaacaacagagcacggcgcgaacugccccgcuucaugaacuacacccucaacaacaccaaaaauaacaacgucacccuauccaagaaacgcaaacgccgauuccucgguuuccuacucggcguaggaagcgccauagccucaggcaucgccgucuccaaaguccuccaucuggaaggcgaagucaacaaaaucaaaaacgcacucuuauccaccaacaaagccgucgucucccucucgaacggggucuccguccuuaccuccaaaguccucgaccuuaaaaacuacaucgacaaacaacuacuaccaauagucaauaaacaauccugcuccaucucaaacauagaaaccgucauagaguuccaacagaagaacaaucgccuccucgaaauaacucgcgaguucuccgucaacgcaggcgucacgaccccugucucaacauacaugcuaacuaacucagaacuccuaagccuaaucaacgacaugcccaucacaaacgaccaaaagaaacucaugagcaacaauguccagauagucagacagcaauccuauagcaucaugucuauaauaaaagaagaagugcucgccuacguaguccaacucccucuuuacggcgucauagacacacccugcuggaaacuccacacaucuccucucugcaccaccaacacaaaagaaggcagcaacaucugccugacccgaaccgaccgcggaugguacugcgacaacgcuggcuccgugucuuucuuuccccaagccgaaaccugcaaaguccaguccaaccgcgucuucugcgacacaaugaacucccucacccuacccuccgaaguuaaccucugcaacaucgacaucuucaauccaaaauacgacugcaaaaucaugaccucgaaaacggacguauccuccuccgucauaacaucacuuggagccaucguuagcugcuacggaaaaaccaaauguaccgccuccaacaaaaaccgcggaauaaucaaaacauucuccaacggcugcgacuacguaagcaacaaaggggucgauacugucuccguagguaacacccuauacuacgucaacaaacaagaaggaaaaucacuauacguuaaaggcgaacccauuaucaacuucuacgacccccucguuuucccauccgacgaguucgacgccuccauaagccaaguuaacgaaaagauaaaccaaucgcucgcauucauccgcaaauccgacgaacuccuacacaacgucaacgugggcaaauccacaacaaacaucaugaucaccaccaucauuaucgucauaauagucauccuccuccugcucaucgccgugggacuauuccuauacugcaaagcccgcucgacgcccgucacacuuuccaaagaccaacuaagcggaaucaacaacauagcguucagcaauuaaggacuagucccuguucccagagcccacuuuuuuuucuuuuuuugaaauaaaauagccugucuuucagaucuaaaaaaaaaaaaaaaaaaaaaaaaaaaaaaaaaaaaaaaaaaaaaaaaaaaaaaaaaaaaaaaaugcaucccccccccccccccccccccccccccccccaaaggcucuuuucagagccaccagaauu

SEQ ID NO: 11855 - RNA, 2023 nt, Artificial Sequence
  mRNA product Design d-1 comprising derived and/or modified sequence from HRSV(Memphis-37)__AIY60640.1__F0 (wt)
gggagacccgugacccggaaguuguacggcuacgcgacuuucccucccacaaacccucgcgcccuuccuuuccuacuugggcccggcagaaagcuuaccauggaguugccaauccucaaaacaaaugcaauuaccacaauccuugcugcagucacacucuguuucgcuuccagucaaaacaucacugaagaauuuuaucaaucaacaugcagugcaguuagcaaaggcuaucuuagugcuuuaagaacugguugguauacuaguguuauaacuauagaauuaaguaauaucaaggaaaauaaguguaauggaacagaugcuaagguaaaauugauaaaacaagaauuagauaaauauaaaaaugcuguaacagaauugcaguugcucaugcaaagcacaccagcagccaacaaucgagccagaagagaacuaccaagguuuaugaauuauacacucaacaauaccaaaaauaacaauguaacauuaagcaagaaaaggaaaagaagauuucuuggcuuuuuguuagguguuggaucugcaaucgccaguggcauugcuguaucuaaaguccugcaccuagaaggggaagugaacaaaaucaaaaaugcucuacuauccacaaacaaggcuguagucagcuuaucaaauggaguuagugucuuaaccagcaaaguguuagaccucaaaaacuauauagauaaacaguuguuacccauugugaacaagcaaagcugcagcauaucaaacauugaaacugugauagaauuccaacaaaagaacaacagacuacuagagauuaccagggaauuuaguguuaaugcagguguaacuacaccuguaagcacuuauauguuaacaaauagugaauuauuaucauuaaucaaugauaugccuauaacaaaugaucagaaaaaguuaauguccaacaauguucaaauaguuagacagcaaaguuacucuaucauguccauaauaaaggaggaagucuuagcauauguaguucaauuaccacuauaugguguaauagauacaccuuguuggaaacuacacacauccccucuaugcacaaccaacacaaaggaaggguccaacaucuguuuaacaagaaccgacagaggaugguacugugacaaugcaggaucagugucuuucuucccacaagcugaaacaugcaaaguucaaucgaaucgaguauuuugugacacaaugaacagucuaacauuaccaagugaaguaaaucucugcaacauugacauauucaacccuaaauaugauugcaaaauuaugacuucaaaaacagaugugagcagcuccguuaucacaucucuaggagccauugugucaugcuauggcaaaacuaaauguacagcauccaauaaaaaucguggaaucauaaagacauuuucuaacgggugugauuauguaucaaauaaggggguggacacuguaucuguagguaauacauuauauuauguaaauaagcaagaaggaaaaagccucuauguaaaaggugaaccaauaauaaauuucuaugacccauuaguguucccuucugaugaauuugaugcaucaauaucucaagucaaugagaagauuaaccagagccuagcauuuauucguaaauccgaugaauuauuacauaauguaaauguugguaaauccaccacaaauaucaugauaacuacuauaauuauagugauuauaguaauauuguuauuauuaauugcaguugggcuguuccuauacugcaaggccagaagcacaccagucacacuaagcaaggaucaacugagugguauaaauaauauugcauuuaguaacugaggacuagucccuguucccagagcccacuuuuuuuucuuuuuuugaaauaaaauagccugucuuucagaucuaaaaaaaaaaaaaaaaaaaaaaaaaaaaaaaaaaaaaaaaaaaaaaaaaaaaaaaaaaaaaaaaugcaucccccccccccccccccccccccccccccccaaaggcucuuuucagagccaccagaauu

SEQ ID NO: 11856 - RNA, 2023 nt, Artificial Sequence
  mRNA product Design d-1 comprising derived and/or modified sequence from HRSV(Memphis-37)__AIY60640.1__F0 (opt1)
gggagacccgugacccggaaguuguacggcuacgcgacuuucccucccacaaacccucgcgcccuuccuuuccuacuugggcccggcagaaagcuuaccauggagcugcccauccucaagaccaacgccaucaccacgauccuggccgcggugacccugugcuucgccagcucccagaacaucaccgaggaguucuaccagagcacgugcuccgccgucagcaagggcuaccucuccgcccugcgcaccgggugguacaccagcgugaucaccaucgagcuguccaacaucaaggagaacaagugcaacggcaccgacgccaaggugaagcucaucaagcaggagcuggacaaguacaagaacgcggucacggagcugcagcuccugaugcagagcaccccggccgccaacaaccgggcccgccgggagcugccccgcuucaugaacuacacccucaacaacaccaagaacaacaacgugacgcuguccaagaagcggaagcgccgguuccugggguuccuccugggcguggggagcgcgaucgccuccggcaucgccgucagcaaggugcugcaccucgagggcgaggugaacaagaucaagaacgcccugcuguccaccaacaaggccgucgugagccucuccaacggggugagcguccugaccuccaaggugcuggaccucaagaacuacaucgacaagcagcugcugcccaucgugaacaagcagagcugcuccaucagcaacaucgagaccgucaucgaguuccagcagaagaacaaccgccuccuggagaucacgcgggaguucagcgugaacgcgggcgugaccacccccgucuccaccuacaugcugacgaacagcgagcuccugucccugaucaacgacaugccgaucaccaacgaccagaagaagcucaugagcaacaacgugcagaucgugcgccagcaguccuacagcaucauguccaucaucaaggaggagguccuggccuacguggugcagcugccccucuacggggucaucgacacccccugcuggaagcugcacaccagcccccugugcacgaccaacaccaaggagggcuccaacaucugccucacccggacggaccgcgggugguacugcgacaacgccggcagcguguccuucuucccgcaggccgagaccugcaagguccagagcaaccggguguucugcgacaccaugaacucccugacccugcccagcgaggugaaccucugcaacaucgacaucuucaaccccaaguacgacugcaagaucaugacguccaagaccgacgucagcuccagcgugaucaccucccugggcgccaucgugagcugcuacgggaagaccaagugcacggcgagcaacaagaaccgcggcaucaucaagaccuucuccaacgggugcgacuacgucagcaacaagggcguggacaccguguccgucggcaacacccuguacuacgugaacaagcaggagggcaagagccucuacgugaagggggagcccaucaucaacuucuacgacccgcuggucuuccccuccgacgaguucgacgccagcaucucccaggugaacgagaagaucaaccagagccuggccuucauccggaaguccgacgagcuccugcacaacgugaacgucggcaagagcaccacgaacaucaugaucaccaccaucaucaucgugaucaucgugauccugcugcuccugaucgccgucgggcuguuccucuacugcaaggcccgcuccacccccgugacgcugagcaaggaccagcuguccgggaucaacaacaucgcguucagcaacugaggacuagucccuguucccagagcccacuuuuuuuucuuuuuuugaaauaaaauagccugucuuucagaucuaaaaaaaaaaaaaaaaaaaaaaaaaaaaaaaaaaaaaaaaaaaaaaaaaaaaaaaaaaaaaaaaugcaucccccccccccccccccccccccccccccccaaaggcucuuuucagagccaccagaauu

SEQ ID NO: 11857 - RNA, 2023 nt, Artificial Sequence
  mRNA product Design d-1 comprising derived and/or modified sequence from HRSV(Memphis-37)__AIY60640.1__F0 (opt2)
gggagacccgugacccggaaguuguacggcuacgcgacuuucccucccacaaacccucgcgcccuuccuuuccuacuugggcccggcagaaagcuuaccauggagcuccccauccucaagaccaacgccaucaccaccauccucgccgccgucacccucugcuucgccuccucccagaacaucaccgaggaguucuaccaguccaccugcuccgccgucuccaagggcuaccucuccgcccuccgcaccggcugguacaccuccgucaucaccaucgagcucuccaacaucaaggagaacaagugcaacggcaccgacgccaaggucaagcucaucaagcaggagcucgacaaguacaagaacgccgucaccgagcuccagcuccucaugcaguccacccccgccgccaacaaccgcgcccgccgcgagcucccccgcuucaugaacuacacccucaacaacaccaagaacaacaacgucacccucuccaagaagcgcaagcgccgcuuccucggcuuccuccucggcgucggcuccgccaucgccuccggcaucgccgucuccaagguccuccaccucgagggcgaggucaacaagaucaagaacgcccuccucuccaccaacaaggccgucgucucccucuccaacggcgucuccguccucaccuccaagguccucgaccucaagaacuacaucgacaagcagcuccuccccaucgucaacaagcaguccugcuccaucuccaacaucgagaccgucaucgaguuccagcagaagaacaaccgccuccucgagaucacccgcgaguucuccgucaacgccggcgucaccacccccgucuccaccuacaugcucaccaacuccgagcuccucucccucaucaacgacaugcccaucaccaacgaccagaagaagcucauguccaacaacguccagaucguccgccagcaguccuacuccaucauguccaucaucaaggaggagguccucgccuacgucguccagcucccccucuacggcgucaucgacacccccugcuggaagcuccacaccuccccccucugcaccaccaacaccaaggagggcuccaacaucugccucacccgcaccgaccgcggcugguacugcgacaacgccggcuccgucuccuucuucccccaggccgagaccugcaagguccaguccaaccgcgucuucugcgacaccaugaacucccucacccuccccuccgaggucaaccucugcaacaucgacaucuucaaccccaaguacgacugcaagaucaugaccuccaagaccgacgucuccuccuccgucaucaccucccucggcgccaucgucuccugcuacggcaagaccaagugcaccgccuccaacaagaaccgcggcaucaucaagaccuucuccaacggcugcgacuacgucuccaacaagggcgucgacaccgucuccgucggcaacacccucuacuacgucaacaagcaggagggcaagucccucuacgucaagggcgagcccaucaucaacuucuacgacccccucgucuuccccuccgacgaguucgacgccuccaucucccaggucaacgagaagaucaaccagucccucgccuucauccgcaaguccgacgagcuccuccacaacgucaacgucggcaaguccaccaccaacaucaugaucaccaccaucaucaucgucaucaucgucauccuccuccuccucaucgccgucggccucuuccucuacugcaaggcccgcuccacccccgucacccucuccaaggaccagcucuccggcaucaacaacaucgccuucuccaacugaggacuagucccuguucccagagcccacuuuuuuuucuuuuuuugaaauaaaauagccugucuuucagaucuaaaaaaaaaaaaaaaaaaaaaaaaaaaaaaaaaaaaaaaaaaaaaaaaaaaaaaaaaaaaaaaaugcaucccccccccccccccccccccccccccccccaaaggcucuuuucagagccaccagaauu

SEQ ID NO: 11858 - RNA, 2023 nt, Artificial Sequence
  mRNA product Design d-1 comprising derived and/or modified sequence from HRSV(Memphis-37)__AIY60640.1__F0 (opt3)
gggagacccgugacccggaaguuguacggcuacgcgacuuucccucccacaaacccucgcgcccuuccuuuccuacuugggcccggcagaaagcuuaccauggagcugcccauccucaagaccaacgccauuacaacuauacuugcugcagugacgcugugcuucgccagcucccagaauaucaccgaagaguuuuaccaaucuacauguucagcggucaguaaaggcuauuugagcgcuuuaagaacugggugguacaccuccguuauuacaaucgaacugucuaacauuaaggagaauaaaugcaacggaaccgacgccaaggugaaacuaaucaagcaggaacucgauaaguauaaaaaugcaguaacugagcugcagcuucugaugcagucgaccccugccgcuaacaauagggcacggcgcgaguugccacgauucaugaacuacacacucaauaacacgaagaauaacaaugugacucugagcaaaaagcguaaaagaagguuucuggguuuccucuuaggcgucgggucagccauagcuaguggaaucgccguguccaagguucugcaccuugaaggcgaggugaacaagauuaaaaaugcguugcugucuaccaacaaggcagucgugagccuauccaacgguguaucaguucucacaaguaaagugcuggaccuuaagaauuauaucgauaaacaacuguugccgauugucaacaagcagagcuguucuaucuccaauauagaaacugugauugaguuucagcagaaaaacaaucggcuccuggagaucacccgcgaguucucagugaacgccggggucacaacccccguuagcacguacauguuaacuaauagugaacugcucucucuuauuaacgacaugccuaucacaaaugaucaaaagaagcugauguccaacaaugugcagaucguaagacagcagagcuauucgauuaugucuauaaucaaagaagagguguuggcuuacgucgugcaacuaccacuguacggaguuauugacacccccugcuggaagcuccauacuuccccucuguguacaaccaacacgaaagaaggcucaaauaucugccuuaccaggacagaucggggcugguauugugacaacgccgggagugugagcuuuuucccacaggcagagacuugcaagguccaguccaaucgcguguuuugugauaccaugaacucucugacauugcccagcgagguaaaccucugcaauauagacauuuucaacccuaaauacgauuguaagaucaugacuucaaagaccgacguuaguuccagcgugaucacaucucugggagcuauugucucaugcuaugguaaaaccaagugcacugccaguaauaaaaaccgaggcaucauuaagacguuuagcaaugggugugauuacguguccaacaaaggagucgacacagugucuguuggcaauaccuuauauuacgugaacaagcaagaagguaagucgcuguauguaaaaggggagccaauaaucaauuucuacgacccgcuagucuuucccagcgaugaguucgacgcguccauuucacaggugaacgaaaagaucaaucagagucucgccuucaucagaaaaucugaugaacugcuucacaacguuaaugugggaaagagcacuaccaacauuaugauaacaaccaucauuaucgucauuaucgugauauugcugcuccugaucgcaguaggccuuuuucuguacugcaaagcuagguccacuccugugacauugucaaaggaccagcucagcggcauuaauaacaucgccuucucuaacugaggacuagucccuguucccagagcccacuuuuuuuucuuuuuuugaaauaaaauagccugucuuucagaucuaaaaaaaaaaaaaaaaaaaaaaaaaaaaaaaaaaaaaaaaaaaaaaaaaaaaaaaaaaaaaaaaugcaucccccccccccccccccccccccccccccccaaaggcucuuuucagagccaccagaauu

SEQ ID NO: 11859 - RNA, 2023 nt, Artificial Sequence
  mRNA product Design d-1 comprising derived and/or modified sequence from HRSV(Memphis-37)__AIY60640.1__F0 (opt4)
gggagacccgugacccggaaguuguacggcuacgcgacuuucccucccacaaacccucgcgcccuuccuuuccuacuugggcccggcagaaagcuuaccauggagcugcccauccugaagaccaacgccaucaccaccauccuggccgccgugacccugugcuucgccagcagccagaacaucaccgaggaguucuaccagagcaccugcagcgccgugagcaagggcuaccugagcgcccugagaaccggcugguacaccagcgugaucaccaucgagcugagcaacaucaaggagaacaagugcaacggcaccgacgccaaggugaagcugaucaagcaggagcuggacaaguacaagaacgccgugaccgagcugcagcugcugaugcagagcacccccgccgccaacaacagagccagaagagagcugcccagauucaugaacuacacccugaacaacaccaagaacaacaacgugacccugagcaagaagagaaagagaagauuccugggcuuccugcugggcgugggcagcgccaucgccagcggcaucgccgugagcaaggugcugcaccuggagggcgaggugaacaagaucaagaacgcccugcugagcaccaacaaggccguggugagccugagcaacggcgugagcgugcugaccagcaaggugcuggaccugaagaacuacaucgacaagcagcugcugcccaucgugaacaagcagagcugcagcaucagcaacaucgagaccgugaucgaguuccagcagaagaacaacagacugcuggagaucaccagagaguucagcgugaacgccggcgugaccacccccgugagcaccuacaugcugaccaacagcgagcugcugagccugaucaacgacaugcccaucaccaacgaccagaagaagcugaugagcaacaacgugcagaucgugagacagcagagcuacagcaucaugagcaucaucaaggaggaggugcuggccuacguggugcagcugccccuguacggcgugaucgacacccccugcuggaagcugcacaccagcccccugugcaccaccaacaccaaggagggcagcaacaucugccugaccagaaccgacagaggcugguacugcgacaacgccggcagcgugagcuucuucccccaggccgagaccugcaaggugcagagcaacagaguguucugcgacaccaugaacagccugacccugcccagcgaggugaaccugugcaacaucgacaucuucaaccccaaguacgacugcaagaucaugaccagcaagaccgacgugagcagcagcgugaucaccagccugggcgccaucgugagcugcuacggcaagaccaagugcaccgccagcaacaagaacagaggcaucaucaagaccuucagcaacggcugcgacuacgugagcaacaagggcguggacaccgugagcgugggcaacacccuguacuacgugaacaagcaggagggcaagagccuguacgugaagggcgagcccaucaucaacuucuacgacccccugguguuccccagcgacgaguucgacgccagcaucagccaggugaacgagaagaucaaccagagccuggccuucaucagaaagagcgacgagcugcugcacaacgugaacgugggcaagagcaccaccaacaucaugaucaccaccaucaucaucgugaucaucgugauccugcugcugcugaucgccgugggccuguuccuguacugcaaggccagaagcacccccgugacccugagcaaggaccagcugagcggcaucaacaacaucgccuucagcaacugaggacuagucccuguucccagagcccacuuuuuuuucuuuuuuugaaauaaaauagccugucuuucagaucuaaaaaaaaaaaaaaaaaaaaaaaaaaaaaaaaaaaaaaaaaaaaaaaaaaaaaaaaaaaaaaaaugcaucccccccccccccccccccccccccccccccaaaggcucuuuucagagccaccagaauu

SEQ ID NO: 11860 - RNA, 2023 nt, Artificial Sequence
  mRNA product Design d-1 comprising derived and/or modified sequence from HRSV(Memphis-37)__AIY60640.1__F0 (opt5)
gggagacccgugacccggaaguuguacggcuacgcgacuuucccucccacaaacccucgcgcccuuccuuuccuacuugggcccggcagaaagcuuaccauggagcugcccauccucaagaccaacgccauuacaacgauccuggcugccgugacccuuugcuucgcgagcucccagaauauuacagaagaguuuuaccaaucuaccuguagcgcugucuccaaaggcuaucugucugcccucagaacagggugguacaccagcguuaucacaauugaacuguccaacaucaaggagaauaaaugcaacggaaccgacgccaaggugaaacuuaucaagcaggaacuggauaaguauaaaaaugcugugacggagcuccagcugcugaugcagucuaccccugccgcuaacaaucgggcccgcagagagcucccgcgguucaugaacuacacacugaauaacaccaagaauaacaaugucacacuuagcaaaaagcgcaaaagacgguuucugggcuuccuccugggggugggauccgcgauugccagcggcaucgcuguuucuaaggugcuucaccuggaaggggaggucaacaagauuaaaaaugcccuccuguccaccaacaaggcugugguuagccugucuaacggaguguccguccucacgagcaaagugcuggaccuuaagaauuauaucgauaaacaacugcuccccauugugaacaagcagucuuguuccaucagcaauauugaaacagucaucgaguuucagcagaaaaacaaucgccugcuugagaucaccagagaauuuuccguuaacgccggcgugacaaccccugugucuaccuacaugcugacaaauagcgagcuccugucccugauuaacgacaugcccaucacgaaugaucaaaagaagcucaugagcaacaauguccagauugugcggcagcagucuuauuccaucaugagcauuaucaaagaagagguucuggcguacgugguccaacuuccucuguacggcgugaucgacacccccugcuggaagcuccauacaucuccucuguguaccacaaacaccaaagaagggagcaauauuugccuuacgcgcacagauagaggaugguauugugacaacgccggcuccguuucuuucuucccgcaggcugagaccugcaaggugcagagcaaucgggucuuuugugauaccaugaacucccugacacuccccagcgaggugaaccugugcaauaucgacauuuucaacccuaaauacgauuguaagaucaugaccucuaagacagacgucuccagcucugugauuacgucccugggggccaucguuagcugcuauggaaaaaccaagugcacagcuuccaauaaaaaccgcggcaucauuaagaccuuuucuaaugggugugauuacgugagcaacaaaggagucgacacaguguccguuggcaauacccucuauuacgugaacaagcaagaaggcaagucucuguaugucaaaggggagcccaucauuaauuucuacgacccucuuguguuucccagcgaugaguucgacgccuccaucagccaggugaacgaaaagauuaaucagucucuggccuucaucagaaaauccgaugaacuccugcacaacguuaaugucggaaagagcacgaccaacauuaugaucacaaccaucauuaucgugauuaucgugauucugcuucuccugaucgcugucggccuguuucucuacugcaaagcgcggucuacaccggugacccuguccaaggaccagcuuagcgggaucaauaacauugccuucucuaacugaggacuagucccuguucccagagcccacuuuuuuuucuuuuuuugaaauaaaauagccugucuuucagaucuaaaaaaaaaaaaaaaaaaaaaaaaaaaaaaaaaaaaaaaaaaaaaaaaaaaaaaaaaaaaaaaaugcaucccccccccccccccccccccccccccccccaaaggcucuuuucagagccaccagaauu

SEQ ID NO: 11861 - RNA, 2023 nt, Artificial Sequence
  mRNA product Design d-1 comprising derived and/or modified sequence from HRSV(Memphis-37)__AIY60640.1__F0 (opt6)
gggagacccgugacccggaaguuguacggcuacgcgacuuucccucccacaaacccucgcgcccuuccuuuccuacuugggcccggcagaaagcuuaccauggaacugccuauucuaaaaacaaaugccauaacaacaauucuugcagcaguaacauuauguuuugcaucaucacaaaacauuacagaagaauuuuaccaauccacuugcucagccguaucaaaaggauaccuaucagccuuaagaacagguugguacaccucaguaauaaccauagaacuaucaaacauaaaagaaaacaaaugcaaugguacugaugcaaaagucaaacuaaucaaacaagaacuggacaaauacaaaaaugcaguaaccgaacuacaacuccuaaugcaauccacaccugcagccaacaacagagcaagacgcgaacuaccaagauuuaugaauuacacauuaaacaacaccaagaacaacaauguaacucucucaaaaaaaagaaaaagacgcuuucuagguuuccuccuaggcgucggaucugcaauagccucaggaauagcaguaucaaaaguucuacaccuagaaggagaaguaaacaaaauuaaaaacgcauuacuaucaaccaacaaagcaguuguaucccuuucaaauggagucucuguacuuacaucaaaaguacucgaccuaaaaaacuauauagacaaacaacuacucccaauagucaauaagcaaucaugcagcauaucaaacauagaaacaguuauagaauuucaacaaaaaaacaacagacuacucgaaauaaccagagaauuuagcgucaacgcaggcguaaccacaccgguauccacauacaugcuuacaaacucagaacuccucucacuaauaaacgacaugccaauaacuaaugaccaaaaaaaacuaaugucaaacaauguccaaauaguccgucaacaaucauacucaauaaugucaauaauaaaagaagaaguauuagcauauguaguccaacuaccauuauacggcguuauagacacaccuuguuggaaacuucacacauccccacucuguacaaccaacacaaaagaagguuccaauauaugccuaacuagaaccgacagaggaugguauugcgacaacgcaggaucuguaucauucuuuccccaagcagaaacauguaaaguacaaaguaaccgcguauucugcgacaccaugaacucauuaacccucccauccgaaguuaauuuaugcaauauagacauauuuaauccuaaauacgacugcaaaauaaugacaucaaaaacagacguuaguuccuccguaaucacaucuuugggcgcaauagucucaugcuauggaaaaacaaaaugcacagccucaaacaaaaauagaggaauaauaaaaacauucagcaacggcugugauuauguauccaacaaaggaguagacacaguauccguaggcaauacccuuuacuacguuaauaaacaagaaggaaaaucauuauacgucaaaggagaaccuaucauaaauuucuacgacccauuaguauucccuucagacgaauuugaugccucaauaucccaagucaaugaaaaaaucaaccaaucacuagccuuuauccgcaaaucagacgaauuacuacacaacguaaacguaggcaaaucaacaacuaauauaaugauaacaacaauaauaauaguaauuauaguaauauuauuacuacuaaucgccguagguuuauucuuauacuguaaagcacgaucaacaccaguuacacucucaaaagaucaacuaucaggaauaaacaacauagcauuuuccaauuaaggacuagucccuguucccagagcccacuuuuuuuucuuuuuuugaaauaaaauagccugucuuucagaucuaaaaaaaaaaaaaaaaaaaaaaaaaaaaaaaaaaaaaaaaaaaaaaaaaaaaaaaaaaaaaaaaugcaucccccccccccccccccccccccccccccccaaaggcucuuuucagagccaccagaauu

SEQ ID NO: 11862 - RNA, 2023 nt, Artificial Sequence
  mRNA product Design d-1 comprising derived and/or modified sequence from HRSV(Memphis-37)__AIY60640.1__F0 (opt11)
gggagacccgugacccggaaguuguacggcuacgcgacuuucccucccacaaacccucgcgcccuuccuuuccuacuugggcccggcagaaagcuuaccauggaacuccccauccucaaaacaaacgccauaaccacuauccucgccgccgucacccucugcuucgccuccucccaaaacaucacagaggaguucuaccaauccacaugcuccgccgucuccaaaggcuaccucagcgcccuacguaccggcugguacaccagcgucaucacaauagaacucuccaacaucaaggaaaacaaaugcaacggcaccgaugccaaaguaaaacucaucaaacaagaacucgauaaauacaaaaacgccgucaccgaacuacaacuccuaaugcaaagcacacccgccgccaacaacagagcacggcgcgaacugccccgcuucaugaacuacacccucaacaacaccaaaaauaacaacgucacccuauccaagaaacgcaaacgccgauuccucgguuuccuacucggcguaggaagcgccauagccucaggcaucgccgucuccaaaguccuccaucuggaaggcgaagucaacaaaaucaaaaacgcacucuuauccaccaacaaagccgucgucucccucucgaacggggucuccguccuuaccuccaaaguccucgaccuuaaaaacuacaucgacaaacaacuacuaccaauagucaauaaacaauccugcuccaucucaaacauagaaaccgucauagaguuccaacagaagaacaaucgccuccucgaaauaacucgcgaguucuccgucaacgcaggcgucacgaccccugucucaacauacaugcuaacuaacucagaacuccuaagccuaaucaacgacaugcccaucacaaacgaccaaaagaaacucaugagcaacaauguccagauagucagacagcaauccuauagcaucaugucuauaauaaaagaagaagugcucgccuacguaguccaacucccucuuuacggcgucauagacacacccugcuggaaacuccacacaucuccucucugcaccaccaacacaaaagaaggcagcaacaucugccugacccgaaccgaccgcggaugguacugcgacaacgcuggcuccgugucuuucuuuccccaagccgaaaccugcaaaguccaguccaaccgcgucuucugcgacacaaugaacucccucacccuacccuccgaaguuaaccucugcaacaucgacaucuucaauccaaaauacgacugcaaaaucaugaccucgaaaacggacguauccuccuccgucauaacaucacuuggagccaucguuagcugcuacggaaaaaccaaauguaccgccuccaacaaaaaccgcggaauaaucaaaacauucuccaacggcugcgacuacguaagcaacaaaggggucgauacugucuccguagguaacacccuauacuacgucaacaaacaagaaggaaaaucacuauacguuaaaggcgaacccauuaucaacuucuacgacccccucguuuucccauccgacgaguucgacgccuccauaagccaaguuaacgaaaagauaaaccaaucgcucgcauucauccgcaaauccgacgaacuccuacacaacgucaacgugggcaaauccacaacaaacaucaugaucaccaccaucauuaucgucauaauagucauccuccuccugcucaucgccgugggacuauuccuauacugcaaagcccgcucgacgcccgucacacuuuccaaagaccaacuaagcggaaucaacaacauagcguucagcaauuaaggacuagucccuguucccagagcccacuuuuuuuucuuuuuuugaaauaaaauagccugucuuucagaucuaaaaaaaaaaaaaaaaaaaaaaaaaaaaaaaaaaaaaaaaaaaaaaaaaaaaaaaaaaaaaaaaugcaucccccccccccccccccccccccccccccccaaaggcucuuuucagagccaccagaauu

SEQ ID NO: 11863 - RNA, 2078 nt, Artificial Sequence
  mRNA product Design d-2 comprising derived and/or modified sequence from HRSV(Memphis-37)__AIY60640.1__F0 (wt)
gggagagcggcucggccauuuugucccagucaguccggaggcugcggcugcagaaguaccgccugcggaguaacugcaaagaagcuuaccauggaguugccaauccucaaaacaaaugcaauuaccacaauccuugcugcagucacacucuguuucgcuuccagucaaaacaucacugaagaauuuuaucaaucaacaugcagugcaguuagcaaaggcuaucuuagugcuuuaagaacugguugguauacuaguguuauaacuauagaauuaaguaauaucaaggaaaauaaguguaauggaacagaugcuaagguaaaauugauaaaacaagaauuagauaaauauaaaaaugcuguaacagaauugcaguugcucaugcaaagcacaccagcagccaacaaucgagccagaagagaacuaccaagguuuaugaauuauacacucaacaauaccaaaaauaacaauguaacauuaagcaagaaaaggaaaagaagauuucuuggcuuuuuguuagguguuggaucugcaaucgccaguggcauugcuguaucuaaaguccugcaccuagaaggggaagugaacaaaaucaaaaaugcucuacuauccacaaacaaggcuguagucagcuuaucaaauggaguuagugucuuaaccagcaaaguguuagaccucaaaaacuauauagauaaacaguuguuacccauugugaacaagcaaagcugcagcauaucaaacauugaaacugugauagaauuccaacaaaagaacaacagacuacuagagauuaccagggaauuuaguguuaaugcagguguaacuacaccuguaagcacuuauauguuaacaaauagugaauuauuaucauuaaucaaugauaugccuauaacaaaugaucagaaaaaguuaauguccaacaauguucaaauaguuagacagcaaaguuacucuaucauguccauaauaaaggaggaagucuuagcauauguaguucaauuaccacuauaugguguaauagauacaccuuguuggaaacuacacacauccccucuaugcacaaccaacacaaaggaaggguccaacaucuguuuaacaagaaccgacagaggaugguacugugacaaugcaggaucagugucuuucuucccacaagcugaaacaugcaaaguucaaucgaaucgaguauuuugugacacaaugaacagucuaacauuaccaagugaaguaaaucucugcaacauugacauauucaacccuaaauaugauugcaaaauuaugacuucaaaaacagaugugagcagcuccguuaucacaucucuaggagccauugugucaugcuauggcaaaacuaaauguacagcauccaauaaaaaucguggaaucauaaagacauuuucuaacgggugugauuauguaucaaauaaggggguggacacuguaucuguagguaauacauuauauuauguaaauaagcaagaaggaaaaagccucuauguaaaaggugaaccaauaauaaauuucuaugacccauuaguguucccuucugaugaauuugaugcaucaauaucucaagucaaugagaagauuaaccagagccuagcauuuauucguaaauccgaugaauuauuacauaauguaaauguugguaaauccaccacaaauaucaugauaacuacuauaauuauagugauuauaguaauauuguuauuauuaauugcaguugggcuguuccuauacugcaaggccagaagcacaccagucacacuaagcaaggaucaacugagugguauaaauaauauugcauuuaguaacugaggacuaguaauaaggaaacuguaugaaugucugugggcaggaagugaagagauccuucuguaaagguuuuuggaauuaugucugcugaauaauaaacuuuuuugaaauaauaaaucugguagaaaaaugagaucuaaaaaaaaaaaaaaaaaaaaaaaaaaaaaaaaaaaaaaaaaaaaaaaaaaaaaaaaaaaaaaaaugcaucccccccccccccccccccccccccccccccaaaggcucuuuucagagccaccagaauu

SEQ ID NO: 11864 - RNA, 2078 nt, Artificial Sequence
  mRNA product Design d-2 comprising derived and/or modified sequence from HRSV(Memphis-37)__AIY60640.1__F0 (opt1)
gggagagcggcucggccauuuugucccagucaguccggaggcugcggcugcagaaguaccgccugcggaguaacugcaaagaagcuuaccauggagcugcccauccucaagaccaacgccaucaccacgauccuggccgcggugacccugugcuucgccagcucccagaacaucaccgaggaguucuaccagagcacgugcuccgccgucagcaagggcuaccucuccgcccugcgcaccgggugguacaccagcgugaucaccaucgagcuguccaacaucaaggagaacaagugcaacggcaccgacgccaaggugaagcucaucaagcaggagcuggacaaguacaagaacgcggucacggagcugcagcuccugaugcagagcaccccggccgccaacaaccgggcccgccgggagcugccccgcuucaugaacuacacccucaacaacaccaagaacaacaacgugacgcuguccaagaagcggaagcgccgguuccugggguuccuccugggcguggggagcgcgaucgccuccggcaucgccgucagcaaggugcugcaccucgagggcgaggugaacaagaucaagaacgcccugcuguccaccaacaaggccgucgugagccucuccaacggggugagcguccugaccuccaaggugcuggaccucaagaacuacaucgacaagcagcugcugcccaucgugaacaagcagagcugcuccaucagcaacaucgagaccgucaucgaguuccagcagaagaacaaccgccuccuggagaucacgcgggaguucagcgugaacgcgggcgugaccacccccgucuccaccuacaugcugacgaacagcgagcuccugucccugaucaacgacaugccgaucaccaacgaccagaagaagcucaugagcaacaacgugcagaucgugcgccagcaguccuacagcaucauguccaucaucaaggaggagguccuggccuacguggugcagcugccccucuacggggucaucgacacccccugcuggaagcugcacaccagcccccugugcacgaccaacaccaaggagggcuccaacaucugccucacccggacggaccgcgggugguacugcgacaacgccggcagcguguccuucuucccgcaggccgagaccugcaagguccagagcaaccggguguucugcgacaccaugaacucccugacccugcccagcgaggugaaccucugcaacaucgacaucuucaaccccaaguacgacugcaagaucaugacguccaagaccgacgucagcuccagcgugaucaccucccugggcgccaucgugagcugcuacgggaagaccaagugcacggcgagcaacaagaaccgcggcaucaucaagaccuucuccaacgggugcgacuacgucagcaacaagggcguggacaccguguccgucggcaacacccuguacuacgugaacaagcaggagggcaagagccucuacgugaagggggagcccaucaucaacuucuacgacccgcuggucuuccccuccgacgaguucgacgccagcaucucccaggugaacgagaagaucaaccagagccuggccuucauccggaaguccgacgagcuccugcacaacgugaacgucggcaagagcaccacgaacaucaugaucaccaccaucaucaucgugaucaucgugauccugcugcuccugaucgccgucgggcuguuccucuacugcaaggcccgcuccacccccgugacgcugagcaaggaccagcuguccgggaucaacaacaucgcguucagcaacugaggacuaguaauaaggaaacuguaugaaugucugugggcaggaagugaagagauccuucuguaaagguuuuuggaauuaugucugcugaauaauaaacuuuuuugaaauaauaaaucugguagaaaaaugagaucuaaaaaaaaaaaaaaaaaaaaaaaaaaaaaaaaaaaaaaaaaaaaaaaaaaaaaaaaaaaaaaaaugcaucccccccccccccccccccccccccccccccaaaggcucuuuucagagccaccagaauu

SEQ ID NO: 11865 - RNA, 2078 nt, Artificial Sequence
  mRNA product Design d-2 comprising derived and/or modified sequence from HRSV(Memphis-37)__AIY60640.1__F0 (opt2)
gggagagcggcucggccauuuugucccagucaguccggaggcugcggcugcagaaguaccgccugcggaguaacugcaaagaagcuuaccauggagcuccccauccucaagaccaacgccaucaccaccauccucgccgccgucacccucugcuucgccuccucccagaacaucaccgaggaguucuaccaguccaccugcuccgccgucuccaagggcuaccucuccgcccuccgcaccggcugguacaccuccgucaucaccaucgagcucuccaacaucaaggagaacaagugcaacggcaccgacgccaaggucaagcucaucaagcaggagcucgacaaguacaagaacgccgucaccgagcuccagcuccucaugcaguccacccccgccgccaacaaccgcgcccgccgcgagcucccccgcuucaugaacuacacccucaacaacaccaagaacaacaacgucacccucuccaagaagcgcaagcgccgcuuccucggcuuccuccucggcgucggcuccgccaucgccuccggcaucgccgucuccaagguccuccaccucgagggcgaggucaacaagaucaagaacgcccuccucuccaccaacaaggccgucgucucccucuccaacggcgucuccguccucaccuccaagguccucgaccucaagaacuacaucgacaagcagcuccuccccaucgucaacaagcaguccugcuccaucuccaacaucgagaccgucaucgaguuccagcagaagaacaaccgccuccucgagaucacccgcgaguucuccgucaacgccggcgucaccacccccgucuccaccuacaugcucaccaacuccgagcuccucucccucaucaacgacaugcccaucaccaacgaccagaagaagcucauguccaacaacguccagaucguccgccagcaguccuacuccaucauguccaucaucaaggaggagguccucgccuacgucguccagcucccccucuacggcgucaucgacacccccugcuggaagcuccacaccuccccccucugcaccaccaacaccaaggagggcuccaacaucugccucacccgcaccgaccgcggcugguacugcgacaacgccggcuccgucuccuucuucccccaggccgagaccugcaagguccaguccaaccgcgucuucugcgacaccaugaacucccucacccuccccuccgaggucaaccucugcaacaucgacaucuucaaccccaaguacgacugcaagaucaugaccuccaagaccgacgucuccuccuccgucaucaccucccucggcgccaucgucuccugcuacggcaagaccaagugcaccgccuccaacaagaaccgcggcaucaucaagaccuucuccaacggcugcgacuacgucuccaacaagggcgucgacaccgucuccgucggcaacacccucuacuacgucaacaagcaggagggcaagucccucuacgucaagggcgagcccaucaucaacuucuacgacccccucgucuuccccuccgacgaguucgacgccuccaucucccaggucaacgagaagaucaaccagucccucgccuucauccgcaaguccgacgagcuccuccacaacgucaacgucggcaaguccaccaccaacaucaugaucaccaccaucaucaucgucaucaucgucauccuccuccuccucaucgccgucggccucuuccucuacugcaaggcccgcuccacccccgucacccucuccaaggaccagcucuccggcaucaacaacaucgccuucuccaacugaggacuaguaauaaggaaacuguaugaaugucugugggcaggaagugaagagauccuucuguaaagguuuuuggaauuaugucugcugaauaauaaacuuuuuugaaauaauaaaucugguagaaaaaugagaucuaaaaaaaaaaaaaaaaaaaaaaaaaaaaaaaaaaaaaaaaaaaaaaaaaaaaaaaaaaaaaaaaugcaucccccccccccccccccccccccccccccccaaaggcucuuuucagagccaccagaauu

SEQ ID NO: 11866 - RNA, 2078 nt, Artificial Sequence
  mRNA product Design d-2 comprising derived and/or modified sequence from HRSV(Memphis-37)__AIY60640.1__F0 (opt3)
gggagagcggcucggccauuuugucccagucaguccggaggcugcggcugcagaaguaccgccugcggaguaacugcaaagaagcuuaccauggagcugcccauccucaagaccaacgccauuacaacuauacuugcugcagugacgcugugcuucgccagcucccagaauaucaccgaagaguuuuaccaaucuacauguucagcggucaguaaaggcuauuugagcgcuuuaagaacugggugguacaccuccguuauuacaaucgaacugucuaacauuaaggagaauaaaugcaacggaaccgacgccaaggugaaacuaaucaagcaggaacucgauaaguauaaaaaugcaguaacugagcugcagcuucugaugcagucgaccccugccgcuaacaauagggcacggcgcgaguugccacgauucaugaacuacacacucaauaacacgaagaauaacaaugugacucugagcaaaaagcguaaaagaagguuucuggguuuccucuuaggcgucgggucagccauagcuaguggaaucgccguguccaagguucugcaccuugaaggcgaggugaacaagauuaaaaaugcguugcugucuaccaacaaggcagucgugagccuauccaacgguguaucaguucucacaaguaaagugcuggaccuuaagaauuauaucgauaaacaacuguugccgauugucaacaagcagagcuguucuaucuccaauauagaaacugugauugaguuucagcagaaaaacaaucggcuccuggagaucacccgcgaguucucagugaacgccggggucacaacccccguuagcacguacauguuaacuaauagugaacugcucucucuuauuaacgacaugccuaucacaaaugaucaaaagaagcugauguccaacaaugugcagaucguaagacagcagagcuauucgauuaugucuauaaucaaagaagagguguuggcuuacgucgugcaacuaccacuguacggaguuauugacacccccugcuggaagcuccauacuuccccucuguguacaaccaacacgaaagaaggcucaaauaucugccuuaccaggacagaucggggcugguauugugacaacgccgggagugugagcuuuuucccacaggcagagacuugcaagguccaguccaaucgcguguuuugugauaccaugaacucucugacauugcccagcgagguaaaccucugcaauauagacauuuucaacccuaaauacgauuguaagaucaugacuucaaagaccgacguuaguuccagcgugaucacaucucugggagcuauugucucaugcuaugguaaaaccaagugcacugccaguaauaaaaaccgaggcaucauuaagacguuuagcaaugggugugauuacguguccaacaaaggagucgacacagugucuguuggcaauaccuuauauuacgugaacaagcaagaagguaagucgcuguauguaaaaggggagccaauaaucaauuucuacgacccgcuagucuuucccagcgaugaguucgacgcguccauuucacaggugaacgaaaagaucaaucagagucucgccuucaucagaaaaucugaugaacugcuucacaacguuaaugugggaaagagcacuaccaacauuaugauaacaaccaucauuaucgucauuaucgugauauugcugcuccugaucgcaguaggccuuuuucuguacugcaaagcuagguccacuccugugacauugucaaaggaccagcucagcggcauuaauaacaucgccuucucuaacugaggacuaguaauaaggaaacuguaugaaugucugugggcaggaagugaagagauccuucuguaaagguuuuuggaauuaugucugcugaauaauaaacuuuuuugaaauaauaaaucugguagaaaaaugagaucuaaaaaaaaaaaaaaaaaaaaaaaaaaaaaaaaaaaaaaaaaaaaaaaaaaaaaaaaaaaaaaaaugcaucccccccccccccccccccccccccccccccaaaggcucuuuucagagccaccagaauu

SEQ ID NO: 11867 - RNA, 2078 nt, Artificial Sequence
  mRNA product Design d-2 comprising derived and/or modified sequence from HRSV(Memphis-37)__AIY60640.1__F0 (opt4)
gggagagcggcucggccauuuugucccagucaguccggaggcugcggcugcagaaguaccgccugcggaguaacugcaaagaagcuuaccauggagcugcccauccugaagaccaacgccaucaccaccauccuggccgccgugacccugugcuucgccagcagccagaacaucaccgaggaguucuaccagagcaccugcagcgccgugagcaagggcuaccugagcgcccugagaaccggcugguacaccagcgugaucaccaucgagcugagcaacaucaaggagaacaagugcaacggcaccgacgccaaggugaagcugaucaagcaggagcuggacaaguacaagaacgccgugaccgagcugcagcugcugaugcagagcacccccgccgccaacaacagagccagaagagagcugcccagauucaugaacuacacccugaacaacaccaagaacaacaacgugacccugagcaagaagagaaagagaagauuccugggcuuccugcugggcgugggcagcgccaucgccagcggcaucgccgugagcaaggugcugcaccuggagggcgaggugaacaagaucaagaacgcccugcugagcaccaacaaggccguggugagccugagcaacggcgugagcgugcugaccagcaaggugcuggaccugaagaacuacaucgacaagcagcugcugcccaucgugaacaagcagagcugcagcaucagcaacaucgagaccgugaucgaguuccagcagaagaacaacagacugcuggagaucaccagagaguucagcgugaacgccggcgugaccacccccgugagcaccuacaugcugaccaacagcgagcugcugagccugaucaacgacaugcccaucaccaacgaccagaagaagcugaugagcaacaacgugcagaucgugagacagcagagcuacagcaucaugagcaucaucaaggaggaggugcuggccuacguggugcagcugccccuguacggcgugaucgacacccccugcuggaagcugcacaccagcccccugugcaccaccaacaccaaggagggcagcaacaucugccugaccagaaccgacagaggcugguacugcgacaacgccggcagcgugagcuucuucccccaggccgagaccugcaaggugcagagcaacagaguguucugcgacaccaugaacagccugacccugcccagcgaggugaaccugugcaacaucgacaucuucaaccccaaguacgacugcaagaucaugaccagcaagaccgacgugagcagcagcgugaucaccagccugggcgccaucgugagcugcuacggcaagaccaagugcaccgccagcaacaagaacagaggcaucaucaagaccuucagcaacggcugcgacuacgugagcaacaagggcguggacaccgugagcgugggcaacacccuguacuacgugaacaagcaggagggcaagagccuguacgugaagggcgagcccaucaucaacuucuacgacccccugguguuccccagcgacgaguucgacgccagcaucagccaggugaacgagaagaucaaccagagccuggccuucaucagaaagagcgacgagcugcugcacaacgugaacgugggcaagagcaccaccaacaucaugaucaccaccaucaucaucgugaucaucgugauccugcugcugcugaucgccgugggccuguuccuguacugcaaggccagaagcacccccgugacccugagcaaggaccagcugagcggcaucaacaacaucgccuucagcaacugaggacuaguaauaaggaaacuguaugaaugucugugggcaggaagugaagagauccuucuguaaagguuuuuggaauuaugucugcugaauaauaaacuuuuuugaaauaauaaaucugguagaaaaaugagaucuaaaaaaaaaaaaaaaaaaaaaaaaaaaaaaaaaaaaaaaaaaaaaaaaaaaaaaaaaaaaaaaaugcaucccccccccccccccccccccccccccccccaaaggcucuuuucagagccaccagaauu

SEQ ID NO: 11868 - RNA, 2078 nt, Artificial Sequence
  mRNA product Design d-2 comprising derived and/or modified sequence from HRSV(Memphis-37)__AIY60640.1__F0 (opt5)
gggagagcggcucggccauuuugucccagucaguccggaggcugcggcugcagaaguaccgccugcggaguaacugcaaagaagcuuaccauggagcugcccauccucaagaccaacgccauuacaacgauccuggcugccgugacccuuugcuucgcgagcucccagaauauuacagaagaguuuuaccaaucuaccuguagcgcugucuccaaaggcuaucugucugcccucagaacagggugguacaccagcguuaucacaauugaacuguccaacaucaaggagaauaaaugcaacggaaccgacgccaaggugaaacuuaucaagcaggaacuggauaaguauaaaaaugcugugacggagcuccagcugcugaugcagucuaccccugccgcuaacaaucgggcccgcagagagcucccgcgguucaugaacuacacacugaauaacaccaagaauaacaaugucacacuuagcaaaaagcgcaaaagacgguuucugggcuuccuccugggggugggauccgcgauugccagcggcaucgcuguuucuaaggugcuucaccuggaaggggaggucaacaagauuaaaaaugcccuccuguccaccaacaaggcugugguuagccugucuaacggaguguccguccucacgagcaaagugcuggaccuuaagaauuauaucgauaaacaacugcuccccauugugaacaagcagucuuguuccaucagcaauauugaaacagucaucgaguuucagcagaaaaacaaucgccugcuugagaucaccagagaauuuuccguuaacgccggcgugacaaccccugugucuaccuacaugcugacaaauagcgagcuccugucccugauuaacgacaugcccaucacgaaugaucaaaagaagcucaugagcaacaauguccagauugugcggcagcagucuuauuccaucaugagcauuaucaaagaagagguucuggcguacgugguccaacuuccucuguacggcgugaucgacacccccugcuggaagcuccauacaucuccucuguguaccacaaacaccaaagaagggagcaauauuugccuuacgcgcacagauagaggaugguauugugacaacgccggcuccguuucuuucuucccgcaggcugagaccugcaaggugcagagcaaucgggucuuuugugauaccaugaacucccugacacuccccagcgaggugaaccugugcaauaucgacauuuucaacccuaaauacgauuguaagaucaugaccucuaagacagacgucuccagcucugugauuacgucccugggggccaucguuagcugcuauggaaaaaccaagugcacagcuuccaauaaaaaccgcggcaucauuaagaccuuuucuaaugggugugauuacgugagcaacaaaggagucgacacaguguccguuggcaauacccucuauuacgugaacaagcaagaaggcaagucucuguaugucaaaggggagcccaucauuaauuucuacgacccucuuguguuucccagcgaugaguucgacgccuccaucagccaggugaacgaaaagauuaaucagucucuggccuucaucagaaaauccgaugaacuccugcacaacguuaaugucggaaagagcacgaccaacauuaugaucacaaccaucauuaucgugauuaucgugauucugcuucuccugaucgcugucggccuguuucucuacugcaaagcgcggucuacaccggugacccuguccaaggaccagcuuagcgggaucaauaacauugccuucucuaacugaggacuaguaauaaggaaacuguaugaaugucugugggcaggaagugaagagauccuucuguaaagguuuuuggaauuaugucugcugaauaauaaacuuuuuugaaauaauaaaucugguagaaaaaugagaucuaaaaaaaaaaaaaaaaaaaaaaaaaaaaaaaaaaaaaaaaaaaaaaaaaaaaaaaaaaaaaaaaugcaucccccccccccccccccccccccccccccccaaaggcucuuuucagagccaccagaauu

SEQ ID NO: 11869 - RNA, 2078 nt, Artificial Sequence
  mRNA product Design d-2 comprising derived and/or modified sequence from HRSV(Memphis-37)__AIY60640.1__F0 (opt6)
gggagagcggcucggccauuuugucccagucaguccggaggcugcggcugcagaaguaccgccugcggaguaacugcaaagaagcuuaccauggaacugccuauucuaaaaacaaaugccauaacaacaauucuugcagcaguaacauuauguuuugcaucaucacaaaacauuacagaagaauuuuaccaauccacuugcucagccguaucaaaaggauaccuaucagccuuaagaacagguugguacaccucaguaauaaccauagaacuaucaaacauaaaagaaaacaaaugcaaugguacugaugcaaaagucaaacuaaucaaacaagaacuggacaaauacaaaaaugcaguaaccgaacuacaacuccuaaugcaauccacaccugcagccaacaacagagcaagacgcgaacuaccaagauuuaugaauuacacauuaaacaacaccaagaacaacaauguaacucucucaaaaaaaagaaaaagacgcuuucuagguuuccuccuaggcgucggaucugcaauagccucaggaauagcaguaucaaaaguucuacaccuagaaggagaaguaaacaaaauuaaaaacgcauuacuaucaaccaacaaagcaguuguaucccuuucaaauggagucucuguacuuacaucaaaaguacucgaccuaaaaaacuauauagacaaacaacuacucccaauagucaauaagcaaucaugcagcauaucaaacauagaaacaguuauagaauuucaacaaaaaaacaacagacuacucgaaauaaccagagaauuuagcgucaacgcaggcguaaccacaccgguauccacauacaugcuuacaaacucagaacuccucucacuaauaaacgacaugccaauaacuaaugaccaaaaaaaacuaaugucaaacaauguccaaauaguccgucaacaaucauacucaauaaugucaauaauaaaagaagaaguauuagcauauguaguccaacuaccauuauacggcguuauagacacaccuuguuggaaacuucacacauccccacucuguacaaccaacacaaaagaagguuccaauauaugccuaacuagaaccgacagaggaugguauugcgacaacgcaggaucuguaucauucuuuccccaagcagaaacauguaaaguacaaaguaaccgcguauucugcgacaccaugaacucauuaacccucccauccgaaguuaauuuaugcaauauagacauauuuaauccuaaauacgacugcaaaauaaugacaucaaaaacagacguuaguuccuccguaaucacaucuuugggcgcaauagucucaugcuauggaaaaacaaaaugcacagccucaaacaaaaauagaggaauaauaaaaacauucagcaacggcugugauuauguauccaacaaaggaguagacacaguauccguaggcaauacccuuuacuacguuaauaaacaagaaggaaaaucauuauacgucaaaggagaaccuaucauaaauuucuacgacccauuaguauucccuucagacgaauuugaugccucaauaucccaagucaaugaaaaaaucaaccaaucacuagccuuuauccgcaaaucagacgaauuacuacacaacguaaacguaggcaaaucaacaacuaauauaaugauaacaacaauaauaauaguaauuauaguaauauuauuacuacuaaucgccguagguuuauucuuauacuguaaagcacgaucaacaccaguuacacucucaaaagaucaacuaucaggaauaaacaacauagcauuuuccaauuaaggacuaguaauaaggaaacuguaugaaugucugugggcaggaagugaagagauccuucuguaaagguuuuuggaauuaugucugcugaauaauaaacuuuuuugaaauaauaaaucugguagaaaaaugagaucuaaaaaaaaaaaaaaaaaaaaaaaaaaaaaaaaaaaaaaaaaaaaaaaaaaaaaaaaaaaaaaaaugcaucccccccccccccccccccccccccccccccaaaggcucuuuucagagccaccagaauu

SEQ ID NO: 11870 - RNA, 2078 nt, Artificial Sequence
  mRNA product Design d-2 comprising derived and/or modified sequence from HRSV(Memphis-37)__AIY60640.1__F0 (opt11)
gggagagcggcucggccauuuugucccagucaguccggaggcugcggcugcagaaguaccgccugcggaguaacugcaaagaagcuuaccauggaacuccccauccucaaaacaaacgccauaaccacuauccucgccgccgucacccucugcuucgccuccucccaaaacaucacagaggaguucuaccaauccacaugcuccgccgucuccaaaggcuaccucagcgcccuacguaccggcugguacaccagcgucaucacaauagaacucuccaacaucaaggaaaacaaaugcaacggcaccgaugccaaaguaaaacucaucaaacaagaacucgauaaauacaaaaacgccgucaccgaacuacaacuccuaaugcaaagcacacccgccgccaacaacagagcacggcgcgaacugccccgcuucaugaacuacacccucaacaacaccaaaaauaacaacgucacccuauccaagaaacgcaaacgccgauuccucgguuuccuacucggcguaggaagcgccauagccucaggcaucgccgucuccaaaguccuccaucuggaaggcgaagucaacaaaaucaaaaacgcacucuuauccaccaacaaagccgucgucucccucucgaacggggucuccguccuuaccuccaaaguccucgaccuuaaaaacuacaucgacaaacaacuacuaccaauagucaauaaacaauccugcuccaucucaaacauagaaaccgucauagaguuccaacagaagaacaaucgccuccucgaaauaacucgcgaguucuccgucaacgcaggcgucacgaccccugucucaacauacaugcuaacuaacucagaacuccuaagccuaaucaacgacaugcccaucacaaacgaccaaaagaaacucaugagcaacaauguccagauagucagacagcaauccuauagcaucaugucuauaauaaaagaagaagugcucgccuacguaguccaacucccucuuuacggcgucauagacacacccugcuggaaacuccacacaucuccucucugcaccaccaacacaaaagaaggcagcaacaucugccugacccgaaccgaccgcggaugguacugcgacaacgcuggcuccgugucuuucuuuccccaagccgaaaccugcaaaguccaguccaaccgcgucuucugcgacacaaugaacucccucacccuacccuccgaaguuaaccucugcaacaucgacaucuucaauccaaaauacgacugcaaaaucaugaccucgaaaacggacguauccuccuccgucauaacaucacuuggagccaucguuagcugcuacggaaaaaccaaauguaccgccuccaacaaaaaccgcggaauaaucaaaacauucuccaacggcugcgacuacguaagcaacaaaggggucgauacugucuccguagguaacacccuauacuacgucaacaaacaagaaggaaaaucacuauacguuaaaggcgaacccauuaucaacuucuacgacccccucguuuucccauccgacgaguucgacgccuccauaagccaaguuaacgaaaagauaaaccaaucgcucgcauucauccgcaaauccgacgaacuccuacacaacgucaacgugggcaaauccacaacaaacaucaugaucaccaccaucauuaucgucauaauagucauccuccuccugcucaucgccgugggacuauuccuauacugcaaagcccgcucgacgcccgucacacuuuccaaagaccaacuaagcggaaucaacaacauagcguucagcaauuaaggacuaguaauaaggaaacuguaugaaugucugugggcaggaagugaagagauccuucuguaaagguuuuuggaauuaugucugcugaauaauaaacuuuuuugaaauaauaaaucugguagaaaaaugagaucuaaaaaaaaaaaaaaaaaaaaaaaaaaaaaaaaaaaaaaaaaaaaaaaaaaaaaaaaaaaaaaaaugcaucccccccccccccccccccccccccccccccaaaggcucuuuucagagccaccagaauu

SEQ ID NO: 11871 - RNA, 2394 nt, Artificial Sequence
  mRNA product Design d-3 comprising derived and/or modified sequence from HRSV(Memphis-37)__AIY60640.1__F0 (wt)
gggagagggcgcuuggcuugcaaggacccugagcugcggcauugaagcacacccaacccaacucgacugaagucagccucacugaaccggaucugagaaucuucucucucugggcuugccagggcucuccgaaccuagcuagcauccucuucaauuccaacuagaaagcuuaccauggaguugccaauccucaaaacaaaugcaauuaccacaauccuugcugcagucacacucuguuucgcuuccagucaaaacaucacugaagaauuuuaucaaucaacaugcagugcaguuagcaaaggcuaucuuagugcuuuaagaacugguugguauacuaguguuauaacuauagaauuaaguaauaucaaggaaaauaaguguaauggaacagaugcuaagguaaaauugauaaaacaagaauuagauaaauauaaaaaugcuguaacagaauugcaguugcucaugcaaagcacaccagcagccaacaaucgagccagaagagaacuaccaagguuuaugaauuauacacucaacaauaccaaaaauaacaauguaacauuaagcaagaaaaggaaaagaagauuucuuggcuuuuuguuagguguuggaucugcaaucgccaguggcauugcuguaucuaaaguccugcaccuagaaggggaagugaacaaaaucaaaaaugcucuacuauccacaaacaaggcuguagucagcuuaucaaauggaguuagugucuuaaccagcaaaguguuagaccucaaaaacuauauagauaaacaguuguuacccauugugaacaagcaaagcugcagcauaucaaacauugaaacugugauagaauuccaacaaaagaacaacagacuacuagagauuaccagggaauuuaguguuaaugcagguguaacuacaccuguaagcacuuauauguuaacaaauagugaauuauuaucauuaaucaaugauaugccuauaacaaaugaucagaaaaaguuaauguccaacaauguucaaauaguuagacagcaaaguuacucuaucauguccauaauaaaggaggaagucuuagcauauguaguucaauuaccacuauaugguguaauagauacaccuuguuggaaacuacacacauccccucuaugcacaaccaacacaaaggaaggguccaacaucuguuuaacaagaaccgacagaggaugguacugugacaaugcaggaucagugucuuucuucccacaagcugaaacaugcaaaguucaaucgaaucgaguauuuugugacacaaugaacagucuaacauuaccaagugaaguaaaucucugcaacauugacauauucaacccuaaauaugauugcaaaauuaugacuucaaaaacagaugugagcagcuccguuaucacaucucuaggagccauugugucaugcuauggcaaaacuaaauguacagcauccaauaaaaaucguggaaucauaaagacauuuucuaacgggugugauuauguaucaaauaaggggguggacacuguaucuguagguaauacauuauauuauguaaauaagcaagaaggaaaaagccucuauguaaaaggugaaccaauaauaaauuucuaugacccauuaguguucccuucugaugaauuugaugcaucaauaucucaagucaaugagaagauuaaccagagccuagcauuuauucguaaauccgaugaauuauuacauaauguaaauguugguaaauccaccacaaauaucaugauaacuacuauaauuauagugauuauaguaauauuguuauuauuaauugcaguugggcuguuccuauacugcaaggccagaagcacaccagucacacuaagcaaggaucaacugagugguauaaauaauauugcauuuaguaacugaggacuagugaagggaacacccaaauuuaauucagccuuaagcacaauuaauuaagagugaaacguaauuguacaagcaguuggucacccaccauagggcaugaucaacaccgcaaccuuuccuuuuucccccagugauucugaaaaaccccucuucccuucagcuugcuuagauguuccaaauuuaguaagcuuaaggcggccuacagaagaaaaagaaaaaaaaggccacaaaaguucccucucacuuucaguaaauaaaauaaaagcagcaacagaaauaaagaaauaaaugaaauucaaaaugaaauaaauauuguguugugcagcauuaaaaaaucaauaaaaauuaaaaaugagcaagaucuaaaaaaaaaaaaaaaaaaaaaaaaaaaaaaaaaaaaaaaaaaaaaaaaaaaaaaaaaaaaaaaaugcaucccccccccccccccccccccccccccccccaaaggcucuuuucagagccaccagaauu

SEQ ID NO: 11872 - RNA, 2394 nt, Artificial Sequence
  mRNA product Design d-3 comprising derived and/or modified sequence from HRSV(Memphis-37)__AIY60640.1__F0 (opt1)
gggagagggcgcuuggcuugcaaggacccugagcugcggcauugaagcacacccaacccaacucgacugaagucagccucacugaaccggaucugagaaucuucucucucugggcuugccagggcucuccgaaccuagcuagcauccucuucaauuccaacuagaaagcuuaccauggagcugcccauccucaagaccaacgccaucaccacgauccuggccgcggugacccugugcuucgccagcucccagaacaucaccgaggaguucuaccagagcacgugcuccgccgucagcaagggcuaccucuccgcccugcgcaccgggugguacaccagcgugaucaccaucgagcuguccaacaucaaggagaacaagugcaacggcaccgacgccaaggugaagcucaucaagcaggagcuggacaaguacaagaacgcggucacggagcugcagcuccugaugcagagcaccccggccgccaacaaccgggcccgccgggagcugccccgcuucaugaacuacacccucaacaacaccaagaacaacaacgugacgcuguccaagaagcggaagcgccgguuccugggguuccuccugggcguggggagcgcgaucgccuccggcaucgccgucagcaaggugcugcaccucgagggcgaggugaacaagaucaagaacgcccugcuguccaccaacaaggccgucgugagccucuccaacggggugagcguccugaccuccaaggugcuggaccucaagaacuacaucgacaagcagcugcugcccaucgugaacaagcagagcugcuccaucagcaacaucgagaccgucaucgaguuccagcagaagaacaaccgccuccuggagaucacgcgggaguucagcgugaacgcgggcgugaccacccccgucuccaccuacaugcugacgaacagcgagcuccugucccugaucaacgacaugccgaucaccaacgaccagaagaagcucaugagcaacaacgugcagaucgugcgccagcaguccuacagcaucauguccaucaucaaggaggagguccuggccuacguggugcagcugccccucuacggggucaucgacacccccugcuggaagcugcacaccagcccccugugcacgaccaacaccaaggagggcuccaacaucugccucacccggacggaccgcgggugguacugcgacaacgccggcagcguguccuucuucccgcaggccgagaccugcaagguccagagcaaccggguguucugcgacaccaugaacucccugacccugcccagcgaggugaaccucugcaacaucgacaucuucaaccccaaguacgacugcaagaucaugacguccaagaccgacgucagcuccagcgugaucaccucccugggcgccaucgugagcugcuacgggaagaccaagugcacggcgagcaacaagaaccgcggcaucaucaagaccuucuccaacgggugcgacuacgucagcaacaagggcguggacaccguguccgucggcaacacccuguacuacgugaacaagcaggagggcaagagccucuacgugaagggggagcccaucaucaacuucuacgacccgcuggucuuccccuccgacgaguucgacgccagcaucucccaggugaacgagaagaucaaccagagccuggccuucauccggaaguccgacgagcuccugcacaacgugaacgucggcaagagcaccacgaacaucaugaucaccaccaucaucaucgugaucaucgugauccugcugcuccugaucgccgucgggcuguuccucuacugcaaggcccgcuccacccccgugacgcugagcaaggaccagcuguccgggaucaacaacaucgcguucagcaacugaggacuagugaagggaacacccaaauuuaauucagccuuaagcacaauuaauuaagagugaaacguaauuguacaagcaguuggucacccaccauagggcaugaucaacaccgcaaccuuuccuuuuucccccagugauucugaaaaaccccucuucccuucagcuugcuuagauguuccaaauuuaguaagcuuaaggcggccuacagaagaaaaagaaaaaaaaggccacaaaaguucccucucacuuucaguaaauaaaauaaaagcagcaacagaaauaaagaaauaaaugaaauucaaaaugaaauaaauauuguguugugcagcauuaaaaaaucaauaaaaauuaaaaaugagcaagaucuaaaaaaaaaaaaaaaaaaaaaaaaaaaaaaaaaaaaaaaaaaaaaaaaaaaaaaaaaaaaaaaaugcaucccccccccccccccccccccccccccccccaaaggcucuuuucagagccaccagaauu

SEQ ID NO: 11873 - RNA, 2394 nt, Artificial Sequence
  mRNA product Design d-3 comprising derived and/or modified sequence from HRSV(Memphis-37)__AIY60640.1__F0 (opt2)
gggagagggcgcuuggcuugcaaggacccugagcugcggcauugaagcacacccaacccaacucgacugaagucagccucacugaaccggaucugagaaucuucucucucugggcuugccagggcucuccgaaccuagcuagcauccucuucaauuccaacuagaaagcuuaccauggagcuccccauccucaagaccaacgccaucaccaccauccucgccgccgucacccucugcuucgccuccucccagaacaucaccgaggaguucuaccaguccaccugcuccgccgucuccaagggcuaccucuccgcccuccgcaccggcugguacaccuccgucaucaccaucgagcucuccaacaucaaggagaacaagugcaacggcaccgacgccaaggucaagcucaucaagcaggagcucgacaaguacaagaacgccgucaccgagcuccagcuccucaugcaguccacccccgccgccaacaaccgcgcccgccgcgagcucccccgcuucaugaacuacacccucaacaacaccaagaacaacaacgucacccucuccaagaagcgcaagcgccgcuuccucggcuuccuccucggcgucggcuccgccaucgccuccggcaucgccgucuccaagguccuccaccucgagggcgaggucaacaagaucaagaacgcccuccucuccaccaacaaggccgucgucucccucuccaacggcgucuccguccucaccuccaagguccucgaccucaagaacuacaucgacaagcagcuccuccccaucgucaacaagcaguccugcuccaucuccaacaucgagaccgucaucgaguuccagcagaagaacaaccgccuccucgagaucacccgcgaguucuccgucaacgccggcgucaccacccccgucuccaccuacaugcucaccaacuccgagcuccucucccucaucaacgacaugcccaucaccaacgaccagaagaagcucauguccaacaacguccagaucguccgccagcaguccuacuccaucauguccaucaucaaggaggagguccucgccuacgucguccagcucccccucuacggcgucaucgacacccccugcuggaagcuccacaccuccccccucugcaccaccaacaccaaggagggcuccaacaucugccucacccgcaccgaccgcggcugguacugcgacaacgccggcuccgucuccuucuucccccaggccgagaccugcaagguccaguccaaccgcgucuucugcgacaccaugaacucccucacccuccccuccgaggucaaccucugcaacaucgacaucuucaaccccaaguacgacugcaagaucaugaccuccaagaccgacgucuccuccuccgucaucaccucccucggcgccaucgucuccugcuacggcaagaccaagugcaccgccuccaacaagaaccgcggcaucaucaagaccuucuccaacggcugcgacuacgucuccaacaagggcgucgacaccgucuccgucggcaacacccucuacuacgucaacaagcaggagggcaagucccucuacgucaagggcgagcccaucaucaacuucuacgacccccucgucuuccccuccgacgaguucgacgccuccaucucccaggucaacgagaagaucaaccagucccucgccuucauccgcaaguccgacgagcuccuccacaacgucaacgucggcaaguccaccaccaacaucaugaucaccaccaucaucaucgucaucaucgucauccuccuccuccucaucgccgucggccucuuccucuacugcaaggcccgcuccacccccgucacccucuccaaggaccagcucuccggcaucaacaacaucgccuucuccaacugaggacuagugaagggaacacccaaauuuaauucagccuuaagcacaauuaauuaagagugaaacguaauuguacaagcaguuggucacccaccauagggcaugaucaacaccgcaaccuuuccuuuuucccccagugauucugaaaaaccccucuucccuucagcuugcuuagauguuccaaauuuaguaagcuuaaggcggccuacagaagaaaaagaaaaaaaaggccacaaaaguucccucucacuuucaguaaauaaaauaaaagcagcaacagaaauaaagaaauaaaugaaauucaaaaugaaauaaauauuguguugugcagcauuaaaaaaucaauaaaaauuaaaaaugagcaagaucuaaaaaaaaaaaaaaaaaaaaaaaaaaaaaaaaaaaaaaaaaaaaaaaaaaaaaaaaaaaaaaaaugcaucccccccccccccccccccccccccccccccaaaggcucuuuucagagccaccagaauu

SEQ ID NO: 11874 - RNA, 2394 nt, Artificial Sequence
  mRNA product Design d-3 comprising derived and/or modified sequence from HRSV(Memphis-37)__AIY60640.1__F0 (opt3)
gggagagggcgcuuggcuugcaaggacccugagcugcggcauugaagcacacccaacccaacucgacugaagucagccucacugaaccggaucugagaaucuucucucucugggcuugccagggcucuccgaaccuagcuagcauccucuucaauuccaacuagaaagcuuaccauggagcugcccauccucaagaccaacgccauuacaacuauacuugcugcagugacgcugugcuucgccagcucccagaauaucaccgaagaguuuuaccaaucuacauguucagcggucaguaaaggcuauuugagcgcuuuaagaacugggugguacaccuccguuauuacaaucgaacugucuaacauuaaggagaauaaaugcaacggaaccgacgccaaggugaaacuaaucaagcaggaacucgauaaguauaaaaaugcaguaacugagcugcagcuucugaugcagucgaccccugccgcuaacaauagggcacggcgcgaguugccacgauucaugaacuacacacucaauaacacgaagaauaacaaugugacucugagcaaaaagcguaaaagaagguuucuggguuuccucuuaggcgucgggucagccauagcuaguggaaucgccguguccaagguucugcaccuugaaggcgaggugaacaagauuaaaaaugcguugcugucuaccaacaaggcagucgugagccuauccaacgguguaucaguucucacaaguaaagugcuggaccuuaagaauuauaucgauaaacaacuguugccgauugucaacaagcagagcuguucuaucuccaauauagaaacugugauugaguuucagcagaaaaacaaucggcuccuggagaucacccgcgaguucucagugaacgccggggucacaacccccguuagcacguacauguuaacuaauagugaacugcucucucuuauuaacgacaugccuaucacaaaugaucaaaagaagcugauguccaacaaugugcagaucguaagacagcagagcuauucgauuaugucuauaaucaaagaagagguguuggcuuacgucgugcaacuaccacuguacggaguuauugacacccccugcuggaagcuccauacuuccccucuguguacaaccaacacgaaagaaggcucaaauaucugccuuaccaggacagaucggggcugguauugugacaacgccgggagugugagcuuuuucccacaggcagagacuugcaagguccaguccaaucgcguguuuugugauaccaugaacucucugacauugcccagcgagguaaaccucugcaauauagacauuuucaacccuaaauacgauuguaagaucaugacuucaaagaccgacguuaguuccagcgugaucacaucucugggagcuauugucucaugcuaugguaaaaccaagugcacugccaguaauaaaaaccgaggcaucauuaagacguuuagcaaugggugugauuacguguccaacaaaggagucgacacagugucuguuggcaauaccuuauauuacgugaacaagcaagaagguaagucgcuguauguaaaaggggagccaauaaucaauuucuacgacccgcuagucuuucccagcgaugaguucgacgcguccauuucacaggugaacgaaaagaucaaucagagucucgccuucaucagaaaaucugaugaacugcuucacaacguuaaugugggaaagagcacuaccaacauuaugauaacaaccaucauuaucgucauuaucgugauauugcugcuccugaucgcaguaggccuuuuucuguacugcaaagcuagguccacuccugugacauugucaaaggaccagcucagcggcauuaauaacaucgccuucucuaacugaggacuagugaagggaacacccaaauuuaauucagccuuaagcacaauuaauuaagagugaaacguaauuguacaagcaguuggucacccaccauagggcaugaucaacaccgcaaccuuuccuuuuucccccagugauucugaaaaaccccucuucccuucagcuugcuuagauguuccaaauuuaguaagcuuaaggcggccuacagaagaaaaagaaaaaaaaggccacaaaaguucccucucacuuucaguaaauaaaauaaaagcagcaacagaaauaaagaaauaaaugaaauucaaaaugaaauaaauauuguguugugcagcauuaaaaaaucaauaaaaauuaaaaaugagcaagaucuaaaaaaaaaaaaaaaaaaaaaaaaaaaaaaaaaaaaaaaaaaaaaaaaaaaaaaaaaaaaaaaaugcaucccccccccccccccccccccccccccccccaaaggcucuuuucagagccaccagaauu

SEQ ID NO: 11875 - RNA, 2394 nt, Artificial Sequence
  mRNA product Design d-3 comprising derived and/or modified sequence from HRSV(Memphis-37)__AIY60640.1__F0 (opt4)
gggagagggcgcuuggcuugcaaggacccugagcugcggcauugaagcacacccaacccaacucgacugaagucagccucacugaaccggaucugagaaucuucucucucugggcuugccagggcucuccgaaccuagcuagcauccucuucaauuccaacuagaaagcuuaccauggagcugcccauccugaagaccaacgccaucaccaccauccuggccgccgugacccugugcuucgccagcagccagaacaucaccgaggaguucuaccagagcaccugcagcgccgugagcaagggcuaccugagcgcccugagaaccggcugguacaccagcgugaucaccaucgagcugagcaacaucaaggagaacaagugcaacggcaccgacgccaaggugaagcugaucaagcaggagcuggacaaguacaagaacgccgugaccgagcugcagcugcugaugcagagcacccccgccgccaacaacagagccagaagagagcugcccagauucaugaacuacacccugaacaacaccaagaacaacaacgugacccugagcaagaagagaaagagaagauuccugggcuuccugcugggcgugggcagcgccaucgccagcggcaucgccgugagcaaggugcugcaccuggagggcgaggugaacaagaucaagaacgcccugcugagcaccaacaaggccguggugagccugagcaacggcgugagcgugcugaccagcaaggugcuggaccugaagaacuacaucgacaagcagcugcugcccaucgugaacaagcagagcugcagcaucagcaacaucgagaccgugaucgaguuccagcagaagaacaacagacugcuggagaucaccagagaguucagcgugaacgccggcgugaccacccccgugagcaccuacaugcugaccaacagcgagcugcugagccugaucaacgacaugcccaucaccaacgaccagaagaagcugaugagcaacaacgugcagaucgugagacagcagagcuacagcaucaugagcaucaucaaggaggaggugcuggccuacguggugcagcugccccuguacggcgugaucgacacccccugcuggaagcugcacaccagcccccugugcaccaccaacaccaaggagggcagcaacaucugccugaccagaaccgacagaggcugguacugcgacaacgccggcagcgugagcuucuucccccaggccgagaccugcaaggugcagagcaacagaguguucugcgacaccaugaacagccugacccugcccagcgaggugaaccugugcaacaucgacaucuucaaccccaaguacgacugcaagaucaugaccagcaagaccgacgugagcagcagcgugaucaccagccugggcgccaucgugagcugcuacggcaagaccaagugcaccgccagcaacaagaacagaggcaucaucaagaccuucagcaacggcugcgacuacgugagcaacaagggcguggacaccgugagcgugggcaacacccuguacuacgugaacaagcaggagggcaagagccuguacgugaagggcgagcccaucaucaacuucuacgacccccugguguuccccagcgacgaguucgacgccagcaucagccaggugaacgagaagaucaaccagagccuggccuucaucagaaagagcgacgagcugcugcacaacgugaacgugggcaagagcaccaccaacaucaugaucaccaccaucaucaucgugaucaucgugauccugcugcugcugaucgccgugggccuguuccuguacugcaaggccagaagcacccccgugacccugagcaaggaccagcugagcggcaucaacaacaucgccuucagcaacugaggacuagugaagggaacacccaaauuuaauucagccuuaagcacaauuaauuaagagugaaacguaauuguacaagcaguuggucacccaccauagggcaugaucaacaccgcaaccuuuccuuuuucccccagugauucugaaaaaccccucuucccuucagcuugcuuagauguuccaaauuuaguaagcuuaaggcggccuacagaagaaaaagaaaaaaaaggccacaaaaguucccucucacuuucaguaaauaaaauaaaagcagcaacagaaauaaagaaauaaaugaaauucaaaaugaaauaaauauuguguugugcagcauuaaaaaaucaauaaaaauuaaaaaugagcaagaucuaaaaaaaaaaaaaaaaaaaaaaaaaaaaaaaaaaaaaaaaaaaaaaaaaaaaaaaaaaaaaaaaugcaucccccccccccccccccccccccccccccccaaaggcucuuuucagagccaccagaauu

SEQ ID NO: 11876 - RNA, 2394 nt, Artificial Sequence
  mRNA product Design d-3 comprising derived and/or modified sequence from HRSV(Memphis-37)__AIY60640.1__F0 (opt5)
gggagagggcgcuuggcuugcaaggacccugagcugcggcauugaagcacacccaacccaacucgacugaagucagccucacugaaccggaucugagaaucuucucucucugggcuugccagggcucuccgaaccuagcuagcauccucuucaauuccaacuagaaagcuuaccauggagcugcccauccucaagaccaacgccauuacaacgauccuggcugccgugacccuuugcuucgcgagcucccagaauauuacagaagaguuuuaccaaucuaccuguagcgcugucuccaaaggcuaucugucugcccucagaacagggugguacaccagcguuaucacaauugaacuguccaacaucaaggagaauaaaugcaacggaaccgacgccaaggugaaacuuaucaagcaggaacuggauaaguauaaaaaugcugugacggagcuccagcugcugaugcagucuaccccugccgcuaacaaucgggcccgcagagagcucccgcgguucaugaacuacacacugaauaacaccaagaauaacaaugucacacuuagcaaaaagcgcaaaagacgguuucugggcuuccuccugggggugggauccgcgauugccagcggcaucgcuguuucuaaggugcuucaccuggaaggggaggucaacaagauuaaaaaugcccuccuguccaccaacaaggcugugguuagccugucuaacggaguguccguccucacgagcaaagugcuggaccuuaagaauuauaucgauaaacaacugcuccccauugugaacaagcagucuuguuccaucagcaauauugaaacagucaucgaguuucagcagaaaaacaaucgccugcuugagaucaccagagaauuuuccguuaacgccggcgugacaaccccugugucuaccuacaugcugacaaauagcgagcuccugucccugauuaacgacaugcccaucacgaaugaucaaaagaagcucaugagcaacaauguccagauugugcggcagcagucuuauuccaucaugagcauuaucaaagaagagguucuggcguacgugguccaacuuccucuguacggcgugaucgacacccccugcuggaagcuccauacaucuccucuguguaccacaaacaccaaagaagggagcaauauuugccuuacgcgcacagauagaggaugguauugugacaacgccggcuccguuucuuucuucccgcaggcugagaccugcaaggugcagagcaaucgggucuuuugugauaccaugaacucccugacacuccccagcgaggugaaccugugcaauaucgacauuuucaacccuaaauacgauuguaagaucaugaccucuaagacagacgucuccagcucugugauuacgucccugggggccaucguuagcugcuauggaaaaaccaagugcacagcuuccaauaaaaaccgcggcaucauuaagaccuuuucuaaugggugugauuacgugagcaacaaaggagucgacacaguguccguuggcaauacccucuauuacgugaacaagcaagaaggcaagucucuguaugucaaaggggagcccaucauuaauuucuacgacccucuuguguuucccagcgaugaguucgacgccuccaucagccaggugaacgaaaagauuaaucagucucuggccuucaucagaaaauccgaugaacuccugcacaacguuaaugucggaaagagcacgaccaacauuaugaucacaaccaucauuaucgugauuaucgugauucugcuucuccugaucgcugucggccuguuucucuacugcaaagcgcggucuacaccggugacccuguccaaggaccagcuuagcgggaucaauaacauugccuucucuaacugaggacuagugaagggaacacccaaauuuaauucagccuuaagcacaauuaauuaagagugaaacguaauuguacaagcaguuggucacccaccauagggcaugaucaacaccgcaaccuuuccuuuuucccccagugauucugaaaaaccccucuucccuucagcuugcuuagauguuccaaauuuaguaagcuuaaggcggccuacagaagaaaaagaaaaaaaaggccacaaaaguucccucucacuuucaguaaauaaaauaaaagcagcaacagaaauaaagaaauaaaugaaauucaaaaugaaauaaauauuguguugugcagcauuaaaaaaucaauaaaaauuaaaaaugagcaagaucuaaaaaaaaaaaaaaaaaaaaaaaaaaaaaaaaaaaaaaaaaaaaaaaaaaaaaaaaaaaaaaaaugcaucccccccccccccccccccccccccccccccaaaggcucuuuucagagccaccagaauu

SEQ ID NO: 11877 - RNA, 2394 nt, Artificial Sequence
  mRNA product Design d-3 comprising derived and/or modified sequence from HRSV(Memphis-37)__AIY60640.1__F0 (opt6)
gggagagggcgcuuggcuugcaaggacccugagcugcggcauugaagcacacccaacccaacucgacugaagucagccucacugaaccggaucugagaaucuucucucucugggcuugccagggcucuccgaaccuagcuagcauccucuucaauuccaacuagaaagcuuaccauggaacugccuauucuaaaaacaaaugccauaacaacaauucuugcagcaguaacauuauguuuugcaucaucacaaaacauuacagaagaauuuuaccaauccacuugcucagccguaucaaaaggauaccuaucagccuuaagaacagguugguacaccucaguaauaaccauagaacuaucaaacauaaaagaaaacaaaugcaaugguacugaugcaaaagucaaacuaaucaaacaagaacuggacaaauacaaaaaugcaguaaccgaacuacaacuccuaaugcaauccacaccugcagccaacaacagagcaagacgcgaacuaccaagauuuaugaauuacacauuaaacaacaccaagaacaacaauguaacucucucaaaaaaaagaaaaagacgcuuucuagguuuccuccuaggcgucggaucugcaauagccucaggaauagcaguaucaaaaguucuacaccuagaaggagaaguaaacaaaauuaaaaacgcauuacuaucaaccaacaaagcaguuguaucccuuucaaauggagucucuguacuuacaucaaaaguacucgaccuaaaaaacuauauagacaaacaacuacucccaauagucaauaagcaaucaugcagcauaucaaacauagaaacaguuauagaauuucaacaaaaaaacaacagacuacucgaaauaaccagagaauuuagcgucaacgcaggcguaaccacaccgguauccacauacaugcuuacaaacucagaacuccucucacuaauaaacgacaugccaauaacuaaugaccaaaaaaaacuaaugucaaacaauguccaaauaguccgucaacaaucauacucaauaaugucaauaauaaaagaagaaguauuagcauauguaguccaacuaccauuauacggcguuauagacacaccuuguuggaaacuucacacauccccacucuguacaaccaacacaaaagaagguuccaauauaugccuaacuagaaccgacagaggaugguauugcgacaacgcaggaucuguaucauucuuuccccaagcagaaacauguaaaguacaaaguaaccgcguauucugcgacaccaugaacucauuaacccucccauccgaaguuaauuuaugcaauauagacauauuuaauccuaaauacgacugcaaaauaaugacaucaaaaacagacguuaguuccuccguaaucacaucuuugggcgcaauagucucaugcuauggaaaaacaaaaugcacagccucaaacaaaaauagaggaauaauaaaaacauucagcaacggcugugauuauguauccaacaaaggaguagacacaguauccguaggcaauacccuuuacuacguuaauaaacaagaaggaaaaucauuauacgucaaaggagaaccuaucauaaauuucuacgacccauuaguauucccuucagacgaauuugaugccucaauaucccaagucaaugaaaaaaucaaccaaucacuagccuuuauccgcaaaucagacgaauuacuacacaacguaaacguaggcaaaucaacaacuaauauaaugauaacaacaauaauaauaguaauuauaguaauauuauuacuacuaaucgccguagguuuauucuuauacuguaaagcacgaucaacaccaguuacacucucaaaagaucaacuaucaggaauaaacaacauagcauuuuccaauuaaggacuagugaagggaacacccaaauuuaauucagccuuaagcacaauuaauuaagagugaaacguaauuguacaagcaguuggucacccaccauagggcaugaucaacaccgcaaccuuuccuuuuucccccagugauucugaaaaaccccucuucccuucagcuugcuuagauguuccaaauuuaguaagcuuaaggcggccuacagaagaaaaagaaaaaaaaggccacaaaaguucccucucacuuucaguaaauaaaauaaaagcagcaacagaaauaaagaaauaaaugaaauucaaaaugaaauaaauauuguguugugcagcauuaaaaaaucaauaaaaauuaaaaaugagcaagaucuaaaaaaaaaaaaaaaaaaaaaaaaaaaaaaaaaaaaaaaaaaaaaaaaaaaaaaaaaaaaaaaaugcaucccccccccccccccccccccccccccccccaaaggcucuuuucagagccaccagaauu

SEQ ID NO: 11878 - RNA, 2394 nt, Artificial Sequence
  mRNA product Design d-3 comprising derived and/or modified sequence from HRSV(Memphis-37)__AIY60640.1__F0 (opt11)
gggagagggcgcuuggcuugcaaggacccugagcugcggcauugaagcacacccaacccaacucgacugaagucagccucacugaaccggaucugagaaucuucucucucugggcuugccagggcucuccgaaccuagcuagcauccucuucaauuccaacuagaaagcuuaccauggaacuccccauccucaaaacaaacgccauaaccacuauccucgccgccgucacccucugcuucgccuccucccaaaacaucacagaggaguucuaccaauccacaugcuccgccgucuccaaaggcuaccucagcgcccuacguaccggcugguacaccagcgucaucacaauagaacucuccaacaucaaggaaaacaaaugcaacggcaccgaugccaaaguaaaacucaucaaacaagaacucgauaaauacaaaaacgccgucaccgaacuacaacuccuaaugcaaagcacacccgccgccaacaacagagcacggcgcgaacugccccgcuucaugaacuacacccucaacaacaccaaaaauaacaacgucacccuauccaagaaacgcaaacgccgauuccucgguuuccuacucggcguaggaagcgccauagccucaggcaucgccgucuccaaaguccuccaucuggaaggcgaagucaacaaaaucaaaaacgcacucuuauccaccaacaaagccgucgucucccucucgaacggggucuccguccuuaccuccaaaguccucgaccuuaaaaacuacaucgacaaacaacuacuaccaauagucaauaaacaauccugcuccaucucaaacauagaaaccgucauagaguuccaacagaagaacaaucgccuccucgaaauaacucgcgaguucuccgucaacgcaggcgucacgaccccugucucaacauacaugcuaacuaacucagaacuccuaagccuaaucaacgacaugcccaucacaaacgaccaaaagaaacucaugagcaacaauguccagauagucagacagcaauccuauagcaucaugucuauaauaaaagaagaagugcucgccuacguaguccaacucccucuuuacggcgucauagacacacccugcuggaaacuccacacaucuccucucugcaccaccaacacaaaagaaggcagcaacaucugccugacccgaaccgaccgcggaugguacugcgacaacgcuggcuccgugucuuucuuuccccaagccgaaaccugcaaaguccaguccaaccgcgucuucugcgacacaaugaacucccucacccuacccuccgaaguuaaccucugcaacaucgacaucuucaauccaaaauacgacugcaaaaucaugaccucgaaaacggacguauccuccuccgucauaacaucacuuggagccaucguuagcugcuacggaaaaaccaaauguaccgccuccaacaaaaaccgcggaauaaucaaaacauucuccaacggcugcgacuacguaagcaacaaaggggucgauacugucuccguagguaacacccuauacuacgucaacaaacaagaaggaaaaucacuauacguuaaaggcgaacccauuaucaacuucuacgacccccucguuuucccauccgacgaguucgacgccuccauaagccaaguuaacgaaaagauaaaccaaucgcucgcauucauccgcaaauccgacgaacuccuacacaacgucaacgugggcaaauccacaacaaacaucaugaucaccaccaucauuaucgucauaauagucauccuccuccugcucaucgccgugggacuauuccuauacugcaaagcccgcucgacgcccgucacacuuuccaaagaccaacuaagcggaaucaacaacauagcguucagcaauuaaggacuagugaagggaacacccaaauuuaauucagccuuaagcacaauuaauuaagagugaaacguaauuguacaagcaguuggucacccaccauagggcaugaucaacaccgcaaccuuuccuuuuucccccagugauucugaaaaaccccucuucccuucagcuugcuuagauguuccaaauuuaguaagcuuaaggcggccuacagaagaaaaagaaaaaaaaggccacaaaaguucccucucacuuucaguaaauaaaauaaaagcagcaacagaaauaaagaaauaaaugaaauucaaaaugaaauaaauauuguguugugcagcauuaaaaaaucaauaaaaauuaaaaaugagcaagaucuaaaaaaaaaaaaaaaaaaaaaaaaaaaaaaaaaaaaaaaaaaaaaaaaaaaaaaaaaaaaaaaaugcaucccccccccccccccccccccccccccccccaaaggcucuuuucagagccaccagaauu

SEQ ID NO: 11879 - RNA, 2077 nt, Artificial Sequence
  mRNA product Design d-4 comprising derived and/or modified sequence from HRSV(Memphis-37)__AIY60640.1__F0 (wt)
gggagagucccgcagucggcguccagcggcucugcuuguucgugugugugucguugcaggccuuauucaagcuuaccauggaguugccaauccucaaaacaaaugcaauuaccacaauccuugcugcagucacacucuguuucgcuuccagucaaaacaucacugaagaauuuuaucaaucaacaugcagugcaguuagcaaaggcuaucuuagugcuuuaagaacugguugguauacuaguguuauaacuauagaauuaaguaauaucaaggaaaauaaguguaauggaacagaugcuaagguaaaauugauaaaacaagaauuagauaaauauaaaaaugcuguaacagaauugcaguugcucaugcaaagcacaccagcagccaacaaucgagccagaagagaacuaccaagguuuaugaauuauacacucaacaauaccaaaaauaacaauguaacauuaagcaagaaaaggaaaagaagauuucuuggcuuuuuguuagguguuggaucugcaaucgccaguggcauugcuguaucuaaaguccugcaccuagaaggggaagugaacaaaaucaaaaaugcucuacuauccacaaacaaggcuguagucagcuuaucaaauggaguuagugucuuaaccagcaaaguguuagaccucaaaaacuauauagauaaacaguuguuacccauugugaacaagcaaagcugcagcauaucaaacauugaaacugugauagaauuccaacaaaagaacaacagacuacuagagauuaccagggaauuuaguguuaaugcagguguaacuacaccuguaagcacuuauauguuaacaaauagugaauuauuaucauuaaucaaugauaugccuauaacaaaugaucagaaaaaguuaauguccaacaauguucaaauaguuagacagcaaaguuacucuaucauguccauaauaaaggaggaagucuuagcauauguaguucaauuaccacuauaugguguaauagauacaccuuguuggaaacuacacacauccccucuaugcacaaccaacacaaaggaaggguccaacaucuguuuaacaagaaccgacagaggaugguacugugacaaugcaggaucagugucuuucuucccacaagcugaaacaugcaaaguucaaucgaaucgaguauuuugugacacaaugaacagucuaacauuaccaagugaaguaaaucucugcaacauugacauauucaacccuaaauaugauugcaaaauuaugacuucaaaaacagaugugagcagcuccguuaucacaucucuaggagccauugugucaugcuauggcaaaacuaaauguacagcauccaauaaaaaucguggaaucauaaagacauuuucuaacgggugugauuauguaucaaauaaggggguggacacuguaucuguagguaauacauuauauuauguaaauaagcaagaaggaaaaagccucuauguaaaaggugaaccaauaauaaauuucuaugacccauuaguguucccuucugaugaauuugaugcaucaauaucucaagucaaugagaagauuaaccagagccuagcauuuauucguaaauccgaugaauuauuacauaauguaaauguugguaaauccaccacaaauaucaugauaacuacuauaauuauagugauuauaguaauauuguuauuauuaauugcaguugggcuguuccuauacugcaaggccagaagcacaccagucacacuaagcaaggaucaacugagugguauaaauaauauugcauuuaguaacugaggacuaguggaagcauuuuccuggcugauuaaaagaaauuacucagcuauggucaucuguuccuguuagaaggcuaugcagcauauuauauacuaugcgcauguuaugaaaugcauaauaaaaaauuuuaaaaaaucuaaaagaucuaaaaaaaaaaaaaaaaaaaaaaaaaaaaaaaaaaaaaaaaaaaaaaaaaaaaaaaaaaaaaaaaugcaucccccccccccccccccccccccccccccccaaaggcucuuuucagagccaccagaauu

SEQ ID NO: 11880 - RNA, 2077 nt, Artificial Sequence
  mRNA product Design d-4 comprising derived and/or modified sequence from HRSV(Memphis-37)__AIY60640.1__F0 (opt1)
gggagagucccgcagucggcguccagcggcucugcuuguucgugugugugucguugcaggccuuauucaagcuuaccauggagcugcccauccucaagaccaacgccaucaccacgauccuggccgcggugacccugugcuucgccagcucccagaacaucaccgaggaguucuaccagagcacgugcuccgccgucagcaagggcuaccucuccgcccugcgcaccgggugguacaccagcgugaucaccaucgagcuguccaacaucaaggagaacaagugcaacggcaccgacgccaaggugaagcucaucaagcaggagcuggacaaguacaagaacgcggucacggagcugcagcuccugaugcagagcaccccggccgccaacaaccgggcccgccgggagcugccccgcuucaugaacuacacccucaacaacaccaagaacaacaacgugacgcuguccaagaagcggaagcgccgguuccugggguuccuccugggcguggggagcgcgaucgccuccggcaucgccgucagcaaggugcugcaccucgagggcgaggugaacaagaucaagaacgcccugcuguccaccaacaaggccgucgugagccucuccaacggggugagcguccugaccuccaaggugcuggaccucaagaacuacaucgacaagcagcugcugcccaucgugaacaagcagagcugcuccaucagcaacaucgagaccgucaucgaguuccagcagaagaacaaccgccuccuggagaucacgcgggaguucagcgugaacgcgggcgugaccacccccgucuccaccuacaugcugacgaacagcgagcuccugucccugaucaacgacaugccgaucaccaacgaccagaagaagcucaugagcaacaacgugcagaucgugcgccagcaguccuacagcaucauguccaucaucaaggaggagguccuggccuacguggugcagcugccccucuacggggucaucgacacccccugcuggaagcugcacaccagcccccugugcacgaccaacaccaaggagggcuccaacaucugccucacccggacggaccgcgggugguacugcgacaacgccggcagcguguccuucuucccgcaggccgagaccugcaagguccagagcaaccggguguucugcgacaccaugaacucccugacccugcccagcgaggugaaccucugcaacaucgacaucuucaaccccaaguacgacugcaagaucaugacguccaagaccgacgucagcuccagcgugaucaccucccugggcgccaucgugagcugcuacgggaagaccaagugcacggcgagcaacaagaaccgcggcaucaucaagaccuucuccaacgggugcgacuacgucagcaacaagggcguggacaccguguccgucggcaacacccuguacuacgugaacaagcaggagggcaagagccucuacgugaagggggagcccaucaucaacuucuacgacccgcuggucuuccccuccgacgaguucgacgccagcaucucccaggugaacgagaagaucaaccagagccuggccuucauccggaaguccgacgagcuccugcacaacgugaacgucggcaagagcaccacgaacaucaugaucaccaccaucaucaucgugaucaucgugauccugcugcuccugaucgccgucgggcuguuccucuacugcaaggcccgcuccacccccgugacgcugagcaaggaccagcuguccgggaucaacaacaucgcguucagcaacugaggacuaguggaagcauuuuccuggcugauuaaaagaaauuacucagcuauggucaucuguuccuguuagaaggcuaugcagcauauuauauacuaugcgcauguuaugaaaugcauaauaaaaaauuuuaaaaaaucuaaaagaucuaaaaaaaaaaaaaaaaaaaaaaaaaaaaaaaaaaaaaaaaaaaaaaaaaaaaaaaaaaaaaaaaugcaucccccccccccccccccccccccccccccccaaaggcucuuuucagagccaccagaauu

SEQ ID NO: 11881 - RNA, 2077 nt, Artificial Sequence
  mRNA product Design d-4 comprising derived and/or modified sequence from HRSV(Memphis-37)__AIY60640.1__F0 (opt2)
gggagagucccgcagucggcguccagcggcucugcuuguucgugugugugucguugcaggccuuauucaagcuuaccauggagcuccccauccucaagaccaacgccaucaccaccauccucgccgccgucacccucugcuucgccuccucccagaacaucaccgaggaguucuaccaguccaccugcuccgccgucuccaagggcuaccucuccgcccuccgcaccggcugguacaccuccgucaucaccaucgagcucuccaacaucaaggagaacaagugcaacggcaccgacgccaaggucaagcucaucaagcaggagcucgacaaguacaagaacgccgucaccgagcuccagcuccucaugcaguccacccccgccgccaacaaccgcgcccgccgcgagcucccccgcuucaugaacuacacccucaacaacaccaagaacaacaacgucacccucuccaagaagcgcaagcgccgcuuccucggcuuccuccucggcgucggcuccgccaucgccuccggcaucgccgucuccaagguccuccaccucgagggcgaggucaacaagaucaagaacgcccuccucuccaccaacaaggccgucgucucccucuccaacggcgucuccguccucaccuccaagguccucgaccucaagaacuacaucgacaagcagcuccuccccaucgucaacaagcaguccugcuccaucuccaacaucgagaccgucaucgaguuccagcagaagaacaaccgccuccucgagaucacccgcgaguucuccgucaacgccggcgucaccacccccgucuccaccuacaugcucaccaacuccgagcuccucucccucaucaacgacaugcccaucaccaacgaccagaagaagcucauguccaacaacguccagaucguccgccagcaguccuacuccaucauguccaucaucaaggaggagguccucgccuacgucguccagcucccccucuacggcgucaucgacacccccugcuggaagcuccacaccuccccccucugcaccaccaacaccaaggagggcuccaacaucugccucacccgcaccgaccgcggcugguacugcgacaacgccggcuccgucuccuucuucccccaggccgagaccugcaagguccaguccaaccgcgucuucugcgacaccaugaacucccucacccuccccuccgaggucaaccucugcaacaucgacaucuucaaccccaaguacgacugcaagaucaugaccuccaagaccgacgucuccuccuccgucaucaccucccucggcgccaucgucuccugcuacggcaagaccaagugcaccgccuccaacaagaaccgcggcaucaucaagaccuucuccaacggcugcgacuacgucuccaacaagggcgucgacaccgucuccgucggcaacacccucuacuacgucaacaagcaggagggcaagucccucuacgucaagggcgagcccaucaucaacuucuacgacccccucgucuuccccuccgacgaguucgacgccuccaucucccaggucaacgagaagaucaaccagucccucgccuucauccgcaaguccgacgagcuccuccacaacgucaacgucggcaaguccaccaccaacaucaugaucaccaccaucaucaucgucaucaucgucauccuccuccuccucaucgccgucggccucuuccucuacugcaaggcccgcuccacccccgucacccucuccaaggaccagcucuccggcaucaacaacaucgccuucuccaacugaggacuaguggaagcauuuuccuggcugauuaaaagaaauuacucagcuauggucaucuguuccuguuagaaggcuaugcagcauauuauauacuaugcgcauguuaugaaaugcauaauaaaaaauuuuaaaaaaucuaaaagaucuaaaaaaaaaaaaaaaaaaaaaaaaaaaaaaaaaaaaaaaaaaaaaaaaaaaaaaaaaaaaaaaaugcaucccccccccccccccccccccccccccccccaaaggcucuuuucagagccaccagaauu

SEQ ID NO: 11882 - RNA, 2077 nt, Artificial Sequence
  mRNA product Design d-4 comprising derived and/or modified sequence from HRSV(Memphis-37)__AIY60640.1__F0 (opt3)
gggagagucccgcagucggcguccagcggcucugcuuguucgugugugugucguugcaggccuuauucaagcuuaccauggagcugcccauccucaagaccaacgccauuacaacuauacuugcugcagugacgcugugcuucgccagcucccagaauaucaccgaagaguuuuaccaaucuacauguucagcggucaguaaaggcuauuugagcgcuuuaagaacugggugguacaccuccguuauuacaaucgaacugucuaacauuaaggagaauaaaugcaacggaaccgacgccaaggugaaacuaaucaagcaggaacucgauaaguauaaaaaugcaguaacugagcugcagcuucugaugcagucgaccccugccgcuaacaauagggcacggcgcgaguugccacgauucaugaacuacacacucaauaacacgaagaauaacaaugugacucugagcaaaaagcguaaaagaagguuucuggguuuccucuuaggcgucgggucagccauagcuaguggaaucgccguguccaagguucugcaccuugaaggcgaggugaacaagauuaaaaaugcguugcugucuaccaacaaggcagucgugagccuauccaacgguguaucaguucucacaaguaaagugcuggaccuuaagaauuauaucgauaaacaacuguugccgauugucaacaagcagagcuguucuaucuccaauauagaaacugugauugaguuucagcagaaaaacaaucggcuccuggagaucacccgcgaguucucagugaacgccggggucacaacccccguuagcacguacauguuaacuaauagugaacugcucucucuuauuaacgacaugccuaucacaaaugaucaaaagaagcugauguccaacaaugugcagaucguaagacagcagagcuauucgauuaugucuauaaucaaagaagagguguuggcuuacgucgugcaacuaccacuguacggaguuauugacacccccugcuggaagcuccauacuuccccucuguguacaaccaacacgaaagaaggcucaaauaucugccuuaccaggacagaucggggcugguauugugacaacgccgggagugugagcuuuuucccacaggcagagacuugcaagguccaguccaaucgcguguuuugugauaccaugaacucucugacauugcccagcgagguaaaccucugcaauauagacauuuucaacccuaaauacgauuguaagaucaugacuucaaagaccgacguuaguuccagcgugaucacaucucugggagcuauugucucaugcuaugguaaaaccaagugcacugccaguaauaaaaaccgaggcaucauuaagacguuuagcaaugggugugauuacguguccaacaaaggagucgacacagugucuguuggcaauaccuuauauuacgugaacaagcaagaagguaagucgcuguauguaaaaggggagccaauaaucaauuucuacgacccgcuagucuuucccagcgaugaguucgacgcguccauuucacaggugaacgaaaagaucaaucagagucucgccuucaucagaaaaucugaugaacugcuucacaacguuaaugugggaaagagcacuaccaacauuaugauaacaaccaucauuaucgucauuaucgugauauugcugcuccugaucgcaguaggccuuuuucuguacugcaaagcuagguccacuccugugacauugucaaaggaccagcucagcggcauuaauaacaucgccuucucuaacugaggacuaguggaagcauuuuccuggcugauuaaaagaaauuacucagcuauggucaucuguuccuguuagaaggcuaugcagcauauuauauacuaugcgcauguuaugaaaugcauaauaaaaaauuuuaaaaaaucuaaaagaucuaaaaaaaaaaaaaaaaaaaaaaaaaaaaaaaaaaaaaaaaaaaaaaaaaaaaaaaaaaaaaaaaugcaucccccccccccccccccccccccccccccccaaaggcucuuuucagagccaccagaauu

SEQ ID NO: 11883 - RNA, 2077 nt, Artificial Sequence
  mRNA product Design d-4 comprising derived and/or modified sequence from HRSV(Memphis-37)__AIY60640.1__F0 (opt4)
gggagagucccgcagucggcguccagcggcucugcuuguucgugugugugucguugcaggccuuauucaagcuuaccauggagcugcccauccugaagaccaacgccaucaccaccauccuggccgccgugacccugugcuucgccagcagccagaacaucaccgaggaguucuaccagagcaccugcagcgccgugagcaagggcuaccugagcgcccugagaaccggcugguacaccagcgugaucaccaucgagcugagcaacaucaaggagaacaagugcaacggcaccgacgccaaggugaagcugaucaagcaggagcuggacaaguacaagaacgccgugaccgagcugcagcugcugaugcagagcacccccgccgccaacaacagagccagaagagagcugcccagauucaugaacuacacccugaacaacaccaagaacaacaacgugacccugagcaagaagagaaagagaagauuccugggcuuccugcugggcgugggcagcgccaucgccagcggcaucgccgugagcaaggugcugcaccuggagggcgaggugaacaagaucaagaacgcccugcugagcaccaacaaggccguggugagccugagcaacggcgugagcgugcugaccagcaaggugcuggaccugaagaacuacaucgacaagcagcugcugcccaucgugaacaagcagagcugcagcaucagcaacaucgagaccgugaucgaguuccagcagaagaacaacagacugcuggagaucaccagagaguucagcgugaacgccggcgugaccacccccgugagcaccuacaugcugaccaacagcgagcugcugagccugaucaacgacaugcccaucaccaacgaccagaagaagcugaugagcaacaacgugcagaucgugagacagcagagcuacagcaucaugagcaucaucaaggaggaggugcuggccuacguggugcagcugccccuguacggcgugaucgacacccccugcuggaagcugcacaccagcccccugugcaccaccaacaccaaggagggcagcaacaucugccugaccagaaccgacagaggcugguacugcgacaacgccggcagcgugagcuucuucccccaggccgagaccugcaaggugcagagcaacagaguguucugcgacaccaugaacagccugacccugcccagcgaggugaaccugugcaacaucgacaucuucaaccccaaguacgacugcaagaucaugaccagcaagaccgacgugagcagcagcgugaucaccagccugggcgccaucgugagcugcuacggcaagaccaagugcaccgccagcaacaagaacagaggcaucaucaagaccuucagcaacggcugcgacuacgugagcaacaagggcguggacaccgugagcgugggcaacacccuguacuacgugaacaagcaggagggcaagagccuguacgugaagggcgagcccaucaucaacuucuacgacccccugguguuccccagcgacgaguucgacgccagcaucagccaggugaacgagaagaucaaccagagccuggccuucaucagaaagagcgacgagcugcugcacaacgugaacgugggcaagagcaccaccaacaucaugaucaccaccaucaucaucgugaucaucgugauccugcugcugcugaucgccgugggccuguuccuguacugcaaggccagaagcacccccgugacccugagcaaggaccagcugagcggcaucaacaacaucgccuucagcaacugaggacuaguggaagcauuuuccuggcugauuaaaagaaauuacucagcuauggucaucuguuccuguuagaaggcuaugcagcauauuauauacuaugcgcauguuaugaaaugcauaauaaaaaauuuuaaaaaaucuaaaagaucuaaaaaaaaaaaaaaaaaaaaaaaaaaaaaaaaaaaaaaaaaaaaaaaaaaaaaaaaaaaaaaaaugcaucccccccccccccccccccccccccccccccaaaggcucuuuucagagccaccagaauu

SEQ ID NO: 11884 - RNA, 2077 nt, Artificial Sequence
  mRNA product Design d-4 comprising derived and/or modified sequence from HRSV(Memphis-37)__AIY60640.1__F0 (opt5)
gggagagucccgcagucggcguccagcggcucugcuuguucgugugugugucguugcaggccuuauucaagcuuaccauggagcugcccauccucaagaccaacgccauuacaacgauccuggcugccgugacccuuugcuucgcgagcucccagaauauuacagaagaguuuuaccaaucuaccuguagcgcugucuccaaaggcuaucugucugcccucagaacagggugguacaccagcguuaucacaauugaacuguccaacaucaaggagaauaaaugcaacggaaccgacgccaaggugaaacuuaucaagcaggaacuggauaaguauaaaaaugcugugacggagcuccagcugcugaugcagucuaccccugccgcuaacaaucgggcccgcagagagcucccgcgguucaugaacuacacacugaauaacaccaagaauaacaaugucacacuuagcaaaaagcgcaaaagacgguuucugggcuuccuccugggggugggauccgcgauugccagcggcaucgcuguuucuaaggugcuucaccuggaaggggaggucaacaagauuaaaaaugcccuccuguccaccaacaaggcugugguuagccugucuaacggaguguccguccucacgagcaaagugcuggaccuuaagaauuauaucgauaaacaacugcuccccauugugaacaagcagucuuguuccaucagcaauauugaaacagucaucgaguuucagcagaaaaacaaucgccugcuugagaucaccagagaauuuuccguuaacgccggcgugacaaccccugugucuaccuacaugcugacaaauagcgagcuccugucccugauuaacgacaugcccaucacgaaugaucaaaagaagcucaugagcaacaauguccagauugugcggcagcagucuuauuccaucaugagcauuaucaaagaagagguucuggcguacgugguccaacuuccucuguacggcgugaucgacacccccugcuggaagcuccauacaucuccucuguguaccacaaacaccaaagaagggagcaauauuugccuuacgcgcacagauagaggaugguauugugacaacgccggcuccguuucuuucuucccgcaggcugagaccugcaaggugcagagcaaucgggucuuuugugauaccaugaacucccugacacuccccagcgaggugaaccugugcaauaucgacauuuucaacccuaaauacgauuguaagaucaugaccucuaagacagacgucuccagcucugugauuacgucccugggggccaucguuagcugcuauggaaaaaccaagugcacagcuuccaauaaaaaccgcggcaucauuaagaccuuuucuaaugggugugauuacgugagcaacaaaggagucgacacaguguccguuggcaauacccucuauuacgugaacaagcaagaaggcaagucucuguaugucaaaggggagcccaucauuaauuucuacgacccucuuguguuucccagcgaugaguucgacgccuccaucagccaggugaacgaaaagauuaaucagucucuggccuucaucagaaaauccgaugaacuccugcacaacguuaaugucggaaagagcacgaccaacauuaugaucacaaccaucauuaucgugauuaucgugauucugcuucuccugaucgcugucggccuguuucucuacugcaaagcgcggucuacaccggugacccuguccaaggaccagcuuagcgggaucaauaacauugccuucucuaacugaggacuaguggaagcauuuuccuggcugauuaaaagaaauuacucagcuauggucaucuguuccuguuagaaggcuaugcagcauauuauauacuaugcgcauguuaugaaaugcauaauaaaaaauuuuaaaaaaucuaaaagaucuaaaaaaaaaaaaaaaaaaaaaaaaaaaaaaaaaaaaaaaaaaaaaaaaaaaaaaaaaaaaaaaaugcaucccccccccccccccccccccccccccccccaaaggcucuuuucagagccaccagaauu

SEQ ID NO: 11885 - RNA, 2077 nt, Artificial Sequence
  mRNA product Design d-4 comprising derived and/or modified sequence from HRSV(Memphis-37)__AIY60640.1__F0 (opt6)
gggagagucccgcagucggcguccagcggcucugcuuguucgugugugugucguugcaggccuuauucaagcuuaccauggaacugccuauucuaaaaacaaaugccauaacaacaauucuugcagcaguaacauuauguuuugcaucaucacaaaacauuacagaagaauuuuaccaauccacuugcucagccguaucaaaaggauaccuaucagccuuaagaacagguugguacaccucaguaauaaccauagaacuaucaaacauaaaagaaaacaaaugcaaugguacugaugcaaaagucaaacuaaucaaacaagaacuggacaaauacaaaaaugcaguaaccgaacuacaacuccuaaugcaauccacaccugcagccaacaacagagcaagacgcgaacuaccaagauuuaugaauuacacauuaaacaacaccaagaacaacaauguaacucucucaaaaaaaagaaaaagacgcuuucuagguuuccuccuaggcgucggaucugcaauagccucaggaauagcaguaucaaaaguucuacaccuagaaggagaaguaaacaaaauuaaaaacgcauuacuaucaaccaacaaagcaguuguaucccuuucaaauggagucucuguacuuacaucaaaaguacucgaccuaaaaaacuauauagacaaacaacuacucccaauagucaauaagcaaucaugcagcauaucaaacauagaaacaguuauagaauuucaacaaaaaaacaacagacuacucgaaauaaccagagaauuuagcgucaacgcaggcguaaccacaccgguauccacauacaugcuuacaaacucagaacuccucucacuaauaaacgacaugccaauaacuaaugaccaaaaaaaacuaaugucaaacaauguccaaauaguccgucaacaaucauacucaauaaugucaauaauaaaagaagaaguauuagcauauguaguccaacuaccauuauacggcguuauagacacaccuuguuggaaacuucacacauccccacucuguacaaccaacacaaaagaagguuccaauauaugccuaacuagaaccgacagaggaugguauugcgacaacgcaggaucuguaucauucuuuccccaagcagaaacauguaaaguacaaaguaaccgcguauucugcgacaccaugaacucauuaacccucccauccgaaguuaauuuaugcaauauagacauauuuaauccuaaauacgacugcaaaauaaugacaucaaaaacagacguuaguuccuccguaaucacaucuuugggcgcaauagucucaugcuauggaaaaacaaaaugcacagccucaaacaaaaauagaggaauaauaaaaacauucagcaacggcugugauuauguauccaacaaaggaguagacacaguauccguaggcaauacccuuuacuacguuaauaaacaagaaggaaaaucauuauacgucaaaggagaaccuaucauaaauuucuacgacccauuaguauucccuucagacgaauuugaugccucaauaucccaagucaaugaaaaaaucaaccaaucacuagccuuuauccgcaaaucagacgaauuacuacacaacguaaacguaggcaaaucaacaacuaauauaaugauaacaacaauaauaauaguaauuauaguaauauuauuacuacuaaucgccguagguuuauucuuauacuguaaagcacgaucaacaccaguuacacucucaaaagaucaacuaucaggaauaaacaacauagcauuuuccaauuaaggacuaguggaagcauuuuccuggcugauuaaaagaaauuacucagcuauggucaucuguuccuguuagaaggcuaugcagcauauuauauacuaugcgcauguuaugaaaugcauaauaaaaaauuuuaaaaaaucuaaaagaucuaaaaaaaaaaaaaaaaaaaaaaaaaaaaaaaaaaaaaaaaaaaaaaaaaaaaaaaaaaaaaaaaugcaucccccccccccccccccccccccccccccccaaaggcucuuuucagagccaccagaauu

SEQ ID NO: 11886 - RNA, 2077 nt, Artificial Sequence
  mRNA product Design d-4 comprising derived and/or modified sequence from HRSV(Memphis-37)__AIY60640.1__F0 (opt11)
gggagagucccgcagucggcguccagcggcucugcuuguucgugugugugucguugcaggccuuauucaagcuuaccauggaacuccccauccucaaaacaaacgccauaaccacuauccucgccgccgucacccucugcuucgccuccucccaaaacaucacagaggaguucuaccaauccacaugcuccgccgucuccaaaggcuaccucagcgcccuacguaccggcugguacaccagcgucaucacaauagaacucuccaacaucaaggaaaacaaaugcaacggcaccgaugccaaaguaaaacucaucaaacaagaacucgauaaauacaaaaacgccgucaccgaacuacaacuccuaaugcaaagcacacccgccgccaacaacagagcacggcgcgaacugccccgcuucaugaacuacacccucaacaacaccaaaaauaacaacgucacccuauccaagaaacgcaaacgccgauuccucgguuuccuacucggcguaggaagcgccauagccucaggcaucgccgucuccaaaguccuccaucuggaaggcgaagucaacaaaaucaaaaacgcacucuuauccaccaacaaagccgucgucucccucucgaacggggucuccguccuuaccuccaaaguccucgaccuuaaaaacuacaucgacaaacaacuacuaccaauagucaauaaacaauccugcuccaucucaaacauagaaaccgucauagaguuccaacagaagaacaaucgccuccucgaaauaacucgcgaguucuccgucaacgcaggcgucacgaccccugucucaacauacaugcuaacuaacucagaacuccuaagccuaaucaacgacaugcccaucacaaacgaccaaaagaaacucaugagcaacaauguccagauagucagacagcaauccuauagcaucaugucuauaauaaaagaagaagugcucgccuacguaguccaacucccucuuuacggcgucauagacacacccugcuggaaacuccacacaucuccucucugcaccaccaacacaaaagaaggcagcaacaucugccugacccgaaccgaccgcggaugguacugcgacaacgcuggcuccgugucuuucuuuccccaagccgaaaccugcaaaguccaguccaaccgcgucuucugcgacacaaugaacucccucacccuacccuccgaaguuaaccucugcaacaucgacaucuucaauccaaaauacgacugcaaaaucaugaccucgaaaacggacguauccuccuccgucauaacaucacuuggagccaucguuagcugcuacggaaaaaccaaauguaccgccuccaacaaaaaccgcggaauaaucaaaacauucuccaacggcugcgacuacguaagcaacaaaggggucgauacugucuccguagguaacacccuauacuacgucaacaaacaagaaggaaaaucacuauacguuaaaggcgaacccauuaucaacuucuacgacccccucguuuucccauccgacgaguucgacgccuccauaagccaaguuaacgaaaagauaaaccaaucgcucgcauucauccgcaaauccgacgaacuccuacacaacgucaacgugggcaaauccacaacaaacaucaugaucaccaccaucauuaucgucauaauagucauccuccuccugcucaucgccgugggacuauuccuauacugcaaagcccgcucgacgcccgucacacuuuccaaagaccaacuaagcggaaucaacaacauagcguucagcaauuaaggacuaguggaagcauuuuccuggcugauuaaaagaaauuacucagcuauggucaucuguuccuguuagaaggcuaugcagcauauuauauacuaugcgcauguuaugaaaugcauaauaaaaaauuuuaaaaaaucuaaaagaucuaaaaaaaaaaaaaaaaaaaaaaaaaaaaaaaaaaaaaaaaaaaaaaaaaaaaaaaaaaaaaaaaugcaucccccccccccccccccccccccccccccccaaaggcucuuuucagagccaccagaauu

SEQ ID NO: 11887 - RNA, 2174 nt, Artificial Sequence
  mRNA product Design d-5 comprising derived and/or modified sequence from HRSV(Memphis-37)__AIY60640.1__F0 (wt)
gggagagggcgcuuggcuugcaaggacccugagcugcggcauugaagcacacccaacccaacucgacugaagucagccucacugaaccggaucugagaaucuucucucucugggcuugccagggcucuccgaaccuagcuagcauccucuucaauuccaacuagaaagcuuaccauggaguugccaauccucaaaacaaaugcaauuaccacaauccuugcugcagucacacucuguuucgcuuccagucaaaacaucacugaagaauuuuaucaaucaacaugcagugcaguuagcaaaggcuaucuuagugcuuuaagaacugguugguauacuaguguuauaacuauagaauuaaguaauaucaaggaaaauaaguguaauggaacagaugcuaagguaaaauugauaaaacaagaauuagauaaauauaaaaaugcuguaacagaauugcaguugcucaugcaaagcacaccagcagccaacaaucgagccagaagagaacuaccaagguuuaugaauuauacacucaacaauaccaaaaauaacaauguaacauuaagcaagaaaaggaaaagaagauuucuuggcuuuuuguuagguguuggaucugcaaucgccaguggcauugcuguaucuaaaguccugcaccuagaaggggaagugaacaaaaucaaaaaugcucuacuauccacaaacaaggcuguagucagcuuaucaaauggaguuagugucuuaaccagcaaaguguuagaccucaaaaacuauauagauaaacaguuguuacccauugugaacaagcaaagcugcagcauaucaaacauugaaacugugauagaauuccaacaaaagaacaacagacuacuagagauuaccagggaauuuaguguuaaugcagguguaacuacaccuguaagcacuuauauguuaacaaauagugaauuauuaucauuaaucaaugauaugccuauaacaaaugaucagaaaaaguuaauguccaacaauguucaaauaguuagacagcaaaguuacucuaucauguccauaauaaaggaggaagucuuagcauauguaguucaauuaccacuauaugguguaauagauacaccuuguuggaaacuacacacauccccucuaugcacaaccaacacaaaggaaggguccaacaucuguuuaacaagaaccgacagaggaugguacugugacaaugcaggaucagugucuuucuucccacaagcugaaacaugcaaaguucaaucgaaucgaguauuuugugacacaaugaacagucuaacauuaccaagugaaguaaaucucugcaacauugacauauucaacccuaaauaugauugcaaaauuaugacuucaaaaacagaugugagcagcuccguuaucacaucucuaggagccauugugucaugcuauggcaaaacuaaauguacagcauccaauaaaaaucguggaaucauaaagacauuuucuaacgggugugauuauguaucaaauaaggggguggacacuguaucuguagguaauacauuauauuauguaaauaagcaagaaggaaaaagccucuauguaaaaggugaaccaauaauaaauuucuaugacccauuaguguucccuucugaugaauuugaugcaucaauaucucaagucaaugagaagauuaaccagagccuagcauuuauucguaaauccgaugaauuauuacauaauguaaauguugguaaauccaccacaaauaucaugauaacuacuauaauuauagugauuauaguaauauuguuauuauuaauugcaguugggcuguuccuauacugcaaggccagaagcacaccagucacacuaagcaaggaucaacugagugguauaaauaauauugcauuuaguaacugaggacuaguggaagcauuuuccuggcugauuaaaagaaauuacucagcuauggucaucuguuccuguuagaaggcuaugcagcauauuauauacuaugcgcauguuaugaaaugcauaauaaaaaauuuuaaaaaaucuaaaagaucuaaaaaaaaaaaaaaaaaaaaaaaaaaaaaaaaaaaaaaaaaaaaaaaaaaaaaaaaaaaaaaaaugcaucccccccccccccccccccccccccccccccaaaggcucuuuucagagccaccagaauu

SEQ ID NO: 11888 - RNA, 2174 nt, Artificial Sequence
  mRNA product Design d-5 comprising derived and/or modified sequence from HRSV(Memphis-37)__AIY60640.1__F0 (opt1)
gggagagggcgcuuggcuugcaaggacccugagcugcggcauugaagcacacccaacccaacucgacugaagucagccucacugaaccggaucugagaaucuucucucucugggcuugccagggcucuccgaaccuagcuagcauccucuucaauuccaacuagaaagcuuaccauggagcugcccauccucaagaccaacgccaucaccacgauccuggccgcggugacccugugcuucgccagcucccagaacaucaccgaggaguucuaccagagcacgugcuccgccgucagcaagggcuaccucuccgcccugcgcaccgggugguacaccagcgugaucaccaucgagcuguccaacaucaaggagaacaagugcaacggcaccgacgccaaggugaagcucaucaagcaggagcuggacaaguacaagaacgcggucacggagcugcagcuccugaugcagagcaccccggccgccaacaaccgggcccgccgggagcugccccgcuucaugaacuacacccucaacaacaccaagaacaacaacgugacgcuguccaagaagcggaagcgccgguuccugggguuccuccugggcguggggagcgcgaucgccuccggcaucgccgucagcaaggugcugcaccucgagggcgaggugaacaagaucaagaacgcccugcuguccaccaacaaggccgucgugagccucuccaacggggugagcguccugaccuccaaggugcuggaccucaagaacuacaucgacaagcagcugcugcccaucgugaacaagcagagcugcuccaucagcaacaucgagaccgucaucgaguuccagcagaagaacaaccgccuccuggagaucacgcgggaguucagcgugaacgcgggcgugaccacccccgucuccaccuacaugcugacgaacagcgagcuccugucccugaucaacgacaugccgaucaccaacgaccagaagaagcucaugagcaacaacgugcagaucgugcgccagcaguccuacagcaucauguccaucaucaaggaggagguccuggccuacguggugcagcugccccucuacggggucaucgacacccccugcuggaagcugcacaccagcccccugugcacgaccaacaccaaggagggcuccaacaucugccucacccggacggaccgcgggugguacugcgacaacgccggcagcguguccuucuucccgcaggccgagaccugcaagguccagagcaaccggguguucugcgacaccaugaacucccugacccugcccagcgaggugaaccucugcaacaucgacaucuucaaccccaaguacgacugcaagaucaugacguccaagaccgacgucagcuccagcgugaucaccucccugggcgccaucgugagcugcuacgggaagaccaagugcacggcgagcaacaagaaccgcggcaucaucaagaccuucuccaacgggugcgacuacgucagcaacaagggcguggacaccguguccgucggcaacacccuguacuacgugaacaagcaggagggcaagagccucuacgugaagggggagcccaucaucaacuucuacgacccgcuggucuuccccuccgacgaguucgacgccagcaucucccaggugaacgagaagaucaaccagagccuggccuucauccggaaguccgacgagcuccugcacaacgugaacgucggcaagagcaccacgaacaucaugaucaccaccaucaucaucgugaucaucgugauccugcugcuccugaucgccgucgggcuguuccucuacugcaaggcccgcuccacccccgugacgcugagcaaggaccagcuguccgggaucaacaacaucgcguucagcaacugaggacuaguggaagcauuuuccuggcugauuaaaagaaauuacucagcuauggucaucuguuccuguuagaaggcuaugcagcauauuauauacuaugcgcauguuaugaaaugcauaauaaaaaauuuuaaaaaaucuaaaagaucuaaaaaaaaaaaaaaaaaaaaaaaaaaaaaaaaaaaaaaaaaaaaaaaaaaaaaaaaaaaaaaaaugcaucccccccccccccccccccccccccccccccaaaggcucuuuucagagccaccagaauu

SEQ ID NO: 11889 - RNA, 2174 nt, Artificial Sequence
  mRNA product Design d-5 comprising derived and/or modified sequence from HRSV(Memphis-37)__AIY60640.1__F0 (opt2)
gggagagggcgcuuggcuugcaaggacccugagcugcggcauugaagcacacccaacccaacucgacugaagucagccucacugaaccggaucugagaaucuucucucucugggcuugccagggcucuccgaaccuagcuagcauccucuucaauuccaacuagaaagcuuaccauggagcuccccauccucaagaccaacgccaucaccaccauccucgccgccgucacccucugcuucgccuccucccagaacaucaccgaggaguucuaccaguccaccugcuccgccgucuccaagggcuaccucuccgcccuccgcaccggcugguacaccuccgucaucaccaucgagcucuccaacaucaaggagaacaagugcaacggcaccgacgccaaggucaagcucaucaagcaggagcucgacaaguacaagaacgccgucaccgagcuccagcuccucaugcaguccacccccgccgccaacaaccgcgcccgccgcgagcucccccgcuucaugaacuacacccucaacaacaccaagaacaacaacgucacccucuccaagaagcgcaagcgccgcuuccucggcuuccuccucggcgucggcuccgccaucgccuccggcaucgccgucuccaagguccuccaccucgagggcgaggucaacaagaucaagaacgcccuccucuccaccaacaaggccgucgucucccucuccaacggcgucuccguccucaccuccaagguccucgaccucaagaacuacaucgacaagcagcuccuccccaucgucaacaagcaguccugcuccaucuccaacaucgagaccgucaucgaguuccagcagaagaacaaccgccuccucgagaucacccgcgaguucuccgucaacgccggcgucaccacccccgucuccaccuacaugcucaccaacuccgagcuccucucccucaucaacgacaugcccaucaccaacgaccagaagaagcucauguccaacaacguccagaucguccgccagcaguccuacuccaucauguccaucaucaaggaggagguccucgccuacgucguccagcucccccucuacggcgucaucgacacccccugcuggaagcuccacaccuccccccucugcaccaccaacaccaaggagggcuccaacaucugccucacccgcaccgaccgcggcugguacugcgacaacgccggcuccgucuccuucuucccccaggccgagaccugcaagguccaguccaaccgcgucuucugcgacaccaugaacucccucacccuccccuccgaggucaaccucugcaacaucgacaucuucaaccccaaguacgacugcaagaucaugaccuccaagaccgacgucuccuccuccgucaucaccucccucggcgccaucgucuccugcuacggcaagaccaagugcaccgccuccaacaagaaccgcggcaucaucaagaccuucuccaacggcugcgacuacgucuccaacaagggcgucgacaccgucuccgucggcaacacccucuacuacgucaacaagcaggagggcaagucccucuacgucaagggcgagcccaucaucaacuucuacgacccccucgucuuccccuccgacgaguucgacgccuccaucucccaggucaacgagaagaucaaccagucccucgccuucauccgcaaguccgacgagcuccuccacaacgucaacgucggcaaguccaccaccaacaucaugaucaccaccaucaucaucgucaucaucgucauccuccuccuccucaucgccgucggccucuuccucuacugcaaggcccgcuccacccccgucacccucuccaaggaccagcucuccggcaucaacaacaucgccuucuccaacugaggacuaguggaagcauuuuccuggcugauuaaaagaaauuacucagcuauggucaucuguuccuguuagaaggcuaugcagcauauuauauacuaugcgcauguuaugaaaugcauaauaaaaaauuuuaaaaaaucuaaaagaucuaaaaaaaaaaaaaaaaaaaaaaaaaaaaaaaaaaaaaaaaaaaaaaaaaaaaaaaaaaaaaaaaugcaucccccccccccccccccccccccccccccccaaaggcucuuuucagagccaccagaauu

SEQ ID NO: 11890 - RNA, 2174 nt, Artificial Sequence
  mRNA product Design d-5 comprising derived and/or modified sequence from HRSV(Memphis-37)__AIY60640.1__F0 (opt3)
gggagagggcgcuuggcuugcaaggacccugagcugcggcauugaagcacacccaacccaacucgacugaagucagccucacugaaccggaucugagaaucuucucucucugggcuugccagggcucuccgaaccuagcuagcauccucuucaauuccaacuagaaagcuuaccauggagcugcccauccucaagaccaacgccauuacaacuauacuugcugcagugacgcugugcuucgccagcucccagaauaucaccgaagaguuuuaccaaucuacauguucagcggucaguaaaggcuauuugagcgcuuuaagaacugggugguacaccuccguuauuacaaucgaacugucuaacauuaaggagaauaaaugcaacggaaccgacgccaaggugaaacuaaucaagcaggaacucgauaaguauaaaaaugcaguaacugagcugcagcuucugaugcagucgaccccugccgcuaacaauagggcacggcgcgaguugccacgauucaugaacuacacacucaauaacacgaagaauaacaaugugacucugagcaaaaagcguaaaagaagguuucuggguuuccucuuaggcgucgggucagccauagcuaguggaaucgccguguccaagguucugcaccuugaaggcgaggugaacaagauuaaaaaugcguugcugucuaccaacaaggcagucgugagccuauccaacgguguaucaguucucacaaguaaagugcuggaccuuaagaauuauaucgauaaacaacuguugccgauugucaacaagcagagcuguucuaucuccaauauagaaacugugauugaguuucagcagaaaaacaaucggcuccuggagaucacccgcgaguucucagugaacgccggggucacaacccccguuagcacguacauguuaacuaauagugaacugcucucucuuauuaacgacaugccuaucacaaaugaucaaaagaagcugauguccaacaaugugcagaucguaagacagcagagcuauucgauuaugucuauaaucaaagaagagguguuggcuuacgucgugcaacuaccacuguacggaguuauugacacccccugcuggaagcuccauacuuccccucuguguacaaccaacacgaaagaaggcucaaauaucugccuuaccaggacagaucggggcugguauugugacaacgccgggagugugagcuuuuucccacaggcagagacuugcaagguccaguccaaucgcguguuuugugauaccaugaacucucugacauugcccagcgagguaaaccucugcaauauagacauuuucaacccuaaauacgauuguaagaucaugacuucaaagaccgacguuaguuccagcgugaucacaucucugggagcuauugucucaugcuaugguaaaaccaagugcacugccaguaauaaaaaccgaggcaucauuaagacguuuagcaaugggugugauuacguguccaacaaaggagucgacacagugucuguuggcaauaccuuauauuacgugaacaagcaagaagguaagucgcuguauguaaaaggggagccaauaaucaauuucuacgacccgcuagucuuucccagcgaugaguucgacgcguccauuucacaggugaacgaaaagaucaaucagagucucgccuucaucagaaaaucugaugaacugcuucacaacguuaaugugggaaagagcacuaccaacauuaugauaacaaccaucauuaucgucauuaucgugauauugcugcuccugaucgcaguaggccuuuuucuguacugcaaagcuagguccacuccugugacauugucaaaggaccagcucagcggcauuaauaacaucgccuucucuaacugaggacuaguggaagcauuuuccuggcugauuaaaagaaauuacucagcuauggucaucuguuccuguuagaaggcuaugcagcauauuauauacuaugcgcauguuaugaaaugcauaauaaaaaauuuuaaaaaaucuaaaagaucuaaaaaaaaaaaaaaaaaaaaaaaaaaaaaaaaaaaaaaaaaaaaaaaaaaaaaaaaaaaaaaaaugcaucccccccccccccccccccccccccccccccaaaggcucuuuucagagccaccagaauu

SEQ ID NO: 11891 - RNA, 2174 nt, Artificial Sequence
  mRNA product Design d-5 comprising derived and/or modified sequence from HRSV(Memphis-37)__AIY60640.1__F0 (opt4)
gggagagggcgcuuggcuugcaaggacccugagcugcggcauugaagcacacccaacccaacucgacugaagucagccucacugaaccggaucugagaaucuucucucucugggcuugccagggcucuccgaaccuagcuagcauccucuucaauuccaacuagaaagcuuaccauggagcugcccauccugaagaccaacgccaucaccaccauccuggccgccgugacccugugcuucgccagcagccagaacaucaccgaggaguucuaccagagcaccugcagcgccgugagcaagggcuaccugagcgcccugagaaccggcugguacaccagcgugaucaccaucgagcugagcaacaucaaggagaacaagugcaacggcaccgacgccaaggugaagcugaucaagcaggagcuggacaaguacaagaacgccgugaccgagcugcagcugcugaugcagagcacccccgccgccaacaacagagccagaagagagcugcccagauucaugaacuacacccugaacaacaccaagaacaacaacgugacccugagcaagaagagaaagagaagauuccugggcuuccugcugggcgugggcagcgccaucgccagcggcaucgccgugagcaaggugcugcaccuggagggcgaggugaacaagaucaagaacgcccugcugagcaccaacaaggccguggugagccugagcaacggcgugagcgugcugaccagcaaggugcuggaccugaagaacuacaucgacaagcagcugcugcccaucgugaacaagcagagcugcagcaucagcaacaucgagaccgugaucgaguuccagcagaagaacaacagacugcuggagaucaccagagaguucagcgugaacgccggcgugaccacccccgugagcaccuacaugcugaccaacagcgagcugcugagccugaucaacgacaugcccaucaccaacgaccagaagaagcugaugagcaacaacgugcagaucgugagacagcagagcuacagcaucaugagcaucaucaaggaggaggugcuggccuacguggugcagcugccccuguacggcgugaucgacacccccugcuggaagcugcacaccagcccccugugcaccaccaacaccaaggagggcagcaacaucugccugaccagaaccgacagaggcugguacugcgacaacgccggcagcgugagcuucuucccccaggccgagaccugcaaggugcagagcaacagaguguucugcgacaccaugaacagccugacccugcccagcgaggugaaccugugcaacaucgacaucuucaaccccaaguacgacugcaagaucaugaccagcaagaccgacgugagcagcagcgugaucaccagccugggcgccaucgugagcugcuacggcaagaccaagugcaccgccagcaacaagaacagaggcaucaucaagaccuucagcaacggcugcgacuacgugagcaacaagggcguggacaccgugagcgugggcaacacccuguacuacgugaacaagcaggagggcaagagccuguacgugaagggcgagcccaucaucaacuucuacgacccccugguguuccccagcgacgaguucgacgccagcaucagccaggugaacgagaagaucaaccagagccuggccuucaucagaaagagcgacgagcugcugcacaacgugaacgugggcaagagcaccaccaacaucaugaucaccaccaucaucaucgugaucaucgugauccugcugcugcugaucgccgugggccuguuccuguacugcaaggccagaagcacccccgugacccugagcaaggaccagcugagcggcaucaacaacaucgccuucagcaacugaggacuaguggaagcauuuuccuggcugauuaaaagaaauuacucagcuauggucaucuguuccuguuagaaggcuaugcagcauauuauauacuaugcgcauguuaugaaaugcauaauaaaaaauuuuaaaaaaucuaaaagaucuaaaaaaaaaaaaaaaaaaaaaaaaaaaaaaaaaaaaaaaaaaaaaaaaaaaaaaaaaaaaaaaaugcaucccccccccccccccccccccccccccccccaaaggcucuuuucagagccaccagaauu

SEQ ID NO: 11892 - RNA, 2174 nt, Artificial Sequence
  mRNA product Design d-5 comprising derived and/or modified sequence from HRSV(Memphis-37)__AIY60640.1__F0 (opt5)
gggagagggcgcuuggcuugcaaggacccugagcugcggcauugaagcacacccaacccaacucgacugaagucagccucacugaaccggaucugagaaucuucucucucugggcuugccagggcucuccgaaccuagcuagcauccucuucaauuccaacuagaaagcuuaccauggagcugcccauccucaagaccaacgccauuacaacgauccuggcugccgugacccuuugcuucgcgagcucccagaauauuacagaagaguuuuaccaaucuaccuguagcgcugucuccaaaggcuaucugucugcccucagaacagggugguacaccagcguuaucacaauugaacuguccaacaucaaggagaauaaaugcaacggaaccgacgccaaggugaaacuuaucaagcaggaacuggauaaguauaaaaaugcugugacggagcuccagcugcugaugcagucuaccccugccgcuaacaaucgggcccgcagagagcucccgcgguucaugaacuacacacugaauaacaccaagaauaacaaugucacacuuagcaaaaagcgcaaaagacgguuucugggcuuccuccugggggugggauccgcgauugccagcggcaucgcuguuucuaaggugcuucaccuggaaggggaggucaacaagauuaaaaaugcccuccuguccaccaacaaggcugugguuagccugucuaacggaguguccguccucacgagcaaagugcuggaccuuaagaauuauaucgauaaacaacugcuccccauugugaacaagcagucuuguuccaucagcaauauugaaacagucaucgaguuucagcagaaaaacaaucgccugcuugagaucaccagagaauuuuccguuaacgccggcgugacaaccccugugucuaccuacaugcugacaaauagcgagcuccugucccugauuaacgacaugcccaucacgaaugaucaaaagaagcucaugagcaacaauguccagauugugcggcagcagucuuauuccaucaugagcauuaucaaagaagagguucuggcguacgugguccaacuuccucuguacggcgugaucgacacccccugcuggaagcuccauacaucuccucuguguaccacaaacaccaaagaagggagcaauauuugccuuacgcgcacagauagaggaugguauugugacaacgccggcuccguuucuuucuucccgcaggcugagaccugcaaggugcagagcaaucgggucuuuugugauaccaugaacucccugacacuccccagcgaggugaaccugugcaauaucgacauuuucaacccuaaauacgauuguaagaucaugaccucuaagacagacgucuccagcucugugauuacgucccugggggccaucguuagcugcuauggaaaaaccaagugcacagcuuccaauaaaaaccgcggcaucauuaagaccuuuucuaaugggugugauuacgugagcaacaaaggagucgacacaguguccguuggcaauacccucuauuacgugaacaagcaagaaggcaagucucuguaugucaaaggggagcccaucauuaauuucuacgacccucuuguguuucccagcgaugaguucgacgccuccaucagccaggugaacgaaaagauuaaucagucucuggccuucaucagaaaauccgaugaacuccugcacaacguuaaugucggaaagagcacgaccaacauuaugaucacaaccaucauuaucgugauuaucgugauucugcuucuccugaucgcugucggccuguuucucuacugcaaagcgcggucuacaccggugacccuguccaaggaccagcuuagcgggaucaauaacauugccuucucuaacugaggacuaguggaagcauuuuccuggcugauuaaaagaaauuacucagcuauggucaucuguuccuguuagaaggcuaugcagcauauuauauacuaugcgcauguuaugaaaugcauaauaaaaaauuuuaaaaaaucuaaaagaucuaaaaaaaaaaaaaaaaaaaaaaaaaaaaaaaaaaaaaaaaaaaaaaaaaaaaaaaaaaaaaaaaugcaucccccccccccccccccccccccccccccccaaaggcucuuuucagagccaccagaauu

SEQ ID NO: 11893 - RNA, 2174 nt, Artificial Sequence
  mRNA product Design d-5 comprising derived and/or modified sequence from HRSV(Memphis-37)__AIY60640.1__F0 (opt6)
gggagagggcgcuuggcuugcaaggacccugagcugcggcauugaagcacacccaacccaacucgacugaagucagccucacugaaccggaucugagaaucuucucucucugggcuugccagggcucuccgaaccuagcuagcauccucuucaauuccaacuagaaagcuuaccauggaacugccuauucuaaaaacaaaugccauaacaacaauucuugcagcaguaacauuauguuuugcaucaucacaaaacauuacagaagaauuuuaccaauccacuugcucagccguaucaaaaggauaccuaucagccuuaagaacagguugguacaccucaguaauaaccauagaacuaucaaacauaaaagaaaacaaaugcaaugguacugaugcaaaagucaaacuaaucaaacaagaacuggacaaauacaaaaaugcaguaaccgaacuacaacuccuaaugcaauccacaccugcagccaacaacagagcaagacgcgaacuaccaagauuuaugaauuacacauuaaacaacaccaagaacaacaauguaacucucucaaaaaaaagaaaaagacgcuuucuagguuuccuccuaggcgucggaucugcaauagccucaggaauagcaguaucaaaaguucuacaccuagaaggagaaguaaacaaaauuaaaaacgcauuacuaucaaccaacaaagcaguuguaucccuuucaaauggagucucuguacuuacaucaaaaguacucgaccuaaaaaacuauauagacaaacaacuacucccaauagucaauaagcaaucaugcagcauaucaaacauagaaacaguuauagaauuucaacaaaaaaacaacagacuacucgaaauaaccagagaauuuagcgucaacgcaggcguaaccacaccgguauccacauacaugcuuacaaacucagaacuccucucacuaauaaacgacaugccaauaacuaaugaccaaaaaaaacuaaugucaaacaauguccaaauaguccgucaacaaucauacucaauaaugucaauaauaaaagaagaaguauuagcauauguaguccaacuaccauuauacggcguuauagacacaccuuguuggaaacuucacacauccccacucuguacaaccaacacaaaagaagguuccaauauaugccuaacuagaaccgacagaggaugguauugcgacaacgcaggaucuguaucauucuuuccccaagcagaaacauguaaaguacaaaguaaccgcguauucugcgacaccaugaacucauuaacccucccauccgaaguuaauuuaugcaauauagacauauuuaauccuaaauacgacugcaaaauaaugacaucaaaaacagacguuaguuccuccguaaucacaucuuugggcgcaauagucucaugcuauggaaaaacaaaaugcacagccucaaacaaaaauagaggaauaauaaaaacauucagcaacggcugugauuauguauccaacaaaggaguagacacaguauccguaggcaauacccuuuacuacguuaauaaacaagaaggaaaaucauuauacgucaaaggagaaccuaucauaaauuucuacgacccauuaguauucccuucagacgaauuugaugccucaauaucccaagucaaugaaaaaaucaaccaaucacuagccuuuauccgcaaaucagacgaauuacuacacaacguaaacguaggcaaaucaacaacuaauauaaugauaacaacaauaauaauaguaauuauaguaauauuauuacuacuaaucgccguagguuuauucuuauacuguaaagcacgaucaacaccaguuacacucucaaaagaucaacuaucaggaauaaacaacauagcauuuuccaauuaaggacuaguggaagcauuuuccuggcugauuaaaagaaauuacucagcuauggucaucuguuccuguuagaaggcuaugcagcauauuauauacuaugcgcauguuaugaaaugcauaauaaaaaauuuuaaaaaaucuaaaagaucuaaaaaaaaaaaaaaaaaaaaaaaaaaaaaaaaaaaaaaaaaaaaaaaaaaaaaaaaaaaaaaaaugcaucccccccccccccccccccccccccccccccaaaggcucuuuucagagccaccagaauu

SEQ ID NO: 11894 - RNA, 2174 nt, Artificial Sequence
  mRNA product Design d-5 comprising derived and/or modified sequence from HRSV(Memphis-37)__AIY60640.1__F0 (opt11)
gggagagggcgcuuggcuugcaaggacccugagcugcggcauugaagcacacccaacccaacucgacugaagucagccucacugaaccggaucugagaaucuucucucucugggcuugccagggcucuccgaaccuagcuagcauccucuucaauuccaacuagaaagcuuaccauggaacuccccauccucaaaacaaacgccauaaccacuauccucgccgccgucacccucugcuucgccuccucccaaaacaucacagaggaguucuaccaauccacaugcuccgccgucuccaaaggcuaccucagcgcccuacguaccggcugguacaccagcgucaucacaauagaacucuccaacaucaaggaaaacaaaugcaacggcaccgaugccaaaguaaaacucaucaaacaagaacucgauaaauacaaaaacgccgucaccgaacuacaacuccuaaugcaaagcacacccgccgccaacaacagagcacggcgcgaacugccccgcuucaugaacuacacccucaacaacaccaaaaauaacaacgucacccuauccaagaaacgcaaacgccgauuccucgguuuccuacucggcguaggaagcgccauagccucaggcaucgccgucuccaaaguccuccaucuggaaggcgaagucaacaaaaucaaaaacgcacucuuauccaccaacaaagccgucgucucccucucgaacggggucuccguccuuaccuccaaaguccucgaccuuaaaaacuacaucgacaaacaacuacuaccaauagucaauaaacaauccugcuccaucucaaacauagaaaccgucauagaguuccaacagaagaacaaucgccuccucgaaauaacucgcgaguucuccgucaacgcaggcgucacgaccccugucucaacauacaugcuaacuaacucagaacuccuaagccuaaucaacgacaugcccaucacaaacgaccaaaagaaacucaugagcaacaauguccagauagucagacagcaauccuauagcaucaugucuauaauaaaagaagaagugcucgccuacguaguccaacucccucuuuacggcgucauagacacacccugcuggaaacuccacacaucuccucucugcaccaccaacacaaaagaaggcagcaacaucugccugacccgaaccgaccgcggaugguacugcgacaacgcuggcuccgugucuuucuuuccccaagccgaaaccugcaaaguccaguccaaccgcgucuucugcgacacaaugaacucccucacccuacccuccgaaguuaaccucugcaacaucgacaucuucaauccaaaauacgacugcaaaaucaugaccucgaaaacggacguauccuccuccgucauaacaucacuuggagccaucguuagcugcuacggaaaaaccaaauguaccgccuccaacaaaaaccgcggaauaaucaaaacauucuccaacggcugcgacuacguaagcaacaaaggggucgauacugucuccguagguaacacccuauacuacgucaacaaacaagaaggaaaaucacuauacguuaaaggcgaacccauuaucaacuucuacgacccccucguuuucccauccgacgaguucgacgccuccauaagccaaguuaacgaaaagauaaaccaaucgcucgcauucauccgcaaauccgacgaacuccuacacaacgucaacgugggcaaauccacaacaaacaucaugaucaccaccaucauuaucgucauaauagucauccuccuccugcucaucgccgugggacuauuccuauacugcaaagcccgcucgacgcccgucacacuuuccaaagaccaacuaagcggaaucaacaacauagcguucagcaauuaaggacuaguggaagcauuuuccuggcugauuaaaagaaauuacucagcuauggucaucuguuccuguuagaaggcuaugcagcauauuauauacuaugcgcauguuaugaaaugcauaauaaaaaauuuuaaaaaaucuaaaagaucuaaaaaaaaaaaaaaaaaaaaaaaaaaaaaaaaaaaaaaaaaaaaaaaaaaaaaaaaaaaaaaaaugcaucccccccccccccccccccccccccccccccaaaggcucuuuucagagccaccagaauu

SEQ ID NO: 11895 - RNA, 2054 nt, Artificial Sequence
  mRNA product Design e-1 comprising derived and/or modified sequence from HRSV(Memphis-37)__AIY60640.1__F0 (wt)
gggagaauauaagcguuggcggagcgucgguuguagcacucugcgcgcccgcucuucugcugcuguuugucuacuuccuccugcuuccccgccgccgccgccgccaucaagcuuaccauggaguugccaauccucaaaacaaaugcaauuaccacaauccuugcugcagucacacucuguuucgcuuccagucaaaacaucacugaagaauuuuaucaaucaacaugcagugcaguuagcaaaggcuaucuuagugcuuuaagaacugguugguauacuaguguuauaacuauagaauuaaguaauaucaaggaaaauaaguguaauggaacagaugcuaagguaaaauugauaaaacaagaauuagauaaauauaaaaaugcuguaacagaauugcaguugcucaugcaaagcacaccagcagccaacaaucgagccagaagagaacuaccaagguuuaugaauuauacacucaacaauaccaaaaauaacaauguaacauuaagcaagaaaaggaaaagaagauuucuuggcuuuuuguuagguguuggaucugcaaucgccaguggcauugcuguaucuaaaguccugcaccuagaaggggaagugaacaaaaucaaaaaugcucuacuauccacaaacaaggcuguagucagcuuaucaaauggaguuagugucuuaaccagcaaaguguuagaccucaaaaacuauauagauaaacaguuguuacccauugugaacaagcaaagcugcagcauaucaaacauugaaacugugauagaauuccaacaaaagaacaacagacuacuagagauuaccagggaauuuaguguuaaugcagguguaacuacaccuguaagcacuuauauguuaacaaauagugaauuauuaucauuaaucaaugauaugccuauaacaaaugaucagaaaaaguuaauguccaacaauguucaaauaguuagacagcaaaguuacucuaucauguccauaauaaaggaggaagucuuagcauauguaguucaauuaccacuauaugguguaauagauacaccuuguuggaaacuacacacauccccucuaugcacaaccaacacaaaggaaggguccaacaucuguuuaacaagaaccgacagaggaugguacugugacaaugcaggaucagugucuuucuucccacaagcugaaacaugcaaaguucaaucgaaucgaguauuuugugacacaaugaacagucuaacauuaccaagugaaguaaaucucugcaacauugacauauucaacccuaaauaugauugcaaaauuaugacuucaaaaacagaugugagcagcuccguuaucacaucucuaggagccauugugucaugcuauggcaaaacuaaauguacagcauccaauaaaaaucguggaaucauaaagacauuuucuaacgggugugauuauguaucaaauaaggggguggacacuguaucuguagguaauacauuauauuauguaaauaagcaagaaggaaaaagccucuauguaaaaggugaaccaauaauaaauuucuaugacccauuaguguucccuucugaugaauuugaugcaucaauaucucaagucaaugagaagauuaaccagagccuagcauuuauucguaaauccgaugaauuauuacauaauguaaauguugguaaauccaccacaaauaucaugauaacuacuauaauuauagugauuauaguaauauuguuauuauuaauugcaguugggcuguuccuauacugcaaggccagaagcacaccagucacacuaagcaaggaucaacugagugguauaaauaauauugcauuuaguaacugaggacuaguguccaccugucccuccugggcugcuggauugucucguuuuccugccaaauaaacaggaucagcgcuuuacagaucuaaaaaaaaaaaaaaaaaaaaaaaaaaaaaaaaaaaaaaaaaaaaaaaaaaaaaaaaaaaaaaaaugcaucccccccccccccccccccccccccccccccaaaggcucuuuucagagccaccagaauu

SEQ ID NO: 11896 - RNA, 2054 nt, Artificial Sequence
  mRNA product Design e-1 comprising derived and/or modified sequence from HRSV(Memphis-37)__AIY60640.1__F0 (opt1)
gggagaauauaagcguuggcggagcgucgguuguagcacucugcgcgcccgcucuucugcugcuguuugucuacuuccuccugcuuccccgccgccgccgccgccaucaagcuuaccauggagcugcccauccucaagaccaacgccaucaccacgauccuggccgcggugacccugugcuucgccagcucccagaacaucaccgaggaguucuaccagagcacgugcuccgccgucagcaagggcuaccucuccgcccugcgcaccgggugguacaccagcgugaucaccaucgagcuguccaacaucaaggagaacaagugcaacggcaccgacgccaaggugaagcucaucaagcaggagcuggacaaguacaagaacgcggucacggagcugcagcuccugaugcagagcaccccggccgccaacaaccgggcccgccgggagcugccccgcuucaugaacuacacccucaacaacaccaagaacaacaacgugacgcuguccaagaagcggaagcgccgguuccugggguuccuccugggcguggggagcgcgaucgccuccggcaucgccgucagcaaggugcugcaccucgagggcgaggugaacaagaucaagaacgcccugcuguccaccaacaaggccgucgugagccucuccaacggggugagcguccugaccuccaaggugcuggaccucaagaacuacaucgacaagcagcugcugcccaucgugaacaagcagagcugcuccaucagcaacaucgagaccgucaucgaguuccagcagaagaacaaccgccuccuggagaucacgcgggaguucagcgugaacgcgggcgugaccacccccgucuccaccuacaugcugacgaacagcgagcuccugucccugaucaacgacaugccgaucaccaacgaccagaagaagcucaugagcaacaacgugcagaucgugcgccagcaguccuacagcaucauguccaucaucaaggaggagguccuggccuacguggugcagcugccccucuacggggucaucgacacccccugcuggaagcugcacaccagcccccugugcacgaccaacaccaaggagggcuccaacaucugccucacccggacggaccgcgggugguacugcgacaacgccggcagcguguccuucuucccgcaggccgagaccugcaagguccagagcaaccggguguucugcgacaccaugaacucccugacccugcccagcgaggugaaccucugcaacaucgacaucuucaaccccaaguacgacugcaagaucaugacguccaagaccgacgucagcuccagcgugaucaccucccugggcgccaucgugagcugcuacgggaagaccaagugcacggcgagcaacaagaaccgcggcaucaucaagaccuucuccaacgggugcgacuacgucagcaacaagggcguggacaccguguccgucggcaacacccuguacuacgugaacaagcaggagggcaagagccucuacgugaagggggagcccaucaucaacuucuacgacccgcuggucuuccccuccgacgaguucgacgccagcaucucccaggugaacgagaagaucaaccagagccuggccuucauccggaaguccgacgagcuccugcacaacgugaacgucggcaagagcaccacgaacaucaugaucaccaccaucaucaucgugaucaucgugauccugcugcuccugaucgccgucgggcuguuccucuacugcaaggcccgcuccacccccgugacgcugagcaaggaccagcuguccgggaucaacaacaucgcguucagcaacugaggacuaguguccaccugucccuccugggcugcuggauugucucguuuuccugccaaauaaacaggaucagcgcuuuacagaucuaaaaaaaaaaaaaaaaaaaaaaaaaaaaaaaaaaaaaaaaaaaaaaaaaaaaaaaaaaaaaaaaugcaucccccccccccccccccccccccccccccccaaaggcucuuuucagagccaccagaauu

SEQ ID NO: 11897 - RNA, 2054 nt, Artificial Sequence
  mRNA product Design e-1 comprising derived and/or modified sequence from HRSV(Memphis-37)__AIY60640.1__F0 (opt2)
gggagaauauaagcguuggcggagcgucgguuguagcacucugcgcgcccgcucuucugcugcuguuugucuacuuccuccugcuuccccgccgccgccgccgccaucaagcuuaccauggagcuccccauccucaagaccaacgccaucaccaccauccucgccgccgucacccucugcuucgccuccucccagaacaucaccgaggaguucuaccaguccaccugcuccgccgucuccaagggcuaccucuccgcccuccgcaccggcugguacaccuccgucaucaccaucgagcucuccaacaucaaggagaacaagugcaacggcaccgacgccaaggucaagcucaucaagcaggagcucgacaaguacaagaacgccgucaccgagcuccagcuccucaugcaguccacccccgccgccaacaaccgcgcccgccgcgagcucccccgcuucaugaacuacacccucaacaacaccaagaacaacaacgucacccucuccaagaagcgcaagcgccgcuuccucggcuuccuccucggcgucggcuccgccaucgccuccggcaucgccgucuccaagguccuccaccucgagggcgaggucaacaagaucaagaacgcccuccucuccaccaacaaggccgucgucucccucuccaacggcgucuccguccucaccuccaagguccucgaccucaagaacuacaucgacaagcagcuccuccccaucgucaacaagcaguccugcuccaucuccaacaucgagaccgucaucgaguuccagcagaagaacaaccgccuccucgagaucacccgcgaguucuccgucaacgccggcgucaccacccccgucuccaccuacaugcucaccaacuccgagcuccucucccucaucaacgacaugcccaucaccaacgaccagaagaagcucauguccaacaacguccagaucguccgccagcaguccuacuccaucauguccaucaucaaggaggagguccucgccuacgucguccagcucccccucuacggcgucaucgacacccccugcuggaagcuccacaccuccccccucugcaccaccaacaccaaggagggcuccaacaucugccucacccgcaccgaccgcggcugguacugcgacaacgccggcuccgucuccuucuucccccaggccgagaccugcaagguccaguccaaccgcgucuucugcgacaccaugaacucccucacccuccccuccgaggucaaccucugcaacaucgacaucuucaaccccaaguacgacugcaagaucaugaccuccaagaccgacgucuccuccuccgucaucaccucccucggcgccaucgucuccugcuacggcaagaccaagugcaccgccuccaacaagaaccgcggcaucaucaagaccuucuccaacggcugcgacuacgucuccaacaagggcgucgacaccgucuccgucggcaacacccucuacuacgucaacaagcaggagggcaagucccucuacgucaagggcgagcccaucaucaacuucuacgacccccucgucuuccccuccgacgaguucgacgccuccaucucccaggucaacgagaagaucaaccagucccucgccuucauccgcaaguccgacgagcuccuccacaacgucaacgucggcaaguccaccaccaacaucaugaucaccaccaucaucaucgucaucaucgucauccuccuccuccucaucgccgucggccucuuccucuacugcaaggcccgcuccacccccgucacccucuccaaggaccagcucuccggcaucaacaacaucgccuucuccaacugaggacuaguguccaccugucccuccugggcugcuggauugucucguuuuccugccaaauaaacaggaucagcgcuuuacagaucuaaaaaaaaaaaaaaaaaaaaaaaaaaaaaaaaaaaaaaaaaaaaaaaaaaaaaaaaaaaaaaaaugcaucccccccccccccccccccccccccccccccaaaggcucuuuucagagccaccagaauu

SEQ ID NO: 11898 - RNA, 2054 nt, Artificial Sequence
  mRNA product Design e-1 comprising derived and/or modified sequence from HRSV(Memphis-37)__AIY60640.1__F0 (opt3)
gggagaauauaagcguuggcggagcgucgguuguagcacucugcgcgcccgcucuucugcugcuguuugucuacuuccuccugcuuccccgccgccgccgccgccaucaagcuuaccauggagcugcccauccucaagaccaacgccauuacaacuauacuugcugcagugacgcugugcuucgccagcucccagaauaucaccgaagaguuuuaccaaucuacauguucagcggucaguaaaggcuauuugagcgcuuuaagaacugggugguacaccuccguuauuacaaucgaacugucuaacauuaaggagaauaaaugcaacggaaccgacgccaaggugaaacuaaucaagcaggaacucgauaaguauaaaaaugcaguaacugagcugcagcuucugaugcagucgaccccugccgcuaacaauagggcacggcgcgaguugccacgauucaugaacuacacacucaauaacacgaagaauaacaaugugacucugagcaaaaagcguaaaagaagguuucuggguuuccucuuaggcgucgggucagccauagcuaguggaaucgccguguccaagguucugcaccuugaaggcgaggugaacaagauuaaaaaugcguugcugucuaccaacaaggcagucgugagccuauccaacgguguaucaguucucacaaguaaagugcuggaccuuaagaauuauaucgauaaacaacuguugccgauugucaacaagcagagcuguucuaucuccaauauagaaacugugauugaguuucagcagaaaaacaaucggcuccuggagaucacccgcgaguucucagugaacgccggggucacaacccccguuagcacguacauguuaacuaauagugaacugcucucucuuauuaacgacaugccuaucacaaaugaucaaaagaagcugauguccaacaaugugcagaucguaagacagcagagcuauucgauuaugucuauaaucaaagaagagguguuggcuuacgucgugcaacuaccacuguacggaguuauugacacccccugcuggaagcuccauacuuccccucuguguacaaccaacacgaaagaaggcucaaauaucugccuuaccaggacagaucggggcugguauugugacaacgccgggagugugagcuuuuucccacaggcagagacuugcaagguccaguccaaucgcguguuuugugauaccaugaacucucugacauugcccagcgagguaaaccucugcaauauagacauuuucaacccuaaauacgauuguaagaucaugacuucaaagaccgacguuaguuccagcgugaucacaucucugggagcuauugucucaugcuaugguaaaaccaagugcacugccaguaauaaaaaccgaggcaucauuaagacguuuagcaaugggugugauuacguguccaacaaaggagucgacacagugucuguuggcaauaccuuauauuacgugaacaagcaagaagguaagucgcuguauguaaaaggggagccaauaaucaauuucuacgacccgcuagucuuucccagcgaugaguucgacgcguccauuucacaggugaacgaaaagaucaaucagagucucgccuucaucagaaaaucugaugaacugcuucacaacguuaaugugggaaagagcacuaccaacauuaugauaacaaccaucauuaucgucauuaucgugauauugcugcuccugaucgcaguaggccuuuuucuguacugcaaagcuagguccacuccugugacauugucaaaggaccagcucagcggcauuaauaacaucgccuucucuaacugaggacuaguguccaccugucccuccugggcugcuggauugucucguuuuccugccaaauaaacaggaucagcgcuuuacagaucuaaaaaaaaaaaaaaaaaaaaaaaaaaaaaaaaaaaaaaaaaaaaaaaaaaaaaaaaaaaaaaaaugcaucccccccccccccccccccccccccccccccaaaggcucuuuucagagccaccagaauu

SEQ ID NO: 11899 - RNA, 2054 nt, Artificial Sequence
  mRNA product Design e-1 comprising derived and/or modified sequence from HRSV(Memphis-37)__AIY60640.1__F0 (opt4)
gggagaauauaagcguuggcggagcgucgguuguagcacucugcgcgcccgcucuucugcugcuguuugucuacuuccuccugcuuccccgccgccgccgccgccaucaagcuuaccauggagcugcccauccugaagaccaacgccaucaccaccauccuggccgccgugacccugugcuucgccagcagccagaacaucaccgaggaguucuaccagagcaccugcagcgccgugagcaagggcuaccugagcgcccugagaaccggcugguacaccagcgugaucaccaucgagcugagcaacaucaaggagaacaagugcaacggcaccgacgccaaggugaagcugaucaagcaggagcuggacaaguacaagaacgccgugaccgagcugcagcugcugaugcagagcacccccgccgccaacaacagagccagaagagagcugcccagauucaugaacuacacccugaacaacaccaagaacaacaacgugacccugagcaagaagagaaagagaagauuccugggcuuccugcugggcgugggcagcgccaucgccagcggcaucgccgugagcaaggugcugcaccuggagggcgaggugaacaagaucaagaacgcccugcugagcaccaacaaggccguggugagccugagcaacggcgugagcgugcugaccagcaaggugcuggaccugaagaacuacaucgacaagcagcugcugcccaucgugaacaagcagagcugcagcaucagcaacaucgagaccgugaucgaguuccagcagaagaacaacagacugcuggagaucaccagagaguucagcgugaacgccggcgugaccacccccgugagcaccuacaugcugaccaacagcgagcugcugagccugaucaacgacaugcccaucaccaacgaccagaagaagcugaugagcaacaacgugcagaucgugagacagcagagcuacagcaucaugagcaucaucaaggaggaggugcuggccuacguggugcagcugccccuguacggcgugaucgacacccccugcuggaagcugcacaccagcccccugugcaccaccaacaccaaggagggcagcaacaucugccugaccagaaccgacagaggcugguacugcgacaacgccggcagcgugagcuucuucccccaggccgagaccugcaaggugcagagcaacagaguguucugcgacaccaugaacagccugacccugcccagcgaggugaaccugugcaacaucgacaucuucaaccccaaguacgacugcaagaucaugaccagcaagaccgacgugagcagcagcgugaucaccagccugggcgccaucgugagcugcuacggcaagaccaagugcaccgccagcaacaagaacagaggcaucaucaagaccuucagcaacggcugcgacuacgugagcaacaagggcguggacaccgugagcgugggcaacacccuguacuacgugaacaagcaggagggcaagagccuguacgugaagggcgagcccaucaucaacuucuacgacccccugguguuccccagcgacgaguucgacgccagcaucagccaggugaacgagaagaucaaccagagccuggccuucaucagaaagagcgacgagcugcugcacaacgugaacgugggcaagagcaccaccaacaucaugaucaccaccaucaucaucgugaucaucgugauccugcugcugcugaucgccgugggccuguuccuguacugcaaggccagaagcacccccgugacccugagcaaggaccagcugagcggcaucaacaacaucgccuucagcaacugaggacuaguguccaccugucccuccugggcugcuggauugucucguuuuccugccaaauaaacaggaucagcgcuuuacagaucuaaaaaaaaaaaaaaaaaaaaaaaaaaaaaaaaaaaaaaaaaaaaaaaaaaaaaaaaaaaaaaaaugcaucccccccccccccccccccccccccccccccaaaggcucuuuucagagccaccagaauu

SEQ ID NO: 11900 - RNA, 2054 nt, Artificial Sequence
  mRNA product Design e-1 comprising derived and/or modified sequence from HRSV(Memphis-37)__AIY60640.1__F0 (opt5)
gggagaauauaagcguuggcggagcgucgguuguagcacucugcgcgcccgcucuucugcugcuguuugucuacuuccuccugcuuccccgccgccgccgccgccaucaagcuuaccauggagcugcccauccucaagaccaacgccauuacaacgauccuggcugccgugacccuuugcuucgcgagcucccagaauauuacagaagaguuuuaccaaucuaccuguagcgcugucuccaaaggcuaucugucugcccucagaacagggugguacaccagcguuaucacaauugaacuguccaacaucaaggagaauaaaugcaacggaaccgacgccaaggugaaacuuaucaagcaggaacuggauaaguauaaaaaugcugugacggagcuccagcugcugaugcagucuaccccugccgcuaacaaucgggcccgcagagagcucccgcgguucaugaacuacacacugaauaacaccaagaauaacaaugucacacuuagcaaaaagcgcaaaagacgguuucugggcuuccuccugggggugggauccgcgauugccagcggcaucgcuguuucuaaggugcuucaccuggaaggggaggucaacaagauuaaaaaugcccuccuguccaccaacaaggcugugguuagccugucuaacggaguguccguccucacgagcaaagugcuggaccuuaagaauuauaucgauaaacaacugcuccccauugugaacaagcagucuuguuccaucagcaauauugaaacagucaucgaguuucagcagaaaaacaaucgccugcuugagaucaccagagaauuuuccguuaacgccggcgugacaaccccugugucuaccuacaugcugacaaauagcgagcuccugucccugauuaacgacaugcccaucacgaaugaucaaaagaagcucaugagcaacaauguccagauugugcggcagcagucuuauuccaucaugagcauuaucaaagaagagguucuggcguacgugguccaacuuccucuguacggcgugaucgacacccccugcuggaagcuccauacaucuccucuguguaccacaaacaccaaagaagggagcaauauuugccuuacgcgcacagauagaggaugguauugugacaacgccggcuccguuucuuucuucccgcaggcugagaccugcaaggugcagagcaaucgggucuuuugugauaccaugaacucccugacacuccccagcgaggugaaccugugcaauaucgacauuuucaacccuaaauacgauuguaagaucaugaccucuaagacagacgucuccagcucugugauuacgucccugggggccaucguuagcugcuauggaaaaaccaagugcacagcuuccaauaaaaaccgcggcaucauuaagaccuuuucuaaugggugugauuacgugagcaacaaaggagucgacacaguguccguuggcaauacccucuauuacgugaacaagcaagaaggcaagucucuguaugucaaaggggagcccaucauuaauuucuacgacccucuuguguuucccagcgaugaguucgacgccuccaucagccaggugaacgaaaagauuaaucagucucuggccuucaucagaaaauccgaugaacuccugcacaacguuaaugucggaaagagcacgaccaacauuaugaucacaaccaucauuaucgugauuaucgugauucugcuucuccugaucgcugucggccuguuucucuacugcaaagcgcggucuacaccggugacccuguccaaggaccagcuuagcgggaucaauaacauugccuucucuaacugaggacuaguguccaccugucccuccugggcugcuggauugucucguuuuccugccaaauaaacaggaucagcgcuuuacagaucuaaaaaaaaaaaaaaaaaaaaaaaaaaaaaaaaaaaaaaaaaaaaaaaaaaaaaaaaaaaaaaaaugcaucccccccccccccccccccccccccccccccaaaggcucuuuucagagccaccagaauu

SEQ ID NO: 11901 - RNA, 2054 nt, Artificial Sequence
  mRNA product Design e-1 comprising derived and/or modified sequence from HRSV(Memphis-37)__AIY60640.1__F0 (opt6)
gggagaauauaagcguuggcggagcgucgguuguagcacucugcgcgcccgcucuucugcugcuguuugucuacuuccuccugcuuccccgccgccgccgccgccaucaagcuuaccauggaacugccuauucuaaaaacaaaugccauaacaacaauucuugcagcaguaacauuauguuuugcaucaucacaaaacauuacagaagaauuuuaccaauccacuugcucagccguaucaaaaggauaccuaucagccuuaagaacagguugguacaccucaguaauaaccauagaacuaucaaacauaaaagaaaacaaaugcaaugguacugaugcaaaagucaaacuaaucaaacaagaacuggacaaauacaaaaaugcaguaaccgaacuacaacuccuaaugcaauccacaccugcagccaacaacagagcaagacgcgaacuaccaagauuuaugaauuacacauuaaacaacaccaagaacaacaauguaacucucucaaaaaaaagaaaaagacgcuuucuagguuuccuccuaggcgucggaucugcaauagccucaggaauagcaguaucaaaaguucuacaccuagaaggagaaguaaacaaaauuaaaaacgcauuacuaucaaccaacaaagcaguuguaucccuuucaaauggagucucuguacuuacaucaaaaguacucgaccuaaaaaacuauauagacaaacaacuacucccaauagucaauaagcaaucaugcagcauaucaaacauagaaacaguuauagaauuucaacaaaaaaacaacagacuacucgaaauaaccagagaauuuagcgucaacgcaggcguaaccacaccgguauccacauacaugcuuacaaacucagaacuccucucacuaauaaacgacaugccaauaacuaaugaccaaaaaaaacuaaugucaaacaauguccaaauaguccgucaacaaucauacucaauaaugucaauaauaaaagaagaaguauuagcauauguaguccaacuaccauuauacggcguuauagacacaccuuguuggaaacuucacacauccccacucuguacaaccaacacaaaagaagguuccaauauaugccuaacuagaaccgacagaggaugguauugcgacaacgcaggaucuguaucauucuuuccccaagcagaaacauguaaaguacaaaguaaccgcguauucugcgacaccaugaacucauuaacccucccauccgaaguuaauuuaugcaauauagacauauuuaauccuaaauacgacugcaaaauaaugacaucaaaaacagacguuaguuccuccguaaucacaucuuugggcgcaauagucucaugcuauggaaaaacaaaaugcacagccucaaacaaaaauagaggaauaauaaaaacauucagcaacggcugugauuauguauccaacaaaggaguagacacaguauccguaggcaauacccuuuacuacguuaauaaacaagaaggaaaaucauuauacgucaaaggagaaccuaucauaaauuucuacgacccauuaguauucccuucagacgaauuugaugccucaauaucccaagucaaugaaaaaaucaaccaaucacuagccuuuauccgcaaaucagacgaauuacuacacaacguaaacguaggcaaaucaacaacuaauauaaugauaacaacaauaauaauaguaauuauaguaauauuauuacuacuaaucgccguagguuuauucuuauacuguaaagcacgaucaacaccaguuacacucucaaaagaucaacuaucaggaauaaacaacauagcauuuuccaauuaaggacuaguguccaccugucccuccugggcugcuggauugucucguuuuccugccaaauaaacaggaucagcgcuuuacagaucuaaaaaaaaaaaaaaaaaaaaaaaaaaaaaaaaaaaaaaaaaaaaaaaaaaaaaaaaaaaaaaaaugcaucccccccccccccccccccccccccccccccaaaggcucuuuucagagccaccagaauu

SEQ ID NO: 11902 - RNA, 2054 nt, Artificial Sequence
  mRNA product Design e-1 comprising derived and/or modified sequence from HRSV(Memphis-37)__AIY60640.1__F0 (opt11)
gggagaauauaagcguuggcggagcgucgguuguagcacucugcgcgcccgcucuucugcugcuguuugucuacuuccuccugcuuccccgccgccgccgccgccaucaagcuuaccauggaacuccccauccucaaaacaaacgccauaaccacuauccucgccgccgucacccucugcuucgccuccucccaaaacaucacagaggaguucuaccaauccacaugcuccgccgucuccaaaggcuaccucagcgcccuacguaccggcugguacaccagcgucaucacaauagaacucuccaacaucaaggaaaacaaaugcaacggcaccgaugccaaaguaaaacucaucaaacaagaacucgauaaauacaaaaacgccgucaccgaacuacaacuccuaaugcaaagcacacccgccgccaacaacagagcacggcgcgaacugccccgcuucaugaacuacacccucaacaacaccaaaaauaacaacgucacccuauccaagaaacgcaaacgccgauuccucgguuuccuacucggcguaggaagcgccauagccucaggcaucgccgucuccaaaguccuccaucuggaaggcgaagucaacaaaaucaaaaacgcacucuuauccaccaacaaagccgucgucucccucucgaacggggucuccguccuuaccuccaaaguccucgaccuuaaaaacuacaucgacaaacaacuacuaccaauagucaauaaacaauccugcuccaucucaaacauagaaaccgucauagaguuccaacagaagaacaaucgccuccucgaaauaacucgcgaguucuccgucaacgcaggcgucacgaccccugucucaacauacaugcuaacuaacucagaacuccuaagccuaaucaacgacaugcccaucacaaacgaccaaaagaaacucaugagcaacaauguccagauagucagacagcaauccuauagcaucaugucuauaauaaaagaagaagugcucgccuacguaguccaacucccucuuuacggcgucauagacacacccugcuggaaacuccacacaucuccucucugcaccaccaacacaaaagaaggcagcaacaucugccugacccgaaccgaccgcggaugguacugcgacaacgcuggcuccgugucuuucuuuccccaagccgaaaccugcaaaguccaguccaaccgcgucuucugcgacacaaugaacucccucacccuacccuccgaaguuaaccucugcaacaucgacaucuucaauccaaaauacgacugcaaaaucaugaccucgaaaacggacguauccuccuccgucauaacaucacuuggagccaucguuagcugcuacggaaaaaccaaauguaccgccuccaacaaaaaccgcggaauaaucaaaacauucuccaacggcugcgacuacguaagcaacaaaggggucgauacugucuccguagguaacacccuauacuacgucaacaaacaagaaggaaaaucacuauacguuaaaggcgaacccauuaucaacuucuacgacccccucguuuucccauccgacgaguucgacgccuccauaagccaaguuaacgaaaagauaaaccaaucgcucgcauucauccgcaaauccgacgaacuccuacacaacgucaacgugggcaaauccacaacaaacaucaugaucaccaccaucauuaucgucauaauagucauccuccuccugcucaucgccgugggacuauuccuauacugcaaagcccgcucgacgcccgucacacuuuccaaagaccaacuaagcggaaucaacaacauagcguucagcaauuaaggacuaguguccaccugucccuccugggcugcuggauugucucguuuuccugccaaauaaacaggaucagcgcuuuacagaucuaaaaaaaaaaaaaaaaaaaaaaaaaaaaaaaaaaaaaaaaaaaaaaaaaaaaaaaaaaaaaaaaugcaucccccccccccccccccccccccccccccccaaaggcucuuuucagagccaccagaauu

SEQ ID NO: 11903 - RNA, 2036 nt, Artificial Sequence
  mRNA product Design e-2 comprising derived and/or modified sequence from HRSV(Memphis-37)__AIY60640.1__F0 (wt)
gggagacccgugacccggaaguuguacggcuacgcgacuuucccucccacaaacccucgcgcccuuccuuuccuacuugggcccggcagaaagcuuaccauggaguugccaauccucaaaacaaaugcaauuaccacaauccuugcugcagucacacucuguuucgcuuccagucaaaacaucacugaagaauuuuaucaaucaacaugcagugcaguuagcaaaggcuaucuuagugcuuuaagaacugguugguauacuaguguuauaacuauagaauuaaguaauaucaaggaaaauaaguguaauggaacagaugcuaagguaaaauugauaaaacaagaauuagauaaauauaaaaaugcuguaacagaauugcaguugcucaugcaaagcacaccagcagccaacaaucgagccagaagagaacuaccaagguuuaugaauuauacacucaacaauaccaaaaauaacaauguaacauuaagcaagaaaaggaaaagaagauuucuuggcuuuuuguuagguguuggaucugcaaucgccaguggcauugcuguaucuaaaguccugcaccuagaaggggaagugaacaaaaucaaaaaugcucuacuauccacaaacaaggcuguagucagcuuaucaaauggaguuagugucuuaaccagcaaaguguuagaccucaaaaacuauauagauaaacaguuguuacccauugugaacaagcaaagcugcagcauaucaaacauugaaacugugauagaauuccaacaaaagaacaacagacuacuagagauuaccagggaauuuaguguuaaugcagguguaacuacaccuguaagcacuuauauguuaacaaauagugaauuauuaucauuaaucaaugauaugccuauaacaaaugaucagaaaaaguuaauguccaacaauguucaaauaguuagacagcaaaguuacucuaucauguccauaauaaaggaggaagucuuagcauauguaguucaauuaccacuauaugguguaauagauacaccuuguuggaaacuacacacauccccucuaugcacaaccaacacaaaggaaggguccaacaucuguuuaacaagaaccgacagaggaugguacugugacaaugcaggaucagugucuuucuucccacaagcugaaacaugcaaaguucaaucgaaucgaguauuuugugacacaaugaacagucuaacauuaccaagugaaguaaaucucugcaacauugacauauucaacccuaaauaugauugcaaaauuaugacuucaaaaacagaugugagcagcuccguuaucacaucucuaggagccauugugucaugcuauggcaaaacuaaauguacagcauccaauaaaaaucguggaaucauaaagacauuuucuaacgggugugauuauguaucaaauaaggggguggacacuguaucuguagguaauacauuauauuauguaaauaagcaagaaggaaaaagccucuauguaaaaggugaaccaauaauaaauuucuaugacccauuaguguucccuucugaugaauuugaugcaucaauaucucaagucaaugagaagauuaaccagagccuagcauuuauucguaaauccgaugaauuauuacauaauguaaauguugguaaauccaccacaaauaucaugauaacuacuauaauuauagugauuauaguaauauuguuauuauuaauugcaguugggcuguuccuauacugcaaggccagaagcacaccagucacacuaagcaaggaucaacugagugguauaaauaauauugcauuuaguaacugaggacuaguguccaccugucccuccugggcugcuggauugucucguuuuccugccaaauaaacaggaucagcgcuuuacagaucuaaaaaaaaaaaaaaaaaaaaaaaaaaaaaaaaaaaaaaaaaaaaaaaaaaaaaaaaaaaaaaaaugcaucccccccccccccccccccccccccccccccaaaggcucuuuucagagccaccagaauu

SEQ ID NO: 11904 - RNA, 2036 nt, Artificial Sequence
  mRNA product Design e-2 comprising derived and/or modified sequence from HRSV(Memphis-37)__AIY60640.1__F0 (opt1)
gggagacccgugacccggaaguuguacggcuacgcgacuuucccucccacaaacccucgcgcccuuccuuuccuacuugggcccggcagaaagcuuaccauggagcugcccauccucaagaccaacgccaucaccacgauccuggccgcggugacccugugcuucgccagcucccagaacaucaccgaggaguucuaccagagcacgugcuccgccgucagcaagggcuaccucuccgcccugcgcaccgggugguacaccagcgugaucaccaucgagcuguccaacaucaaggagaacaagugcaacggcaccgacgccaaggugaagcucaucaagcaggagcuggacaaguacaagaacgcggucacggagcugcagcuccugaugcagagcaccccggccgccaacaaccgggcccgccgggagcugccccgcuucaugaacuacacccucaacaacaccaagaacaacaacgugacgcuguccaagaagcggaagcgccgguuccugggguuccuccugggcguggggagcgcgaucgccuccggcaucgccgucagcaaggugcugcaccucgagggcgaggugaacaagaucaagaacgcccugcuguccaccaacaaggccgucgugagccucuccaacggggugagcguccugaccuccaaggugcuggaccucaagaacuacaucgacaagcagcugcugcccaucgugaacaagcagagcugcuccaucagcaacaucgagaccgucaucgaguuccagcagaagaacaaccgccuccuggagaucacgcgggaguucagcgugaacgcgggcgugaccacccccgucuccaccuacaugcugacgaacagcgagcuccugucccugaucaacgacaugccgaucaccaacgaccagaagaagcucaugagcaacaacgugcagaucgugcgccagcaguccuacagcaucauguccaucaucaaggaggagguccuggccuacguggugcagcugccccucuacggggucaucgacacccccugcuggaagcugcacaccagcccccugugcacgaccaacaccaaggagggcuccaacaucugccucacccggacggaccgcgggugguacugcgacaacgccggcagcguguccuucuucccgcaggccgagaccugcaagguccagagcaaccggguguucugcgacaccaugaacucccugacccugcccagcgaggugaaccucugcaacaucgacaucuucaaccccaaguacgacugcaagaucaugacguccaagaccgacgucagcuccagcgugaucaccucccugggcgccaucgugagcugcuacgggaagaccaagugcacggcgagcaacaagaaccgcggcaucaucaagaccuucuccaacgggugcgacuacgucagcaacaagggcguggacaccguguccgucggcaacacccuguacuacgugaacaagcaggagggcaagagccucuacgugaagggggagcccaucaucaacuucuacgacccgcuggucuuccccuccgacgaguucgacgccagcaucucccaggugaacgagaagaucaaccagagccuggccuucauccggaaguccgacgagcuccugcacaacgugaacgucggcaagagcaccacgaacaucaugaucaccaccaucaucaucgugaucaucgugauccugcugcuccugaucgccgucgggcuguuccucuacugcaaggcccgcuccacccccgugacgcugagcaaggaccagcuguccgggaucaacaacaucgcguucagcaacugaggacuaguguccaccugucccuccugggcugcuggauugucucguuuuccugccaaauaaacaggaucagcgcuuuacagaucuaaaaaaaaaaaaaaaaaaaaaaaaaaaaaaaaaaaaaaaaaaaaaaaaaaaaaaaaaaaaaaaaugcaucccccccccccccccccccccccccccccccaaaggcucuuuucagagccaccagaauu

SEQ ID NO: 11905 - RNA, 2036 nt, Artificial Sequence
  mRNA product Design e-2 comprising derived and/or modified sequence from HRSV(Memphis-37)__AIY60640.1__F0 (opt2)
gggagacccgugacccggaaguuguacggcuacgcgacuuucccucccacaaacccucgcgcccuuccuuuccuacuugggcccggcagaaagcuuaccauggagcuccccauccucaagaccaacgccaucaccaccauccucgccgccgucacccucugcuucgccuccucccagaacaucaccgaggaguucuaccaguccaccugcuccgccgucuccaagggcuaccucuccgcccuccgcaccggcugguacaccuccgucaucaccaucgagcucuccaacaucaaggagaacaagugcaacggcaccgacgccaaggucaagcucaucaagcaggagcucgacaaguacaagaacgccgucaccgagcuccagcuccucaugcaguccacccccgccgccaacaaccgcgcccgccgcgagcucccccgcuucaugaacuacacccucaacaacaccaagaacaacaacgucacccucuccaagaagcgcaagcgccgcuuccucggcuuccuccucggcgucggcuccgccaucgccuccggcaucgccgucuccaagguccuccaccucgagggcgaggucaacaagaucaagaacgcccuccucuccaccaacaaggccgucgucucccucuccaacggcgucuccguccucaccuccaagguccucgaccucaagaacuacaucgacaagcagcuccuccccaucgucaacaagcaguccugcuccaucuccaacaucgagaccgucaucgaguuccagcagaagaacaaccgccuccucgagaucacccgcgaguucuccgucaacgccggcgucaccacccccgucuccaccuacaugcucaccaacuccgagcuccucucccucaucaacgacaugcccaucaccaacgaccagaagaagcucauguccaacaacguccagaucguccgccagcaguccuacuccaucauguccaucaucaaggaggagguccucgccuacgucguccagcucccccucuacggcgucaucgacacccccugcuggaagcuccacaccuccccccucugcaccaccaacaccaaggagggcuccaacaucugccucacccgcaccgaccgcggcugguacugcgacaacgccggcuccgucuccuucuucccccaggccgagaccugcaagguccaguccaaccgcgucuucugcgacaccaugaacucccucacccuccccuccgaggucaaccucugcaacaucgacaucuucaaccccaaguacgacugcaagaucaugaccuccaagaccgacgucuccuccuccgucaucaccucccucggcgccaucgucuccugcuacggcaagaccaagugcaccgccuccaacaagaaccgcggcaucaucaagaccuucuccaacggcugcgacuacgucuccaacaagggcgucgacaccgucuccgucggcaacacccucuacuacgucaacaagcaggagggcaagucccucuacgucaagggcgagcccaucaucaacuucuacgacccccucgucuuccccuccgacgaguucgacgccuccaucucccaggucaacgagaagaucaaccagucccucgccuucauccgcaaguccgacgagcuccuccacaacgucaacgucggcaaguccaccaccaacaucaugaucaccaccaucaucaucgucaucaucgucauccuccuccuccucaucgccgucggccucuuccucuacugcaaggcccgcuccacccccgucacccucuccaaggaccagcucuccggcaucaacaacaucgccuucuccaacugaggacuaguguccaccugucccuccugggcugcuggauugucucguuuuccugccaaauaaacaggaucagcgcuuuacagaucuaaaaaaaaaaaaaaaaaaaaaaaaaaaaaaaaaaaaaaaaaaaaaaaaaaaaaaaaaaaaaaaaugcaucccccccccccccccccccccccccccccccaaaggcucuuuucagagccaccagaauu

SEQ ID NO: 11906 - RNA, 2036 nt, Artificial Sequence
  mRNA product Design e-2 comprising derived and/or modified sequence from HRSV(Memphis-37)__AIY60640.1__F0 (opt3)
gggagacccgugacccggaaguuguacggcuacgcgacuuucccucccacaaacccucgcgcccuuccuuuccuacuugggcccggcagaaagcuuaccauggagcugcccauccucaagaccaacgccauuacaacuauacuugcugcagugacgcugugcuucgccagcucccagaauaucaccgaagaguuuuaccaaucuacauguucagcggucaguaaaggcuauuugagcgcuuuaagaacugggugguacaccuccguuauuacaaucgaacugucuaacauuaaggagaauaaaugcaacggaaccgacgccaaggugaaacuaaucaagcaggaacucgauaaguauaaaaaugcaguaacugagcugcagcuucugaugcagucgaccccugccgcuaacaauagggcacggcgcgaguugccacgauucaugaacuacacacucaauaacacgaagaauaacaaugugacucugagcaaaaagcguaaaagaagguuucuggguuuccucuuaggcgucgggucagccauagcuaguggaaucgccguguccaagguucugcaccuugaaggcgaggugaacaagauuaaaaaugcguugcugucuaccaacaaggcagucgugagccuauccaacgguguaucaguucucacaaguaaagugcuggaccuuaagaauuauaucgauaaacaacuguugccgauugucaacaagcagagcuguucuaucuccaauauagaaacugugauugaguuucagcagaaaaacaaucggcuccuggagaucacccgcgaguucucagugaacgccggggucacaacccccguuagcacguacauguuaacuaauagugaacugcucucucuuauuaacgacaugccuaucacaaaugaucaaaagaagcugauguccaacaaugugcagaucguaagacagcagagcuauucgauuaugucuauaaucaaagaagagguguuggcuuacgucgugcaacuaccacuguacggaguuauugacacccccugcuggaagcuccauacuuccccucuguguacaaccaacacgaaagaaggcucaaauaucugccuuaccaggacagaucggggcugguauugugacaacgccgggagugugagcuuuuucccacaggcagagacuugcaagguccaguccaaucgcguguuuugugauaccaugaacucucugacauugcccagcgagguaaaccucugcaauauagacauuuucaacccuaaauacgauuguaagaucaugacuucaaagaccgacguuaguuccagcgugaucacaucucugggagcuauugucucaugcuaugguaaaaccaagugcacugccaguaauaaaaaccgaggcaucauuaagacguuuagcaaugggugugauuacguguccaacaaaggagucgacacagugucuguuggcaauaccuuauauuacgugaacaagcaagaagguaagucgcuguauguaaaaggggagccaauaaucaauuucuacgacccgcuagucuuucccagcgaugaguucgacgcguccauuucacaggugaacgaaaagaucaaucagagucucgccuucaucagaaaaucugaugaacugcuucacaacguuaaugugggaaagagcacuaccaacauuaugauaacaaccaucauuaucgucauuaucgugauauugcugcuccugaucgcaguaggccuuuuucuguacugcaaagcuagguccacuccugugacauugucaaaggaccagcucagcggcauuaauaacaucgccuucucuaacugaggacuaguguccaccugucccuccugggcugcuggauugucucguuuuccugccaaauaaacaggaucagcgcuuuacagaucuaaaaaaaaaaaaaaaaaaaaaaaaaaaaaaaaaaaaaaaaaaaaaaaaaaaaaaaaaaaaaaaaugcaucccccccccccccccccccccccccccccccaaaggcucuuuucagagccaccagaauu

SEQ ID NO: 11907 - RNA, 2036 nt, Artificial Sequence
  mRNA product Design e-2 comprising derived and/or modified sequence from HRSV(Memphis-37)__AIY60640.1__F0 (opt4)
gggagacccgugacccggaaguuguacggcuacgcgacuuucccucccacaaacccucgcgcccuuccuuuccuacuugggcccggcagaaagcuuaccauggagcugcccauccugaagaccaacgccaucaccaccauccuggccgccgugacccugugcuucgccagcagccagaacaucaccgaggaguucuaccagagcaccugcagcgccgugagcaagggcuaccugagcgcccugagaaccggcugguacaccagcgugaucaccaucgagcugagcaacaucaaggagaacaagugcaacggcaccgacgccaaggugaagcugaucaagcaggagcuggacaaguacaagaacgccgugaccgagcugcagcugcugaugcagagcacccccgccgccaacaacagagccagaagagagcugcccagauucaugaacuacacccugaacaacaccaagaacaacaacgugacccugagcaagaagagaaagagaagauuccugggcuuccugcugggcgugggcagcgccaucgccagcggcaucgccgugagcaaggugcugcaccuggagggcgaggugaacaagaucaagaacgcccugcugagcaccaacaaggccguggugagccugagcaacggcgugagcgugcugaccagcaaggugcuggaccugaagaacuacaucgacaagcagcugcugcccaucgugaacaagcagagcugcagcaucagcaacaucgagaccgugaucgaguuccagcagaagaacaacagacugcuggagaucaccagagaguucagcgugaacgccggcgugaccacccccgugagcaccuacaugcugaccaacagcgagcugcugagccugaucaacgacaugcccaucaccaacgaccagaagaagcugaugagcaacaacgugcagaucgugagacagcagagcuacagcaucaugagcaucaucaaggaggaggugcuggccuacguggugcagcugccccuguacggcgugaucgacacccccugcuggaagcugcacaccagcccccugugcaccaccaacaccaaggagggcagcaacaucugccugaccagaaccgacagaggcugguacugcgacaacgccggcagcgugagcuucuucccccaggccgagaccugcaaggugcagagcaacagaguguucugcgacaccaugaacagccugacccugcccagcgaggugaaccugugcaacaucgacaucuucaaccccaaguacgacugcaagaucaugaccagcaagaccgacgugagcagcagcgugaucaccagccugggcgccaucgugagcugcuacggcaagaccaagugcaccgccagcaacaagaacagaggcaucaucaagaccuucagcaacggcugcgacuacgugagcaacaagggcguggacaccgugagcgugggcaacacccuguacuacgugaacaagcaggagggcaagagccuguacgugaagggcgagcccaucaucaacuucuacgacccccugguguuccccagcgacgaguucgacgccagcaucagccaggugaacgagaagaucaaccagagccuggccuucaucagaaagagcgacgagcugcugcacaacgugaacgugggcaagagcaccaccaacaucaugaucaccaccaucaucaucgugaucaucgugauccugcugcugcugaucgccgugggccuguuccuguacugcaaggccagaagcacccccgugacccugagcaaggaccagcugagcggcaucaacaacaucgccuucagcaacugaggacuaguguccaccugucccuccugggcugcuggauugucucguuuuccugccaaauaaacaggaucagcgcuuuacagaucuaaaaaaaaaaaaaaaaaaaaaaaaaaaaaaaaaaaaaaaaaaaaaaaaaaaaaaaaaaaaaaaaugcaucccccccccccccccccccccccccccccccaaaggcucuuuucagagccaccagaauu

SEQ ID NO: 11908 - RNA, 2036 nt, Artificial Sequence
  mRNA product Design e-2 comprising derived and/or modified sequence from HRSV(Memphis-37)__AIY60640.1__F0 (opt5)
gggagacccgugacccggaaguuguacggcuacgcgacuuucccucccacaaacccucgcgcccuuccuuuccuacuugggcccggcagaaagcuuaccauggagcugcccauccucaagaccaacgccauuacaacgauccuggcugccgugacccuuugcuucgcgagcucccagaauauuacagaagaguuuuaccaaucuaccuguagcgcugucuccaaaggcuaucugucugcccucagaacagggugguacaccagcguuaucacaauugaacuguccaacaucaaggagaauaaaugcaacggaaccgacgccaaggugaaacuuaucaagcaggaacuggauaaguauaaaaaugcugugacggagcuccagcugcugaugcagucuaccccugccgcuaacaaucgggcccgcagagagcucccgcgguucaugaacuacacacugaauaacaccaagaauaacaaugucacacuuagcaaaaagcgcaaaagacgguuucugggcuuccuccugggggugggauccgcgauugccagcggcaucgcuguuucuaaggugcuucaccuggaaggggaggucaacaagauuaaaaaugcccuccuguccaccaacaaggcugugguuagccugucuaacggaguguccguccucacgagcaaagugcuggaccuuaagaauuauaucgauaaacaacugcuccccauugugaacaagcagucuuguuccaucagcaauauugaaacagucaucgaguuucagcagaaaaacaaucgccugcuugagaucaccagagaauuuuccguuaacgccggcgugacaaccccugugucuaccuacaugcugacaaauagcgagcuccugucccugauuaacgacaugcccaucacgaaugaucaaaagaagcucaugagcaacaauguccagauugugcggcagcagucuuauuccaucaugagcauuaucaaagaagagguucuggcguacgugguccaacuuccucuguacggcgugaucgacacccccugcuggaagcuccauacaucuccucuguguaccacaaacaccaaagaagggagcaauauuugccuuacgcgcacagauagaggaugguauugugacaacgccggcuccguuucuuucuucccgcaggcugagaccugcaaggugcagagcaaucgggucuuuugugauaccaugaacucccugacacuccccagcgaggugaaccugugcaauaucgacauuuucaacccuaaauacgauuguaagaucaugaccucuaagacagacgucuccagcucugugauuacgucccugggggccaucguuagcugcuauggaaaaaccaagugcacagcuuccaauaaaaaccgcggcaucauuaagaccuuuucuaaugggugugauuacgugagcaacaaaggagucgacacaguguccguuggcaauacccucuauuacgugaacaagcaagaaggcaagucucuguaugucaaaggggagcccaucauuaauuucuacgacccucuuguguuucccagcgaugaguucgacgccuccaucagccaggugaacgaaaagauuaaucagucucuggccuucaucagaaaauccgaugaacuccugcacaacguuaaugucggaaagagcacgaccaacauuaugaucacaaccaucauuaucgugauuaucgugauucugcuucuccugaucgcugucggccuguuucucuacugcaaagcgcggucuacaccggugacccuguccaaggaccagcuuagcgggaucaauaacauugccuucucuaacugaggacuaguguccaccugucccuccugggcugcuggauugucucguuuuccugccaaauaaacaggaucagcgcuuuacagaucuaaaaaaaaaaaaaaaaaaaaaaaaaaaaaaaaaaaaaaaaaaaaaaaaaaaaaaaaaaaaaaaaugcaucccccccccccccccccccccccccccccccaaaggcucuuuucagagccaccagaauu

SEQ ID NO: 11909 - RNA, 2036 nt, Artificial Sequence
  mRNA product Design e-2 comprising derived and/or modified sequence from HRSV(Memphis-37)__AIY60640.1__F0 (opt6)
gggagacccgugacccggaaguuguacggcuacgcgacuuucccucccacaaacccucgcgcccuuccuuuccuacuugggcccggcagaaagcuuaccauggaacugccuauucuaaaaacaaaugccauaacaacaauucuugcagcaguaacauuauguuuugcaucaucacaaaacauuacagaagaauuuuaccaauccacuugcucagccguaucaaaaggauaccuaucagccuuaagaacagguugguacaccucaguaauaaccauagaacuaucaaacauaaaagaaaacaaaugcaaugguacugaugcaaaagucaaacuaaucaaacaagaacuggacaaauacaaaaaugcaguaaccgaacuacaacuccuaaugcaauccacaccugcagccaacaacagagcaagacgcgaacuaccaagauuuaugaauuacacauuaaacaacaccaagaacaacaauguaacucucucaaaaaaaagaaaaagacgcuuucuagguuuccuccuaggcgucggaucugcaauagccucaggaauagcaguaucaaaaguucuacaccuagaaggagaaguaaacaaaauuaaaaacgcauuacuaucaaccaacaaagcaguuguaucccuuucaaauggagucucuguacuuacaucaaaaguacucgaccuaaaaaacuauauagacaaacaacuacucccaauagucaauaagcaaucaugcagcauaucaaacauagaaacaguuauagaauuucaacaaaaaaacaacagacuacucgaaauaaccagagaauuuagcgucaacgcaggcguaaccacaccgguauccacauacaugcuuacaaacucagaacuccucucacuaauaaacgacaugccaauaacuaaugaccaaaaaaaacuaaugucaaacaauguccaaauaguccgucaacaaucauacucaauaaugucaauaauaaaagaagaaguauuagcauauguaguccaacuaccauuauacggcguuauagacacaccuuguuggaaacuucacacauccccacucuguacaaccaacacaaaagaagguuccaauauaugccuaacuagaaccgacagaggaugguauugcgacaacgcaggaucuguaucauucuuuccccaagcagaaacauguaaaguacaaaguaaccgcguauucugcgacaccaugaacucauuaacccucccauccgaaguuaauuuaugcaauauagacauauuuaauccuaaauacgacugcaaaauaaugacaucaaaaacagacguuaguuccuccguaaucacaucuuugggcgcaauagucucaugcuauggaaaaacaaaaugcacagccucaaacaaaaauagaggaauaauaaaaacauucagcaacggcugugauuauguauccaacaaaggaguagacacaguauccguaggcaauacccuuuacuacguuaauaaacaagaaggaaaaucauuauacgucaaaggagaaccuaucauaaauuucuacgacccauuaguauucccuucagacgaauuugaugccucaauaucccaagucaaugaaaaaaucaaccaaucacuagccuuuauccgcaaaucagacgaauuacuacacaacguaaacguaggcaaaucaacaacuaauauaaugauaacaacaauaauaauaguaauuauaguaauauuauuacuacuaaucgccguagguuuauucuuauacuguaaagcacgaucaacaccaguuacacucucaaaagaucaacuaucaggaauaaacaacauagcauuuuccaauuaaggacuaguguccaccugucccuccugggcugcuggauugucucguuuuccugccaaauaaacaggaucagcgcuuuacagaucuaaaaaaaaaaaaaaaaaaaaaaaaaaaaaaaaaaaaaaaaaaaaaaaaaaaaaaaaaaaaaaaaugcaucccccccccccccccccccccccccccccccaaaggcucuuuucagagccaccagaauu

SEQ ID NO: 11910 - RNA, 2036 nt, Artificial Sequence
  mRNA product Design e-2 comprising derived and/or modified sequence from HRSV(Memphis-37)__AIY60640.1__F0 (opt11)
gggagacccgugacccggaaguuguacggcuacgcgacuuucccucccacaaacccucgcgcccuuccuuuccuacuugggcccggcagaaagcuuaccauggaacuccccauccucaaaacaaacgccauaaccacuauccucgccgccgucacccucugcuucgccuccucccaaaacaucacagaggaguucuaccaauccacaugcuccgccgucuccaaaggcuaccucagcgcccuacguaccggcugguacaccagcgucaucacaauagaacucuccaacaucaaggaaaacaaaugcaacggcaccgaugccaaaguaaaacucaucaaacaagaacucgauaaauacaaaaacgccgucaccgaacuacaacuccuaaugcaaagcacacccgccgccaacaacagagcacggcgcgaacugccccgcuucaugaacuacacccucaacaacaccaaaaauaacaacgucacccuauccaagaaacgcaaacgccgauuccucgguuuccuacucggcguaggaagcgccauagccucaggcaucgccgucuccaaaguccuccaucuggaaggcgaagucaacaaaaucaaaaacgcacucuuauccaccaacaaagccgucgucucccucucgaacggggucuccguccuuaccuccaaaguccucgaccuuaaaaacuacaucgacaaacaacuacuaccaauagucaauaaacaauccugcuccaucucaaacauagaaaccgucauagaguuccaacagaagaacaaucgccuccucgaaauaacucgcgaguucuccgucaacgcaggcgucacgaccccugucucaacauacaugcuaacuaacucagaacuccuaagccuaaucaacgacaugcccaucacaaacgaccaaaagaaacucaugagcaacaauguccagauagucagacagcaauccuauagcaucaugucuauaauaaaagaagaagugcucgccuacguaguccaacucccucuuuacggcgucauagacacacccugcuggaaacuccacacaucuccucucugcaccaccaacacaaaagaaggcagcaacaucugccugacccgaaccgaccgcggaugguacugcgacaacgcuggcuccgugucuuucuuuccccaagccgaaaccugcaaaguccaguccaaccgcgucuucugcgacacaaugaacucccucacccuacccuccgaaguuaaccucugcaacaucgacaucuucaauccaaaauacgacugcaaaaucaugaccucgaaaacggacguauccuccuccgucauaacaucacuuggagccaucguuagcugcuacggaaaaaccaaauguaccgccuccaacaaaaaccgcggaauaaucaaaacauucuccaacggcugcgacuacguaagcaacaaaggggucgauacugucuccguagguaacacccuauacuacgucaacaaacaagaaggaaaaucacuauacguuaaaggcgaacccauuaucaacuucuacgacccccucguuuucccauccgacgaguucgacgccuccauaagccaaguuaacgaaaagauaaaccaaucgcucgcauucauccgcaaauccgacgaacuccuacacaacgucaacgugggcaaauccacaacaaacaucaugaucaccaccaucauuaucgucauaauagucauccuccuccugcucaucgccgugggacuauuccuauacugcaaagcccgcucgacgcccgucacacuuuccaaagaccaacuaagcggaaucaacaacauagcguucagcaauuaaggacuaguguccaccugucccuccugggcugcuggauugucucguuuuccugccaaauaaacaggaucagcgcuuuacagaucuaaaaaaaaaaaaaaaaaaaaaaaaaaaaaaaaaaaaaaaaaaaaaaaaaaaaaaaaaaaaaaaaugcaucccccccccccccccccccccccccccccccaaaggcucuuuucagagccaccagaauu

SEQ ID NO: 11911 - RNA, 2006 nt, Artificial Sequence
  mRNA product Design e-3 comprising derived and/or modified sequence from HRSV(Memphis-37)__AIY60640.1__F0 (wt)
gggagacuuucccauucuguagcagaauuugguguugccuguggucuuggucccgcggagaagcuuaccauggaguugccaauccucaaaacaaaugcaauuaccacaauccuugcugcagucacacucuguuucgcuuccagucaaaacaucacugaagaauuuuaucaaucaacaugcagugcaguuagcaaaggcuaucuuagugcuuuaagaacugguugguauacuaguguuauaacuauagaauuaaguaauaucaaggaaaauaaguguaauggaacagaugcuaagguaaaauugauaaaacaagaauuagauaaauauaaaaaugcuguaacagaauugcaguugcucaugcaaagcacaccagcagccaacaaucgagccagaagagaacuaccaagguuuaugaauuauacacucaacaauaccaaaaauaacaauguaacauuaagcaagaaaaggaaaagaagauuucuuggcuuuuuguuagguguuggaucugcaaucgccaguggcauugcuguaucuaaaguccugcaccuagaaggggaagugaacaaaaucaaaaaugcucuacuauccacaaacaaggcuguagucagcuuaucaaauggaguuagugucuuaaccagcaaaguguuagaccucaaaaacuauauagauaaacaguuguuacccauugugaacaagcaaagcugcagcauaucaaacauugaaacugugauagaauuccaacaaaagaacaacagacuacuagagauuaccagggaauuuaguguuaaugcagguguaacuacaccuguaagcacuuauauguuaacaaauagugaauuauuaucauuaaucaaugauaugccuauaacaaaugaucagaaaaaguuaauguccaacaauguucaaauaguuagacagcaaaguuacucuaucauguccauaauaaaggaggaagucuuagcauauguaguucaauuaccacuauaugguguaauagauacaccuuguuggaaacuacacacauccccucuaugcacaaccaacacaaaggaaggguccaacaucuguuuaacaagaaccgacagaggaugguacugugacaaugcaggaucagugucuuucuucccacaagcugaaacaugcaaaguucaaucgaaucgaguauuuugugacacaaugaacagucuaacauuaccaagugaaguaaaucucugcaacauugacauauucaacccuaaauaugauugcaaaauuaugacuucaaaaacagaugugagcagcuccguuaucacaucucuaggagccauugugucaugcuauggcaaaacuaaauguacagcauccaauaaaaaucguggaaucauaaagacauuuucuaacgggugugauuauguaucaaauaaggggguggacacuguaucuguagguaauacauuauauuauguaaauaagcaagaaggaaaaagccucuauguaaaaggugaaccaauaauaaauuucuaugacccauuaguguucccuucugaugaauuugaugcaucaauaucucaagucaaugagaagauuaaccagagccuagcauuuauucguaaauccgaugaauuauuacauaauguaaauguugguaaauccaccacaaauaucaugauaacuacuauaauuauagugauuauaguaauauuguuauuauuaauugcaguugggcuguuccuauacugcaaggccagaagcacaccagucacacuaagcaaggaucaacugagugguauaaauaauauugcauuuaguaacugaggacuaguguccaccugucccuccugggcugcuggauugucucguuuuccugccaaauaaacaggaucagcgcuuuacagaucuaaaaaaaaaaaaaaaaaaaaaaaaaaaaaaaaaaaaaaaaaaaaaaaaaaaaaaaaaaaaaaaaugcaucccccccccccccccccccccccccccccccaaaggcucuuuucagagccaccagaauu

SEQ ID NO: 11912 - RNA, 2006 nt, Artificial Sequence
  mRNA product Design e-3 comprising derived and/or modified sequence from HRSV(Memphis-37)__AIY60640.1__F0 (opt1)
gggagacuuucccauucuguagcagaauuugguguugccuguggucuuggucccgcggagaagcuuaccauggagcugcccauccucaagaccaacgccaucaccacgauccuggccgcggugacccugugcuucgccagcucccagaacaucaccgaggaguucuaccagagcacgugcuccgccgucagcaagggcuaccucuccgcccugcgcaccgggugguacaccagcgugaucaccaucgagcuguccaacaucaaggagaacaagugcaacggcaccgacgccaaggugaagcucaucaagcaggagcuggacaaguacaagaacgcggucacggagcugcagcuccugaugcagagcaccccggccgccaacaaccgggcccgccgggagcugccccgcuucaugaacuacacccucaacaacaccaagaacaacaacgugacgcuguccaagaagcggaagcgccgguuccugggguuccuccugggcguggggagcgcgaucgccuccggcaucgccgucagcaaggugcugcaccucgagggcgaggugaacaagaucaagaacgcccugcuguccaccaacaaggccgucgugagccucuccaacggggugagcguccugaccuccaaggugcuggaccucaagaacuacaucgacaagcagcugcugcccaucgugaacaagcagagcugcuccaucagcaacaucgagaccgucaucgaguuccagcagaagaacaaccgccuccuggagaucacgcgggaguucagcgugaacgcgggcgugaccacccccgucuccaccuacaugcugacgaacagcgagcuccugucccugaucaacgacaugccgaucaccaacgaccagaagaagcucaugagcaacaacgugcagaucgugcgccagcaguccuacagcaucauguccaucaucaaggaggagguccuggccuacguggugcagcugccccucuacggggucaucgacacccccugcuggaagcugcacaccagcccccugugcacgaccaacaccaaggagggcuccaacaucugccucacccggacggaccgcgggugguacugcgacaacgccggcagcguguccuucuucccgcaggccgagaccugcaagguccagagcaaccggguguucugcgacaccaugaacucccugacccugcccagcgaggugaaccucugcaacaucgacaucuucaaccccaaguacgacugcaagaucaugacguccaagaccgacgucagcuccagcgugaucaccucccugggcgccaucgugagcugcuacgggaagaccaagugcacggcgagcaacaagaaccgcggcaucaucaagaccuucuccaacgggugcgacuacgucagcaacaagggcguggacaccguguccgucggcaacacccuguacuacgugaacaagcaggagggcaagagccucuacgugaagggggagcccaucaucaacuucuacgacccgcuggucuuccccuccgacgaguucgacgccagcaucucccaggugaacgagaagaucaaccagagccuggccuucauccggaaguccgacgagcuccugcacaacgugaacgucggcaagagcaccacgaacaucaugaucaccaccaucaucaucgugaucaucgugauccugcugcuccugaucgccgucgggcuguuccucuacugcaaggcccgcuccacccccgugacgcugagcaaggaccagcuguccgggaucaacaacaucgcguucagcaacugaggacuaguguccaccugucccuccugggcugcuggauugucucguuuuccugccaaauaaacaggaucagcgcuuuacagaucuaaaaaaaaaaaaaaaaaaaaaaaaaaaaaaaaaaaaaaaaaaaaaaaaaaaaaaaaaaaaaaaaugcaucccccccccccccccccccccccccccccccaaaggcucuuuucagagccaccagaauu

SEQ ID NO: 11913 - RNA, 2006 nt, Artificial Sequence
  mRNA product Design e-3 comprising derived and/or modified sequence from HRSV(Memphis-37)__AIY60640.1__F0 (opt2)
gggagacuuucccauucuguagcagaauuugguguugccuguggucuuggucccgcggagaagcuuaccauggagcuccccauccucaagaccaacgccaucaccaccauccucgccgccgucacccucugcuucgccuccucccagaacaucaccgaggaguucuaccaguccaccugcuccgccgucuccaagggcuaccucuccgcccuccgcaccggcugguacaccuccgucaucaccaucgagcucuccaacaucaaggagaacaagugcaacggcaccgacgccaaggucaagcucaucaagcaggagcucgacaaguacaagaacgccgucaccgagcuccagcuccucaugcaguccacccccgccgccaacaaccgcgcccgccgcgagcucccccgcuucaugaacuacacccucaacaacaccaagaacaacaacgucacccucuccaagaagcgcaagcgccgcuuccucggcuuccuccucggcgucggcuccgccaucgccuccggcaucgccgucuccaagguccuccaccucgagggcgaggucaacaagaucaagaacgcccuccucuccaccaacaaggccgucgucucccucuccaacggcgucuccguccucaccuccaagguccucgaccucaagaacuacaucgacaagcagcuccuccccaucgucaacaagcaguccugcuccaucuccaacaucgagaccgucaucgaguuccagcagaagaacaaccgccuccucgagaucacccgcgaguucuccgucaacgccggcgucaccacccccgucuccaccuacaugcucaccaacuccgagcuccucucccucaucaacgacaugcccaucaccaacgaccagaagaagcucauguccaacaacguccagaucguccgccagcaguccuacuccaucauguccaucaucaaggaggagguccucgccuacgucguccagcucccccucuacggcgucaucgacacccccugcuggaagcuccacaccuccccccucugcaccaccaacaccaaggagggcuccaacaucugccucacccgcaccgaccgcggcugguacugcgacaacgccggcuccgucuccuucuucccccaggccgagaccugcaagguccaguccaaccgcgucuucugcgacaccaugaacucccucacccuccccuccgaggucaaccucugcaacaucgacaucuucaaccccaaguacgacugcaagaucaugaccuccaagaccgacgucuccuccuccgucaucaccucccucggcgccaucgucuccugcuacggcaagaccaagugcaccgccuccaacaagaaccgcggcaucaucaagaccuucuccaacggcugcgacuacgucuccaacaagggcgucgacaccgucuccgucggcaacacccucuacuacgucaacaagcaggagggcaagucccucuacgucaagggcgagcccaucaucaacuucuacgacccccucgucuuccccuccgacgaguucgacgccuccaucucccaggucaacgagaagaucaaccagucccucgccuucauccgcaaguccgacgagcuccuccacaacgucaacgucggcaaguccaccaccaacaucaugaucaccaccaucaucaucgucaucaucgucauccuccuccuccucaucgccgucggccucuuccucuacugcaaggcccgcuccacccccgucacccucuccaaggaccagcucuccggcaucaacaacaucgccuucuccaacugaggacuaguguccaccugucccuccugggcugcuggauugucucguuuuccugccaaauaaacaggaucagcgcuuuacagaucuaaaaaaaaaaaaaaaaaaaaaaaaaaaaaaaaaaaaaaaaaaaaaaaaaaaaaaaaaaaaaaaaugcaucccccccccccccccccccccccccccccccaaaggcucuuuucagagccaccagaauu

SEQ ID NO: 11914 - RNA, 2006 nt, Artificial Sequence
  mRNA product Design e-3 comprising derived and/or modified sequence from HRSV(Memphis-37)__AIY60640.1__F0 (opt3)
gggagacuuucccauucuguagcagaauuugguguugccuguggucuuggucccgcggagaagcuuaccauggagcugcccauccucaagaccaacgccauuacaacuauacuugcugcagugacgcugugcuucgccagcucccagaauaucaccgaagaguuuuaccaaucuacauguucagcggucaguaaaggcuauuugagcgcuuuaagaacugggugguacaccuccguuauuacaaucgaacugucuaacauuaaggagaauaaaugcaacggaaccgacgccaaggugaaacuaaucaagcaggaacucgauaaguauaaaaaugcaguaacugagcugcagcuucugaugcagucgaccccugccgcuaacaauagggcacggcgcgaguugccacgauucaugaacuacacacucaauaacacgaagaauaacaaugugacucugagcaaaaagcguaaaagaagguuucuggguuuccucuuaggcgucgggucagccauagcuaguggaaucgccguguccaagguucugcaccuugaaggcgaggugaacaagauuaaaaaugcguugcugucuaccaacaaggcagucgugagccuauccaacgguguaucaguucucacaaguaaagugcuggaccuuaagaauuauaucgauaaacaacuguugccgauugucaacaagcagagcuguucuaucuccaauauagaaacugugauugaguuucagcagaaaaacaaucggcuccuggagaucacccgcgaguucucagugaacgccggggucacaacccccguuagcacguacauguuaacuaauagugaacugcucucucuuauuaacgacaugccuaucacaaaugaucaaaagaagcugauguccaacaaugugcagaucguaagacagcagagcuauucgauuaugucuauaaucaaagaagagguguuggcuuacgucgugcaacuaccacuguacggaguuauugacacccccugcuggaagcuccauacuuccccucuguguacaaccaacacgaaagaaggcucaaauaucugccuuaccaggacagaucggggcugguauugugacaacgccgggagugugagcuuuuucccacaggcagagacuugcaagguccaguccaaucgcguguuuugugauaccaugaacucucugacauugcccagcgagguaaaccucugcaauauagacauuuucaacccuaaauacgauuguaagaucaugacuucaaagaccgacguuaguuccagcgugaucacaucucugggagcuauugucucaugcuaugguaaaaccaagugcacugccaguaauaaaaaccgaggcaucauuaagacguuuagcaaugggugugauuacguguccaacaaaggagucgacacagugucuguuggcaauaccuuauauuacgugaacaagcaagaagguaagucgcuguauguaaaaggggagccaauaaucaauuucuacgacccgcuagucuuucccagcgaugaguucgacgcguccauuucacaggugaacgaaaagaucaaucagagucucgccuucaucagaaaaucugaugaacugcuucacaacguuaaugugggaaagagcacuaccaacauuaugauaacaaccaucauuaucgucauuaucgugauauugcugcuccugaucgcaguaggccuuuuucuguacugcaaagcuagguccacuccugugacauugucaaaggaccagcucagcggcauuaauaacaucgccuucucuaacugaggacuaguguccaccugucccuccugggcugcuggauugucucguuuuccugccaaauaaacaggaucagcgcuuuacagaucuaaaaaaaaaaaaaaaaaaaaaaaaaaaaaaaaaaaaaaaaaaaaaaaaaaaaaaaaaaaaaaaaugcaucccccccccccccccccccccccccccccccaaaggcucuuuucagagccaccagaauu

SEQ ID NO: 11915 - RNA, 2006 nt, Artificial Sequence
  mRNA product Design e-3 comprising derived and/or modified sequence from HRSV(Memphis-37)__AIY60640.1__F0 (opt4)
gggagacuuucccauucuguagcagaauuugguguugccuguggucuuggucccgcggagaagcuuaccauggagcugcccauccugaagaccaacgccaucaccaccauccuggccgccgugacccugugcuucgccagcagccagaacaucaccgaggaguucuaccagagcaccugcagcgccgugagcaagggcuaccugagcgcccugagaaccggcugguacaccagcgugaucaccaucgagcugagcaacaucaaggagaacaagugcaacggcaccgacgccaaggugaagcugaucaagcaggagcuggacaaguacaagaacgccgugaccgagcugcagcugcugaugcagagcacccccgccgccaacaacagagccagaagagagcugcccagauucaugaacuacacccugaacaacaccaagaacaacaacgugacccugagcaagaagagaaagagaagauuccugggcuuccugcugggcgugggcagcgccaucgccagcggcaucgccgugagcaaggugcugcaccuggagggcgaggugaacaagaucaagaacgcccugcugagcaccaacaaggccguggugagccugagcaacggcgugagcgugcugaccagcaaggugcuggaccugaagaacuacaucgacaagcagcugcugcccaucgugaacaagcagagcugcagcaucagcaacaucgagaccgugaucgaguuccagcagaagaacaacagacugcuggagaucaccagagaguucagcgugaacgccggcgugaccacccccgugagcaccuacaugcugaccaacagcgagcugcugagccugaucaacgacaugcccaucaccaacgaccagaagaagcugaugagcaacaacgugcagaucgugagacagcagagcuacagcaucaugagcaucaucaaggaggaggugcuggccuacguggugcagcugccccuguacggcgugaucgacacccccugcuggaagcugcacaccagcccccugugcaccaccaacaccaaggagggcagcaacaucugccugaccagaaccgacagaggcugguacugcgacaacgccggcagcgugagcuucuucccccaggccgagaccugcaaggugcagagcaacagaguguucugcgacaccaugaacagccugacccugcccagcgaggugaaccugugcaacaucgacaucuucaaccccaaguacgacugcaagaucaugaccagcaagaccgacgugagcagcagcgugaucaccagccugggcgccaucgugagcugcuacggcaagaccaagugcaccgccagcaacaagaacagaggcaucaucaagaccuucagcaacggcugcgacuacgugagcaacaagggcguggacaccgugagcgugggcaacacccuguacuacgugaacaagcaggagggcaagagccuguacgugaagggcgagcccaucaucaacuucuacgacccccugguguuccccagcgacgaguucgacgccagcaucagccaggugaacgagaagaucaaccagagccuggccuucaucagaaagagcgacgagcugcugcacaacgugaacgugggcaagagcaccaccaacaucaugaucaccaccaucaucaucgugaucaucgugauccugcugcugcugaucgccgugggccuguuccuguacugcaaggccagaagcacccccgugacccugagcaaggaccagcugagcggcaucaacaacaucgccuucagcaacugaggacuaguguccaccugucccuccugggcugcuggauugucucguuuuccugccaaauaaacaggaucagcgcuuuacagaucuaaaaaaaaaaaaaaaaaaaaaaaaaaaaaaaaaaaaaaaaaaaaaaaaaaaaaaaaaaaaaaaaugcaucccccccccccccccccccccccccccccccaaaggcucuuuucagagccaccagaauu

SEQ ID NO: 11916 - RNA, 2006 nt, Artificial Sequence
  mRNA product Design e-3 comprising derived and/or modified sequence from HRSV(Memphis-37)__AIY60640.1__F0 (opt5)
gggagacuuucccauucuguagcagaauuugguguugccuguggucuuggucccgcggagaagcuuaccauggagcugcccauccucaagaccaacgccauuacaacgauccuggcugccgugacccuuugcuucgcgagcucccagaauauuacagaagaguuuuaccaaucuaccuguagcgcugucuccaaaggcuaucugucugcccucagaacagggugguacaccagcguuaucacaauugaacuguccaacaucaaggagaauaaaugcaacggaaccgacgccaaggugaaacuuaucaagcaggaacuggauaaguauaaaaaugcugugacggagcuccagcugcugaugcagucuaccccugccgcuaacaaucgggcccgcagagagcucccgcgguucaugaacuacacacugaauaacaccaagaauaacaaugucacacuuagcaaaaagcgcaaaagacgguuucugggcuuccuccugggggugggauccgcgauugccagcggcaucgcuguuucuaaggugcuucaccuggaaggggaggucaacaagauuaaaaaugcccuccuguccaccaacaaggcugugguuagccugucuaacggaguguccguccucacgagcaaagugcuggaccuuaagaauuauaucgauaaacaacugcuccccauugugaacaagcagucuuguuccaucagcaauauugaaacagucaucgaguuucagcagaaaaacaaucgccugcuugagaucaccagagaauuuuccguuaacgccggcgugacaaccccugugucuaccuacaugcugacaaauagcgagcuccugucccugauuaacgacaugcccaucacgaaugaucaaaagaagcucaugagcaacaauguccagauugugcggcagcagucuuauuccaucaugagcauuaucaaagaagagguucuggcguacgugguccaacuuccucuguacggcgugaucgacacccccugcuggaagcuccauacaucuccucuguguaccacaaacaccaaagaagggagcaauauuugccuuacgcgcacagauagaggaugguauugugacaacgccggcuccguuucuuucuucccgcaggcugagaccugcaaggugcagagcaaucgggucuuuugugauaccaugaacucccugacacuccccagcgaggugaaccugugcaauaucgacauuuucaacccuaaauacgauuguaagaucaugaccucuaagacagacgucuccagcucugugauuacgucccugggggccaucguuagcugcuauggaaaaaccaagugcacagcuuccaauaaaaaccgcggcaucauuaagaccuuuucuaaugggugugauuacgugagcaacaaaggagucgacacaguguccguuggcaauacccucuauuacgugaacaagcaagaaggcaagucucuguaugucaaaggggagcccaucauuaauuucuacgacccucuuguguuucccagcgaugaguucgacgccuccaucagccaggugaacgaaaagauuaaucagucucuggccuucaucagaaaauccgaugaacuccugcacaacguuaaugucggaaagagcacgaccaacauuaugaucacaaccaucauuaucgugauuaucgugauucugcuucuccugaucgcugucggccuguuucucuacugcaaagcgcggucuacaccggugacccuguccaaggaccagcuuagcgggaucaauaacauugccuucucuaacugaggacuaguguccaccugucccuccugggcugcuggauugucucguuuuccugccaaauaaacaggaucagcgcuuuacagaucuaaaaaaaaaaaaaaaaaaaaaaaaaaaaaaaaaaaaaaaaaaaaaaaaaaaaaaaaaaaaaaaaugcaucccccccccccccccccccccccccccccccaaaggcucuuuucagagccaccagaauu

SEQ ID NO: 11917 - RNA, 2006 nt, Artificial Sequence
  mRNA product Design e-3 comprising derived and/or modified sequence from HRSV(Memphis-37)__AIY60640.1__F0 (opt6)
gggagacuuucccauucuguagcagaauuugguguugccuguggucuuggucccgcggagaagcuuaccauggaacugccuauucuaaaaacaaaugccauaacaacaauucuugcagcaguaacauuauguuuugcaucaucacaaaacauuacagaagaauuuuaccaauccacuugcucagccguaucaaaaggauaccuaucagccuuaagaacagguugguacaccucaguaauaaccauagaacuaucaaacauaaaagaaaacaaaugcaaugguacugaugcaaaagucaaacuaaucaaacaagaacuggacaaauacaaaaaugcaguaaccgaacuacaacuccuaaugcaauccacaccugcagccaacaacagagcaagacgcgaacuaccaagauuuaugaauuacacauuaaacaacaccaagaacaacaauguaacucucucaaaaaaaagaaaaagacgcuuucuagguuuccuccuaggcgucggaucugcaauagccucaggaauagcaguaucaaaaguucuacaccuagaaggagaaguaaacaaaauuaaaaacgcauuacuaucaaccaacaaagcaguuguaucccuuucaaauggagucucuguacuuacaucaaaaguacucgaccuaaaaaacuauauagacaaacaacuacucccaauagucaauaagcaaucaugcagcauaucaaacauagaaacaguuauagaauuucaacaaaaaaacaacagacuacucgaaauaaccagagaauuuagcgucaacgcaggcguaaccacaccgguauccacauacaugcuuacaaacucagaacuccucucacuaauaaacgacaugccaauaacuaaugaccaaaaaaaacuaaugucaaacaauguccaaauaguccgucaacaaucauacucaauaaugucaauaauaaaagaagaaguauuagcauauguaguccaacuaccauuauacggcguuauagacacaccuuguuggaaacuucacacauccccacucuguacaaccaacacaaaagaagguuccaauauaugccuaacuagaaccgacagaggaugguauugcgacaacgcaggaucuguaucauucuuuccccaagcagaaacauguaaaguacaaaguaaccgcguauucugcgacaccaugaacucauuaacccucccauccgaaguuaauuuaugcaauauagacauauuuaauccuaaauacgacugcaaaauaaugacaucaaaaacagacguuaguuccuccguaaucacaucuuugggcgcaauagucucaugcuauggaaaaacaaaaugcacagccucaaacaaaaauagaggaauaauaaaaacauucagcaacggcugugauuauguauccaacaaaggaguagacacaguauccguaggcaauacccuuuacuacguuaauaaacaagaaggaaaaucauuauacgucaaaggagaaccuaucauaaauuucuacgacccauuaguauucccuucagacgaauuugaugccucaauaucccaagucaaugaaaaaaucaaccaaucacuagccuuuauccgcaaaucagacgaauuacuacacaacguaaacguaggcaaaucaacaacuaauauaaugauaacaacaauaauaauaguaauuauaguaauauuauuacuacuaaucgccguagguuuauucuuauacuguaaagcacgaucaacaccaguuacacucucaaaagaucaacuaucaggaauaaacaacauagcauuuuccaauuaaggacuaguguccaccugucccuccugggcugcuggauugucucguuuuccugccaaauaaacaggaucagcgcuuuacagaucuaaaaaaaaaaaaaaaaaaaaaaaaaaaaaaaaaaaaaaaaaaaaaaaaaaaaaaaaaaaaaaaaugcaucccccccccccccccccccccccccccccccaaaggcucuuuucagagccaccagaauu

SEQ ID NO: 11918 - RNA, 2006 nt, Artificial Sequence
  mRNA product Design e-3 comprising derived and/or modified sequence from HRSV(Memphis-37)__AIY60640.1__F0 (opt11)
gggagacuuucccauucuguagcagaauuugguguugccuguggucuuggucccgcggagaagcuuaccauggaacuccccauccucaaaacaaacgccauaaccacuauccucgccgccgucacccucugcuucgccuccucccaaaacaucacagaggaguucuaccaauccacaugcuccgccgucuccaaaggcuaccucagcgcccuacguaccggcugguacaccagcgucaucacaauagaacucuccaacaucaaggaaaacaaaugcaacggcaccgaugccaaaguaaaacucaucaaacaagaacucgauaaauacaaaaacgccgucaccgaacuacaacuccuaaugcaaagcacacccgccgccaacaacagagcacggcgcgaacugccccgcuucaugaacuacacccucaacaacaccaaaaauaacaacgucacccuauccaagaaacgcaaacgccgauuccucgguuuccuacucggcguaggaagcgccauagccucaggcaucgccgucuccaaaguccuccaucuggaaggcgaagucaacaaaaucaaaaacgcacucuuauccaccaacaaagccgucgucucccucucgaacggggucuccguccuuaccuccaaaguccucgaccuuaaaaacuacaucgacaaacaacuacuaccaauagucaauaaacaauccugcuccaucucaaacauagaaaccgucauagaguuccaacagaagaacaaucgccuccucgaaauaacucgcgaguucuccgucaacgcaggcgucacgaccccugucucaacauacaugcuaacuaacucagaacuccuaagccuaaucaacgacaugcccaucacaaacgaccaaaagaaacucaugagcaacaauguccagauagucagacagcaauccuauagcaucaugucuauaauaaaagaagaagugcucgccuacguaguccaacucccucuuuacggcgucauagacacacccugcuggaaacuccacacaucuccucucugcaccaccaacacaaaagaaggcagcaacaucugccugacccgaaccgaccgcggaugguacugcgacaacgcuggcuccgugucuuucuuuccccaagccgaaaccugcaaaguccaguccaaccgcgucuucugcgacacaaugaacucccucacccuacccuccgaaguuaaccucugcaacaucgacaucuucaauccaaaauacgacugcaaaaucaugaccucgaaaacggacguauccuccuccgucauaacaucacuuggagccaucguuagcugcuacggaaaaaccaaauguaccgccuccaacaaaaaccgcggaauaaucaaaacauucuccaacggcugcgacuacguaagcaacaaaggggucgauacugucuccguagguaacacccuauacuacgucaacaaacaagaaggaaaaucacuauacguuaaaggcgaacccauuaucaacuucuacgacccccucguuuucccauccgacgaguucgacgccuccauaagccaaguuaacgaaaagauaaaccaaucgcucgcauucauccgcaaauccgacgaacuccuacacaacgucaacgugggcaaauccacaacaaacaucaugaucaccaccaucauuaucgucauaauagucauccuccuccugcucaucgccgugggacuauuccuauacugcaaagcccgcucgacgcccgucacacuuuccaaagaccaacuaagcggaaucaacaacauagcguucagcaauuaaggacuaguguccaccugucccuccugggcugcuggauugucucguuuuccugccaaauaaacaggaucagcgcuuuacagaucuaaaaaaaaaaaaaaaaaaaaaaaaaaaaaaaaaaaaaaaaaaaaaaaaaaaaaaaaaaaaaaaaugcaucccccccccccccccccccccccccccccccaaaggcucuuuucagagccaccagaauu

SEQ ID NO: 11919 - RNA, 2060 nt, Artificial Sequence
  mRNA product Design e-4 comprising derived and/or modified sequence from HRSV(Memphis-37)__AIY60640.1__F0 (wt)
gggagacuccugucgggcggaaguaggaggaguagaguuuaaaaacaguacucuuuuuccgguucgggacguaguugaagcaacgacaagccggauaaccgcucuugagacaggaagcuuaccauggaguugccaauccucaaaacaaaugcaauuaccacaauccuugcugcagucacacucuguuucgcuuccagucaaaacaucacugaagaauuuuaucaaucaacaugcagugcaguuagcaaaggcuaucuuagugcuuuaagaacugguugguauacuaguguuauaacuauagaauuaaguaauaucaaggaaaauaaguguaauggaacagaugcuaagguaaaauugauaaaacaagaauuagauaaauauaaaaaugcuguaacagaauugcaguugcucaugcaaagcacaccagcagccaacaaucgagccagaagagaacuaccaagguuuaugaauuauacacucaacaauaccaaaaauaacaauguaacauuaagcaagaaaaggaaaagaagauuucuuggcuuuuuguuagguguuggaucugcaaucgccaguggcauugcuguaucuaaaguccugcaccuagaaggggaagugaacaaaaucaaaaaugcucuacuauccacaaacaaggcuguagucagcuuaucaaauggaguuagugucuuaaccagcaaaguguuagaccucaaaaacuauauagauaaacaguuguuacccauugugaacaagcaaagcugcagcauaucaaacauugaaacugugauagaauuccaacaaaagaacaacagacuacuagagauuaccagggaauuuaguguuaaugcagguguaacuacaccuguaagcacuuauauguuaacaaauagugaauuauuaucauuaaucaaugauaugccuauaacaaaugaucagaaaaaguuaauguccaacaauguucaaauaguuagacagcaaaguuacucuaucauguccauaauaaaggaggaagucuuagcauauguaguucaauuaccacuauaugguguaauagauacaccuuguuggaaacuacacacauccccucuaugcacaaccaacacaaaggaaggguccaacaucuguuuaacaagaaccgacagaggaugguacugugacaaugcaggaucagugucuuucuucccacaagcugaaacaugcaaaguucaaucgaaucgaguauuuugugacacaaugaacagucuaacauuaccaagugaaguaaaucucugcaacauugacauauucaacccuaaauaugauugcaaaauuaugacuucaaaaacagaugugagcagcuccguuaucacaucucuaggagccauugugucaugcuauggcaaaacuaaauguacagcauccaauaaaaaucguggaaucauaaagacauuuucuaacgggugugauuauguaucaaauaaggggguggacacuguaucuguagguaauacauuauauuauguaaauaagcaagaaggaaaaagccucuauguaaaaggugaaccaauaauaaauuucuaugacccauuaguguucccuucugaugaauuugaugcaucaauaucucaagucaaugagaagauuaaccagagccuagcauuuauucguaaauccgaugaauuauuacauaauguaaauguugguaaauccaccacaaauaucaugauaacuacuauaauuauagugauuauaguaauauuguuauuauuaauugcaguugggcuguuccuauacugcaaggccagaagcacaccagucacacuaagcaaggaucaacugagugguauaaauaauauugcauuuaguaacugaggacuaguguccaccugucccuccugggcugcuggauugucucguuuuccugccaaauaaacaggaucagcgcuuuacagaucuaaaaaaaaaaaaaaaaaaaaaaaaaaaaaaaaaaaaaaaaaaaaaaaaaaaaaaaaaaaaaaaaugcaucccccccccccccccccccccccccccccccaaaggcucuuuucagagccaccagaauu

SEQ ID NO: 11920 - RNA, 2060 nt, Artificial Sequence
  mRNA product Design e-4 comprising derived and/or modified sequence from HRSV(Memphis-37)__AIY60640.1__F0 (opt1)
gggagacuccugucgggcggaaguaggaggaguagaguuuaaaaacaguacucuuuuuccgguucgggacguaguugaagcaacgacaagccggauaaccgcucuugagacaggaagcuuaccauggagcugcccauccucaagaccaacgccaucaccacgauccuggccgcggugacccugugcuucgccagcucccagaacaucaccgaggaguucuaccagagcacgugcuccgccgucagcaagggcuaccucuccgcccugcgcaccgggugguacaccagcgugaucaccaucgagcuguccaacaucaaggagaacaagugcaacggcaccgacgccaaggugaagcucaucaagcaggagcuggacaaguacaagaacgcggucacggagcugcagcuccugaugcagagcaccccggccgccaacaaccgggcccgccgggagcugccccgcuucaugaacuacacccucaacaacaccaagaacaacaacgugacgcuguccaagaagcggaagcgccgguuccugggguuccuccugggcguggggagcgcgaucgccuccggcaucgccgucagcaaggugcugcaccucgagggcgaggugaacaagaucaagaacgcccugcuguccaccaacaaggccgucgugagccucuccaacggggugagcguccugaccuccaaggugcuggaccucaagaacuacaucgacaagcagcugcugcccaucgugaacaagcagagcugcuccaucagcaacaucgagaccgucaucgaguuccagcagaagaacaaccgccuccuggagaucacgcgggaguucagcgugaacgcgggcgugaccacccccgucuccaccuacaugcugacgaacagcgagcuccugucccugaucaacgacaugccgaucaccaacgaccagaagaagcucaugagcaacaacgugcagaucgugcgccagcaguccuacagcaucauguccaucaucaaggaggagguccuggccuacguggugcagcugccccucuacggggucaucgacacccccugcuggaagcugcacaccagcccccugugcacgaccaacaccaaggagggcuccaacaucugccucacccggacggaccgcgggugguacugcgacaacgccggcagcguguccuucuucccgcaggccgagaccugcaagguccagagcaaccggguguucugcgacaccaugaacucccugacccugcccagcgaggugaaccucugcaacaucgacaucuucaaccccaaguacgacugcaagaucaugacguccaagaccgacgucagcuccagcgugaucaccucccugggcgccaucgugagcugcuacgggaagaccaagugcacggcgagcaacaagaaccgcggcaucaucaagaccuucuccaacgggugcgacuacgucagcaacaagggcguggacaccguguccgucggcaacacccuguacuacgugaacaagcaggagggcaagagccucuacgugaagggggagcccaucaucaacuucuacgacccgcuggucuuccccuccgacgaguucgacgccagcaucucccaggugaacgagaagaucaaccagagccuggccuucauccggaaguccgacgagcuccugcacaacgugaacgucggcaagagcaccacgaacaucaugaucaccaccaucaucaucgugaucaucgugauccugcugcuccugaucgccgucgggcuguuccucuacugcaaggcccgcuccacccccgugacgcugagcaaggaccagcuguccgggaucaacaacaucgcguucagcaacugaggacuaguguccaccugucccuccugggcugcuggauugucucguuuuccugccaaauaaacaggaucagcgcuuuacagaucuaaaaaaaaaaaaaaaaaaaaaaaaaaaaaaaaaaaaaaaaaaaaaaaaaaaaaaaaaaaaaaaaugcaucccccccccccccccccccccccccccccccaaaggcucuuuucagagccaccagaauu

SEQ ID NO: 11921 - RNA, 2060 nt, Artificial Sequence
  mRNA product Design e-4 comprising derived and/or modified sequence from HRSV(Memphis-37)__AIY60640.1__F0 (opt2)
gggagacuccugucgggcggaaguaggaggaguagaguuuaaaaacaguacucuuuuuccgguucgggacguaguugaagcaacgacaagccggauaaccgcucuugagacaggaagcuuaccauggagcuccccauccucaagaccaacgccaucaccaccauccucgccgccgucacccucugcuucgccuccucccagaacaucaccgaggaguucuaccaguccaccugcuccgccgucuccaagggcuaccucuccgcccuccgcaccggcugguacaccuccgucaucaccaucgagcucuccaacaucaaggagaacaagugcaacggcaccgacgccaaggucaagcucaucaagcaggagcucgacaaguacaagaacgccgucaccgagcuccagcuccucaugcaguccacccccgccgccaacaaccgcgcccgccgcgagcucccccgcuucaugaacuacacccucaacaacaccaagaacaacaacgucacccucuccaagaagcgcaagcgccgcuuccucggcuuccuccucggcgucggcuccgccaucgccuccggcaucgccgucuccaagguccuccaccucgagggcgaggucaacaagaucaagaacgcccuccucuccaccaacaaggccgucgucucccucuccaacggcgucuccguccucaccuccaagguccucgaccucaagaacuacaucgacaagcagcuccuccccaucgucaacaagcaguccugcuccaucuccaacaucgagaccgucaucgaguuccagcagaagaacaaccgccuccucgagaucacccgcgaguucuccgucaacgccggcgucaccacccccgucuccaccuacaugcucaccaacuccgagcuccucucccucaucaacgacaugcccaucaccaacgaccagaagaagcucauguccaacaacguccagaucguccgccagcaguccuacuccaucauguccaucaucaaggaggagguccucgccuacgucguccagcucccccucuacggcgucaucgacacccccugcuggaagcuccacaccuccccccucugcaccaccaacaccaaggagggcuccaacaucugccucacccgcaccgaccgcggcugguacugcgacaacgccggcuccgucuccuucuucccccaggccgagaccugcaagguccaguccaaccgcgucuucugcgacaccaugaacucccucacccuccccuccgaggucaaccucugcaacaucgacaucuucaaccccaaguacgacugcaagaucaugaccuccaagaccgacgucuccuccuccgucaucaccucccucggcgccaucgucuccugcuacggcaagaccaagugcaccgccuccaacaagaaccgcggcaucaucaagaccuucuccaacggcugcgacuacgucuccaacaagggcgucgacaccgucuccgucggcaacacccucuacuacgucaacaagcaggagggcaagucccucuacgucaagggcgagcccaucaucaacuucuacgacccccucgucuuccccuccgacgaguucgacgccuccaucucccaggucaacgagaagaucaaccagucccucgccuucauccgcaaguccgacgagcuccuccacaacgucaacgucggcaaguccaccaccaacaucaugaucaccaccaucaucaucgucaucaucgucauccuccuccuccucaucgccgucggccucuuccucuacugcaaggcccgcuccacccccgucacccucuccaaggaccagcucuccggcaucaacaacaucgccuucuccaacugaggacuaguguccaccugucccuccugggcugcuggauugucucguuuuccugccaaauaaacaggaucagcgcuuuacagaucuaaaaaaaaaaaaaaaaaaaaaaaaaaaaaaaaaaaaaaaaaaaaaaaaaaaaaaaaaaaaaaaaugcaucccccccccccccccccccccccccccccccaaaggcucuuuucagagccaccagaauu

SEQ ID NO: 11922 - RNA, 2060 nt, Artificial Sequence
  mRNA product Design e-4 comprising derived and/or modified sequence from HRSV(Memphis-37)__AIY60640.1__F0 (opt3)
gggagacuccugucgggcggaaguaggaggaguagaguuuaaaaacaguacucuuuuuccgguucgggacguaguugaagcaacgacaagccggauaaccgcucuugagacaggaagcuuaccauggagcugcccauccucaagaccaacgccauuacaacuauacuugcugcagugacgcugugcuucgccagcucccagaauaucaccgaagaguuuuaccaaucuacauguucagcggucaguaaaggcuauuugagcgcuuuaagaacugggugguacaccuccguuauuacaaucgaacugucuaacauuaaggagaauaaaugcaacggaaccgacgccaaggugaaacuaaucaagcaggaacucgauaaguauaaaaaugcaguaacugagcugcagcuucugaugcagucgaccccugccgcuaacaauagggcacggcgcgaguugccacgauucaugaacuacacacucaauaacacgaagaauaacaaugugacucugagcaaaaagcguaaaagaagguuucuggguuuccucuuaggcgucgggucagccauagcuaguggaaucgccguguccaagguucugcaccuugaaggcgaggugaacaagauuaaaaaugcguugcugucuaccaacaaggcagucgugagccuauccaacgguguaucaguucucacaaguaaagugcuggaccuuaagaauuauaucgauaaacaacuguugccgauugucaacaagcagagcuguucuaucuccaauauagaaacugugauugaguuucagcagaaaaacaaucggcuccuggagaucacccgcgaguucucagugaacgccggggucacaacccccguuagcacguacauguuaacuaauagugaacugcucucucuuauuaacgacaugccuaucacaaaugaucaaaagaagcugauguccaacaaugugcagaucguaagacagcagagcuauucgauuaugucuauaaucaaagaagagguguuggcuuacgucgugcaacuaccacuguacggaguuauugacacccccugcuggaagcuccauacuuccccucuguguacaaccaacacgaaagaaggcucaaauaucugccuuaccaggacagaucggggcugguauugugacaacgccgggagugugagcuuuuucccacaggcagagacuugcaagguccaguccaaucgcguguuuugugauaccaugaacucucugacauugcccagcgagguaaaccucugcaauauagacauuuucaacccuaaauacgauuguaagaucaugacuucaaagaccgacguuaguuccagcgugaucacaucucugggagcuauugucucaugcuaugguaaaaccaagugcacugccaguaauaaaaaccgaggcaucauuaagacguuuagcaaugggugugauuacguguccaacaaaggagucgacacagugucuguuggcaauaccuuauauuacgugaacaagcaagaagguaagucgcuguauguaaaaggggagccaauaaucaauuucuacgacccgcuagucuuucccagcgaugaguucgacgcguccauuucacaggugaacgaaaagaucaaucagagucucgccuucaucagaaaaucugaugaacugcuucacaacguuaaugugggaaagagcacuaccaacauuaugauaacaaccaucauuaucgucauuaucgugauauugcugcuccugaucgcaguaggccuuuuucuguacugcaaagcuagguccacuccugugacauugucaaaggaccagcucagcggcauuaauaacaucgccuucucuaacugaggacuaguguccaccugucccuccugggcugcuggauugucucguuuuccugccaaauaaacaggaucagcgcuuuacagaucuaaaaaaaaaaaaaaaaaaaaaaaaaaaaaaaaaaaaaaaaaaaaaaaaaaaaaaaaaaaaaaaaugcaucccccccccccccccccccccccccccccccaaaggcucuuuucagagccaccagaauu

SEQ ID NO: 11923 - RNA, 2060 nt, Artificial Sequence
  mRNA product Design e-4 comprising derived and/or modified sequence from HRSV(Memphis-37)__AIY60640.1__F0 (opt4)
gggagacuccugucgggcggaaguaggaggaguagaguuuaaaaacaguacucuuuuuccgguucgggacguaguugaagcaacgacaagccggauaaccgcucuugagacaggaagcuuaccauggagcugcccauccugaagaccaacgccaucaccaccauccuggccgccgugacccugugcuucgccagcagccagaacaucaccgaggaguucuaccagagcaccugcagcgccgugagcaagggcuaccugagcgcccugagaaccggcugguacaccagcgugaucaccaucgagcugagcaacaucaaggagaacaagugcaacggcaccgacgccaaggugaagcugaucaagcaggagcuggacaaguacaagaacgccgugaccgagcugcagcugcugaugcagagcacccccgccgccaacaacagagccagaagagagcugcccagauucaugaacuacacccugaacaacaccaagaacaacaacgugacccugagcaagaagagaaagagaagauuccugggcuuccugcugggcgugggcagcgccaucgccagcggcaucgccgugagcaaggugcugcaccuggagggcgaggugaacaagaucaagaacgcccugcugagcaccaacaaggccguggugagccugagcaacggcgugagcgugcugaccagcaaggugcuggaccugaagaacuacaucgacaagcagcugcugcccaucgugaacaagcagagcugcagcaucagcaacaucgagaccgugaucgaguuccagcagaagaacaacagacugcuggagaucaccagagaguucagcgugaacgccggcgugaccacccccgugagcaccuacaugcugaccaacagcgagcugcugagccugaucaacgacaugcccaucaccaacgaccagaagaagcugaugagcaacaacgugcagaucgugagacagcagagcuacagcaucaugagcaucaucaaggaggaggugcuggccuacguggugcagcugccccuguacggcgugaucgacacccccugcuggaagcugcacaccagcccccugugcaccaccaacaccaaggagggcagcaacaucugccugaccagaaccgacagaggcugguacugcgacaacgccggcagcgugagcuucuucccccaggccgagaccugcaaggugcagagcaacagaguguucugcgacaccaugaacagccugacccugcccagcgaggugaaccugugcaacaucgacaucuucaaccccaaguacgacugcaagaucaugaccagcaagaccgacgugagcagcagcgugaucaccagccugggcgccaucgugagcugcuacggcaagaccaagugcaccgccagcaacaagaacagaggcaucaucaagaccuucagcaacggcugcgacuacgugagcaacaagggcguggacaccgugagcgugggcaacacccuguacuacgugaacaagcaggagggcaagagccuguacgugaagggcgagcccaucaucaacuucuacgacccccugguguuccccagcgacgaguucgacgccagcaucagccaggugaacgagaagaucaaccagagccuggccuucaucagaaagagcgacgagcugcugcacaacgugaacgugggcaagagcaccaccaacaucaugaucaccaccaucaucaucgugaucaucgugauccugcugcugcugaucgccgugggccuguuccuguacugcaaggccagaagcacccccgugacccugagcaaggaccagcugagcggcaucaacaacaucgccuucagcaacugaggacuaguguccaccugucccuccugggcugcuggauugucucguuuuccugccaaauaaacaggaucagcgcuuuacagaucuaaaaaaaaaaaaaaaaaaaaaaaaaaaaaaaaaaaaaaaaaaaaaaaaaaaaaaaaaaaaaaaaugcaucccccccccccccccccccccccccccccccaaaggcucuuuucagagccaccagaauu

SEQ ID NO: 11924 - RNA, 2060 nt, Artificial Sequence
  mRNA product Design e-4 comprising derived and/or modified sequence from HRSV(Memphis-37)__AIY60640.1__F0 (opt5)
gggagacuccugucgggcggaaguaggaggaguagaguuuaaaaacaguacucuuuuuccgguucgggacguaguugaagcaacgacaagccggauaaccgcucuugagacaggaagcuuaccauggagcugcccauccucaagaccaacgccauuacaacgauccuggcugccgugacccuuugcuucgcgagcucccagaauauuacagaagaguuuuaccaaucuaccuguagcgcugucuccaaaggcuaucugucugcccucagaacagggugguacaccagcguuaucacaauugaacuguccaacaucaaggagaauaaaugcaacggaaccgacgccaaggugaaacuuaucaagcaggaacuggauaaguauaaaaaugcugugacggagcuccagcugcugaugcagucuaccccugccgcuaacaaucgggcccgcagagagcucccgcgguucaugaacuacacacugaauaacaccaagaauaacaaugucacacuuagcaaaaagcgcaaaagacgguuucugggcuuccuccugggggugggauccgcgauugccagcggcaucgcuguuucuaaggugcuucaccuggaaggggaggucaacaagauuaaaaaugcccuccuguccaccaacaaggcugugguuagccugucuaacggaguguccguccucacgagcaaagugcuggaccuuaagaauuauaucgauaaacaacugcuccccauugugaacaagcagucuuguuccaucagcaauauugaaacagucaucgaguuucagcagaaaaacaaucgccugcuugagaucaccagagaauuuuccguuaacgccggcgugacaaccccugugucuaccuacaugcugacaaauagcgagcuccugucccugauuaacgacaugcccaucacgaaugaucaaaagaagcucaugagcaacaauguccagauugugcggcagcagucuuauuccaucaugagcauuaucaaagaagagguucuggcguacgugguccaacuuccucuguacggcgugaucgacacccccugcuggaagcuccauacaucuccucuguguaccacaaacaccaaagaagggagcaauauuugccuuacgcgcacagauagaggaugguauugugacaacgccggcuccguuucuuucuucccgcaggcugagaccugcaaggugcagagcaaucgggucuuuugugauaccaugaacucccugacacuccccagcgaggugaaccugugcaauaucgacauuuucaacccuaaauacgauuguaagaucaugaccucuaagacagacgucuccagcucugugauuacgucccugggggccaucguuagcugcuauggaaaaaccaagugcacagcuuccaauaaaaaccgcggcaucauuaagaccuuuucuaaugggugugauuacgugagcaacaaaggagucgacacaguguccguuggcaauacccucuauuacgugaacaagcaagaaggcaagucucuguaugucaaaggggagcccaucauuaauuucuacgacccucuuguguuucccagcgaugaguucgacgccuccaucagccaggugaacgaaaagauuaaucagucucuggccuucaucagaaaauccgaugaacuccugcacaacguuaaugucggaaagagcacgaccaacauuaugaucacaaccaucauuaucgugauuaucgugauucugcuucuccugaucgcugucggccuguuucucuacugcaaagcgcggucuacaccggugacccuguccaaggaccagcuuagcgggaucaauaacauugccuucucuaacugaggacuaguguccaccugucccuccugggcugcuggauugucucguuuuccugccaaauaaacaggaucagcgcuuuacagaucuaaaaaaaaaaaaaaaaaaaaaaaaaaaaaaaaaaaaaaaaaaaaaaaaaaaaaaaaaaaaaaaaugcaucccccccccccccccccccccccccccccccaaaggcucuuuucagagccaccagaauu

SEQ ID NO: 11925 - RNA, 2060 nt, Artificial Sequence
  mRNA product Design e-4 comprising derived and/or modified sequence from HRSV(Memphis-37)__AIY60640.1__F0 (opt6)
gggagacuccugucgggcggaaguaggaggaguagaguuuaaaaacaguacucuuuuuccgguucgggacguaguugaagcaacgacaagccggauaaccgcucuugagacaggaagcuuaccauggaacugccuauucuaaaaacaaaugccauaacaacaauucuugcagcaguaacauuauguuuugcaucaucacaaaacauuacagaagaauuuuaccaauccacuugcucagccguaucaaaaggauaccuaucagccuuaagaacagguugguacaccucaguaauaaccauagaacuaucaaacauaaaagaaaacaaaugcaaugguacugaugcaaaagucaaacuaaucaaacaagaacuggacaaauacaaaaaugcaguaaccgaacuacaacuccuaaugcaauccacaccugcagccaacaacagagcaagacgcgaacuaccaagauuuaugaauuacacauuaaacaacaccaagaacaacaauguaacucucucaaaaaaaagaaaaagacgcuuucuagguuuccuccuaggcgucggaucugcaauagccucaggaauagcaguaucaaaaguucuacaccuagaaggagaaguaaacaaaauuaaaaacgcauuacuaucaaccaacaaagcaguuguaucccuuucaaauggagucucuguacuuacaucaaaaguacucgaccuaaaaaacuauauagacaaacaacuacucccaauagucaauaagcaaucaugcagcauaucaaacauagaaacaguuauagaauuucaacaaaaaaacaacagacuacucgaaauaaccagagaauuuagcgucaacgcaggcguaaccacaccgguauccacauacaugcuuacaaacucagaacuccucucacuaauaaacgacaugccaauaacuaaugaccaaaaaaaacuaaugucaaacaauguccaaauaguccgucaacaaucauacucaauaaugucaauaauaaaagaagaaguauuagcauauguaguccaacuaccauuauacggcguuauagacacaccuuguuggaaacuucacacauccccacucuguacaaccaacacaaaagaagguuccaauauaugccuaacuagaaccgacagaggaugguauugcgacaacgcaggaucuguaucauucuuuccccaagcagaaacauguaaaguacaaaguaaccgcguauucugcgacaccaugaacucauuaacccucccauccgaaguuaauuuaugcaauauagacauauuuaauccuaaauacgacugcaaaauaaugacaucaaaaacagacguuaguuccuccguaaucacaucuuugggcgcaauagucucaugcuauggaaaaacaaaaugcacagccucaaacaaaaauagaggaauaauaaaaacauucagcaacggcugugauuauguauccaacaaaggaguagacacaguauccguaggcaauacccuuuacuacguuaauaaacaagaaggaaaaucauuauacgucaaaggagaaccuaucauaaauuucuacgacccauuaguauucccuucagacgaauuugaugccucaauaucccaagucaaugaaaaaaucaaccaaucacuagccuuuauccgcaaaucagacgaauuacuacacaacguaaacguaggcaaaucaacaacuaauauaaugauaacaacaauaauaauaguaauuauaguaauauuauuacuacuaaucgccguagguuuauucuuauacuguaaagcacgaucaacaccaguuacacucucaaaagaucaacuaucaggaauaaacaacauagcauuuuccaauuaaggacuaguguccaccugucccuccugggcugcuggauugucucguuuuccugccaaauaaacaggaucagcgcuuuacagaucuaaaaaaaaaaaaaaaaaaaaaaaaaaaaaaaaaaaaaaaaaaaaaaaaaaaaaaaaaaaaaaaaugcaucccccccccccccccccccccccccccccccaaaggcucuuuucagagccaccagaauu

SEQ ID NO: 11926 - RNA, 2060 nt, Artificial Sequence
  mRNA product Design e-4 comprising derived and/or modified sequence from HRSV(Memphis-37)__AIY60640.1__F0 (opt11)
gggagacuccugucgggcggaaguaggaggaguagaguuuaaaaacaguacucuuuuuccgguucgggacguaguugaagcaacgacaagccggauaaccgcucuugagacaggaagcuuaccauggaacuccccauccucaaaacaaacgccauaaccacuauccucgccgccgucacccucugcuucgccuccucccaaaacaucacagaggaguucuaccaauccacaugcuccgccgucuccaaaggcuaccucagcgcccuacguaccggcugguacaccagcgucaucacaauagaacucuccaacaucaaggaaaacaaaugcaacggcaccgaugccaaaguaaaacucaucaaacaagaacucgauaaauacaaaaacgccgucaccgaacuacaacuccuaaugcaaagcacacccgccgccaacaacagagcacggcgcgaacugccccgcuucaugaacuacacccucaacaacaccaaaaauaacaacgucacccuauccaagaaacgcaaacgccgauuccucgguuuccuacucggcguaggaagcgccauagccucaggcaucgccgucuccaaaguccuccaucuggaaggcgaagucaacaaaaucaaaaacgcacucuuauccaccaacaaagccgucgucucccucucgaacggggucuccguccuuaccuccaaaguccucgaccuuaaaaacuacaucgacaaacaacuacuaccaauagucaauaaacaauccugcuccaucucaaacauagaaaccgucauagaguuccaacagaagaacaaucgccuccucgaaauaacucgcgaguucuccgucaacgcaggcgucacgaccccugucucaacauacaugcuaacuaacucagaacuccuaagccuaaucaacgacaugcccaucacaaacgaccaaaagaaacucaugagcaacaauguccagauagucagacagcaauccuauagcaucaugucuauaauaaaagaagaagugcucgccuacguaguccaacucccucuuuacggcgucauagacacacccugcuggaaacuccacacaucuccucucugcaccaccaacacaaaagaaggcagcaacaucugccugacccgaaccgaccgcggaugguacugcgacaacgcuggcuccgugucuuucuuuccccaagccgaaaccugcaaaguccaguccaaccgcgucuucugcgacacaaugaacucccucacccuacccuccgaaguuaaccucugcaacaucgacaucuucaauccaaaauacgacugcaaaaucaugaccucgaaaacggacguauccuccuccgucauaacaucacuuggagccaucguuagcugcuacggaaaaaccaaauguaccgccuccaacaaaaaccgcggaauaaucaaaacauucuccaacggcugcgacuacguaagcaacaaaggggucgauacugucuccguagguaacacccuauacuacgucaacaaacaagaaggaaaaucacuauacguuaaaggcgaacccauuaucaacuucuacgacccccucguuuucccauccgacgaguucgacgccuccauaagccaaguuaacgaaaagauaaaccaaucgcucgcauucauccgcaaauccgacgaacuccuacacaacgucaacgugggcaaauccacaacaaacaucaugaucaccaccaucauuaucgucauaauagucauccuccuccugcucaucgccgugggacuauuccuauacugcaaagcccgcucgacgcccgucacacuuuccaaagaccaacuaagcggaaucaacaacauagcguucagcaauuaaggacuaguguccaccugucccuccugggcugcuggauugucucguuuuccugccaaauaaacaggaucagcgcuuuacagaucuaaaaaaaaaaaaaaaaaaaaaaaaaaaaaaaaaaaaaaaaaaaaaaaaaaaaaaaaaaaaaaaaugcaucccccccccccccccccccccccccccccccaaaggcucuuuucagagccaccagaauu

SEQ ID NO: 11927 - RNA, 2027 nt, Artificial Sequence
  mRNA product Design e-5 comprising derived and/or modified sequence from HRSV(Memphis-37)__AIY60640.1__F0 (wt)
gggagagcggcucggccauuuugucccagucaguccggaggcugcggcugcagaaguaccgccugcggaguaacugcaaagaagcuuaccauggaguugccaauccucaaaacaaaugcaauuaccacaauccuugcugcagucacacucuguuucgcuuccagucaaaacaucacugaagaauuuuaucaaucaacaugcagugcaguuagcaaaggcuaucuuagugcuuuaagaacugguugguauacuaguguuauaacuauagaauuaaguaauaucaaggaaaauaaguguaauggaacagaugcuaagguaaaauugauaaaacaagaauuagauaaauauaaaaaugcuguaacagaauugcaguugcucaugcaaagcacaccagcagccaacaaucgagccagaagagaacuaccaagguuuaugaauuauacacucaacaauaccaaaaauaacaauguaacauuaagcaagaaaaggaaaagaagauuucuuggcuuuuuguuagguguuggaucugcaaucgccaguggcauugcuguaucuaaaguccugcaccuagaaggggaagugaacaaaaucaaaaaugcucuacuauccacaaacaaggcuguagucagcuuaucaaauggaguuagugucuuaaccagcaaaguguuagaccucaaaaacuauauagauaaacaguuguuacccauugugaacaagcaaagcugcagcauaucaaacauugaaacugugauagaauuccaacaaaagaacaacagacuacuagagauuaccagggaauuuaguguuaaugcagguguaacuacaccuguaagcacuuauauguuaacaaauagugaauuauuaucauuaaucaaugauaugccuauaacaaaugaucagaaaaaguuaauguccaacaauguucaaauaguuagacagcaaaguuacucuaucauguccauaauaaaggaggaagucuuagcauauguaguucaauuaccacuauaugguguaauagauacaccuuguuggaaacuacacacauccccucuaugcacaaccaacacaaaggaaggguccaacaucuguuuaacaagaaccgacagaggaugguacugugacaaugcaggaucagugucuuucuucccacaagcugaaacaugcaaaguucaaucgaaucgaguauuuugugacacaaugaacagucuaacauuaccaagugaaguaaaucucugcaacauugacauauucaacccuaaauaugauugcaaaauuaugacuucaaaaacagaugugagcagcuccguuaucacaucucuaggagccauugugucaugcuauggcaaaacuaaauguacagcauccaauaaaaaucguggaaucauaaagacauuuucuaacgggugugauuauguaucaaauaaggggguggacacuguaucuguagguaauacauuauauuauguaaauaagcaagaaggaaaaagccucuauguaaaaggugaaccaauaauaaauuucuaugacccauuaguguucccuucugaugaauuugaugcaucaauaucucaagucaaugagaagauuaaccagagccuagcauuuauucguaaauccgaugaauuauuacauaauguaaauguugguaaauccaccacaaauaucaugauaacuacuauaauuauagugauuauaguaauauuguuauuauuaauugcaguugggcuguuccuauacugcaaggccagaagcacaccagucacacuaagcaaggaucaacugagugguauaaauaauauugcauuuaguaacugaggacuaguguccaccugucccuccugggcugcuggauugucucguuuuccugccaaauaaacaggaucagcgcuuuacagaucuaaaaaaaaaaaaaaaaaaaaaaaaaaaaaaaaaaaaaaaaaaaaaaaaaaaaaaaaaaaaaaaaugcaucccccccccccccccccccccccccccccccaaaggcucuuuucagagccaccagaauu

SEQ ID NO: 11928 - RNA, 2027 nt, Artificial Sequence
  mRNA product Design e-5 comprising derived and/or modified sequence from HRSV(Memphis-37)__AIY60640.1__F0 (opt1)
gggagagcggcucggccauuuugucccagucaguccggaggcugcggcugcagaaguaccgccugcggaguaacugcaaagaagcuuaccauggagcugcccauccucaagaccaacgccaucaccacgauccuggccgcggugacccugugcuucgccagcucccagaacaucaccgaggaguucuaccagagcacgugcuccgccgucagcaagggcuaccucuccgcccugcgcaccgggugguacaccagcgugaucaccaucgagcuguccaacaucaaggagaacaagugcaacggcaccgacgccaaggugaagcucaucaagcaggagcuggacaaguacaagaacgcggucacggagcugcagcuccugaugcagagcaccccggccgccaacaaccgggcccgccgggagcugccccgcuucaugaacuacacccucaacaacaccaagaacaacaacgugacgcuguccaagaagcggaagcgccgguuccugggguuccuccugggcguggggagcgcgaucgccuccggcaucgccgucagcaaggugcugcaccucgagggcgaggugaacaagaucaagaacgcccugcuguccaccaacaaggccgucgugagccucuccaacggggugagcguccugaccuccaaggugcuggaccucaagaacuacaucgacaagcagcugcugcccaucgugaacaagcagagcugcuccaucagcaacaucgagaccgucaucgaguuccagcagaagaacaaccgccuccuggagaucacgcgggaguucagcgugaacgcgggcgugaccacccccgucuccaccuacaugcugacgaacagcgagcuccugucccugaucaacgacaugccgaucaccaacgaccagaagaagcucaugagcaacaacgugcagaucgugcgccagcaguccuacagcaucauguccaucaucaaggaggagguccuggccuacguggugcagcugccccucuacggggucaucgacacccccugcuggaagcugcacaccagcccccugugcacgaccaacaccaaggagggcuccaacaucugccucacccggacggaccgcgggugguacugcgacaacgccggcagcguguccuucuucccgcaggccgagaccugcaagguccagagcaaccggguguucugcgacaccaugaacucccugacccugcccagcgaggugaaccucugcaacaucgacaucuucaaccccaaguacgacugcaagaucaugacguccaagaccgacgucagcuccagcgugaucaccucccugggcgccaucgugagcugcuacgggaagaccaagugcacggcgagcaacaagaaccgcggcaucaucaagaccuucuccaacgggugcgacuacgucagcaacaagggcguggacaccguguccgucggcaacacccuguacuacgugaacaagcaggagggcaagagccucuacgugaagggggagcccaucaucaacuucuacgacccgcuggucuuccccuccgacgaguucgacgccagcaucucccaggugaacgagaagaucaaccagagccuggccuucauccggaaguccgacgagcuccugcacaacgugaacgucggcaagagcaccacgaacaucaugaucaccaccaucaucaucgugaucaucgugauccugcugcuccugaucgccgucgggcuguuccucuacugcaaggcccgcuccacccccgugacgcugagcaaggaccagcuguccgggaucaacaacaucgcguucagcaacugaggacuaguguccaccugucccuccugggcugcuggauugucucguuuuccugccaaauaaacaggaucagcgcuuuacagaucuaaaaaaaaaaaaaaaaaaaaaaaaaaaaaaaaaaaaaaaaaaaaaaaaaaaaaaaaaaaaaaaaugcaucccccccccccccccccccccccccccccccaaaggcucuuuucagagccaccagaauu

SEQ ID NO: 11929 - RNA, 2027 nt, Artificial Sequence
  mRNA product Design e-5 comprising derived and/or modified sequence from HRSV(Memphis-37)__AIY60640.1__F0 (opt2)
gggagagcggcucggccauuuugucccagucaguccggaggcugcggcugcagaaguaccgccugcggaguaacugcaaagaagcuuaccauggagcuccccauccucaagaccaacgccaucaccaccauccucgccgccgucacccucugcuucgccuccucccagaacaucaccgaggaguucuaccaguccaccugcuccgccgucuccaagggcuaccucuccgcccuccgcaccggcugguacaccuccgucaucaccaucgagcucuccaacaucaaggagaacaagugcaacggcaccgacgccaaggucaagcucaucaagcaggagcucgacaaguacaagaacgccgucaccgagcuccagcuccucaugcaguccacccccgccgccaacaaccgcgcccgccgcgagcucccccgcuucaugaacuacacccucaacaacaccaagaacaacaacgucacccucuccaagaagcgcaagcgccgcuuccucggcuuccuccucggcgucggcuccgccaucgccuccggcaucgccgucuccaagguccuccaccucgagggcgaggucaacaagaucaagaacgcccuccucuccaccaacaaggccgucgucucccucuccaacggcgucuccguccucaccuccaagguccucgaccucaagaacuacaucgacaagcagcuccuccccaucgucaacaagcaguccugcuccaucuccaacaucgagaccgucaucgaguuccagcagaagaacaaccgccuccucgagaucacccgcgaguucuccgucaacgccggcgucaccacccccgucuccaccuacaugcucaccaacuccgagcuccucucccucaucaacgacaugcccaucaccaacgaccagaagaagcucauguccaacaacguccagaucguccgccagcaguccuacuccaucauguccaucaucaaggaggagguccucgccuacgucguccagcucccccucuacggcgucaucgacacccccugcuggaagcuccacaccuccccccucugcaccaccaacaccaaggagggcuccaacaucugccucacccgcaccgaccgcggcugguacugcgacaacgccggcuccgucuccuucuucccccaggccgagaccugcaagguccaguccaaccgcgucuucugcgacaccaugaacucccucacccuccccuccgaggucaaccucugcaacaucgacaucuucaaccccaaguacgacugcaagaucaugaccuccaagaccgacgucuccuccuccgucaucaccucccucggcgccaucgucuccugcuacggcaagaccaagugcaccgccuccaacaagaaccgcggcaucaucaagaccuucuccaacggcugcgacuacgucuccaacaagggcgucgacaccgucuccgucggcaacacccucuacuacgucaacaagcaggagggcaagucccucuacgucaagggcgagcccaucaucaacuucuacgacccccucgucuuccccuccgacgaguucgacgccuccaucucccaggucaacgagaagaucaaccagucccucgccuucauccgcaaguccgacgagcuccuccacaacgucaacgucggcaaguccaccaccaacaucaugaucaccaccaucaucaucgucaucaucgucauccuccuccuccucaucgccgucggccucuuccucuacugcaaggcccgcuccacccccgucacccucuccaaggaccagcucuccggcaucaacaacaucgccuucuccaacugaggacuaguguccaccugucccuccugggcugcuggauugucucguuuuccugccaaauaaacaggaucagcgcuuuacagaucuaaaaaaaaaaaaaaaaaaaaaaaaaaaaaaaaaaaaaaaaaaaaaaaaaaaaaaaaaaaaaaaaugcaucccccccccccccccccccccccccccccccaaaggcucuuuucagagccaccagaauu

SEQ ID NO: 11930 - RNA, 2027 nt, Artificial Sequence
  mRNA product Design e-5 comprising derived and/or modified sequence from HRSV(Memphis-37)__AIY60640.1__F0 (opt3)
gggagagcggcucggccauuuugucccagucaguccggaggcugcggcugcagaaguaccgccugcggaguaacugcaaagaagcuuaccauggagcugcccauccucaagaccaacgccauuacaacuauacuugcugcagugacgcugugcuucgccagcucccagaauaucaccgaagaguuuuaccaaucuacauguucagcggucaguaaaggcuauuugagcgcuuuaagaacugggugguacaccuccguuauuacaaucgaacugucuaacauuaaggagaauaaaugcaacggaaccgacgccaaggugaaacuaaucaagcaggaacucgauaaguauaaaaaugcaguaacugagcugcagcuucugaugcagucgaccccugccgcuaacaauagggcacggcgcgaguugccacgauucaugaacuacacacucaauaacacgaagaauaacaaugugacucugagcaaaaagcguaaaagaagguuucuggguuuccucuuaggcgucgggucagccauagcuaguggaaucgccguguccaagguucugcaccuugaaggcgaggugaacaagauuaaaaaugcguugcugucuaccaacaaggcagucgugagccuauccaacgguguaucaguucucacaaguaaagugcuggaccuuaagaauuauaucgauaaacaacuguugccgauugucaacaagcagagcuguucuaucuccaauauagaaacugugauugaguuucagcagaaaaacaaucggcuccuggagaucacccgcgaguucucagugaacgccggggucacaacccccguuagcacguacauguuaacuaauagugaacugcucucucuuauuaacgacaugccuaucacaaaugaucaaaagaagcugauguccaacaaugugcagaucguaagacagcagagcuauucgauuaugucuauaaucaaagaagagguguuggcuuacgucgugcaacuaccacuguacggaguuauugacacccccugcuggaagcuccauacuuccccucuguguacaaccaacacgaaagaaggcucaaauaucugccuuaccaggacagaucggggcugguauugugacaacgccgggagugugagcuuuuucccacaggcagagacuugcaagguccaguccaaucgcguguuuugugauaccaugaacucucugacauugcccagcgagguaaaccucugcaauauagacauuuucaacccuaaauacgauuguaagaucaugacuucaaagaccgacguuaguuccagcgugaucacaucucugggagcuauugucucaugcuaugguaaaaccaagugcacugccaguaauaaaaaccgaggcaucauuaagacguuuagcaaugggugugauuacguguccaacaaaggagucgacacagugucuguuggcaauaccuuauauuacgugaacaagcaagaagguaagucgcuguauguaaaaggggagccaauaaucaauuucuacgacccgcuagucuuucccagcgaugaguucgacgcguccauuucacaggugaacgaaaagaucaaucagagucucgccuucaucagaaaaucugaugaacugcuucacaacguuaaugugggaaagagcacuaccaacauuaugauaacaaccaucauuaucgucauuaucgugauauugcugcuccugaucgcaguaggccuuuuucuguacugcaaagcuagguccacuccugugacauugucaaaggaccagcucagcggcauuaauaacaucgccuucucuaacugaggacuaguguccaccugucccuccugggcugcuggauugucucguuuuccugccaaauaaacaggaucagcgcuuuacagaucuaaaaaaaaaaaaaaaaaaaaaaaaaaaaaaaaaaaaaaaaaaaaaaaaaaaaaaaaaaaaaaaaugcaucccccccccccccccccccccccccccccccaaaggcucuuuucagagccaccagaauu

SEQ ID NO: 11931 - RNA, 2027 nt, Artificial Sequence
  mRNA product Design e-5 comprising derived and/or modified sequence from HRSV(Memphis-37)__AIY60640.1__F0 (opt4)
gggagagcggcucggccauuuugucccagucaguccggaggcugcggcugcagaaguaccgccugcggaguaacugcaaagaagcuuaccauggagcugcccauccugaagaccaacgccaucaccaccauccuggccgccgugacccugugcuucgccagcagccagaacaucaccgaggaguucuaccagagcaccugcagcgccgugagcaagggcuaccugagcgcccugagaaccggcugguacaccagcgugaucaccaucgagcugagcaacaucaaggagaacaagugcaacggcaccgacgccaaggugaagcugaucaagcaggagcuggacaaguacaagaacgccgugaccgagcugcagcugcugaugcagagcacccccgccgccaacaacagagccagaagagagcugcccagauucaugaacuacacccugaacaacaccaagaacaacaacgugacccugagcaagaagagaaagagaagauuccugggcuuccugcugggcgugggcagcgccaucgccagcggcaucgccgugagcaaggugcugcaccuggagggcgaggugaacaagaucaagaacgcccugcugagcaccaacaaggccguggugagccugagcaacggcgugagcgugcugaccagcaaggugcuggaccugaagaacuacaucgacaagcagcugcugcccaucgugaacaagcagagcugcagcaucagcaacaucgagaccgugaucgaguuccagcagaagaacaacagacugcuggagaucaccagagaguucagcgugaacgccggcgugaccacccccgugagcaccuacaugcugaccaacagcgagcugcugagccugaucaacgacaugcccaucaccaacgaccagaagaagcugaugagcaacaacgugcagaucgugagacagcagagcuacagcaucaugagcaucaucaaggaggaggugcuggccuacguggugcagcugccccuguacggcgugaucgacacccccugcuggaagcugcacaccagcccccugugcaccaccaacaccaaggagggcagcaacaucugccugaccagaaccgacagaggcugguacugcgacaacgccggcagcgugagcuucuucccccaggccgagaccugcaaggugcagagcaacagaguguucugcgacaccaugaacagccugacccugcccagcgaggugaaccugugcaacaucgacaucuucaaccccaaguacgacugcaagaucaugaccagcaagaccgacgugagcagcagcgugaucaccagccugggcgccaucgugagcugcuacggcaagaccaagugcaccgccagcaacaagaacagaggcaucaucaagaccuucagcaacggcugcgacuacgugagcaacaagggcguggacaccgugagcgugggcaacacccuguacuacgugaacaagcaggagggcaagagccuguacgugaagggcgagcccaucaucaacuucuacgacccccugguguuccccagcgacgaguucgacgccagcaucagccaggugaacgagaagaucaaccagagccuggccuucaucagaaagagcgacgagcugcugcacaacgugaacgugggcaagagcaccaccaacaucaugaucaccaccaucaucaucgugaucaucgugauccugcugcugcugaucgccgugggccuguuccuguacugcaaggccagaagcacccccgugacccugagcaaggaccagcugagcggcaucaacaacaucgccuucagcaacugaggacuaguguccaccugucccuccugggcugcuggauugucucguuuuccugccaaauaaacaggaucagcgcuuuacagaucuaaaaaaaaaaaaaaaaaaaaaaaaaaaaaaaaaaaaaaaaaaaaaaaaaaaaaaaaaaaaaaaaugcaucccccccccccccccccccccccccccccccaaaggcucuuuucagagccaccagaauu

SEQ ID NO: 11932 - RNA, 2027 nt, Artificial Sequence
  mRNA product Design e-5 comprising derived and/or modified sequence from HRSV(Memphis-37)__AIY60640.1__F0 (opt5)
gggagagcggcucggccauuuugucccagucaguccggaggcugcggcugcagaaguaccgccugcggaguaacugcaaagaagcuuaccauggagcugcccauccucaagaccaacgccauuacaacgauccuggcugccgugacccuuugcuucgcgagcucccagaauauuacagaagaguuuuaccaaucuaccuguagcgcugucuccaaaggcuaucugucugcccucagaacagggugguacaccagcguuaucacaauugaacuguccaacaucaaggagaauaaaugcaacggaaccgacgccaaggugaaacuuaucaagcaggaacuggauaaguauaaaaaugcugugacggagcuccagcugcugaugcagucuaccccugccgcuaacaaucgggcccgcagagagcucccgcgguucaugaacuacacacugaauaacaccaagaauaacaaugucacacuuagcaaaaagcgcaaaagacgguuucugggcuuccuccugggggugggauccgcgauugccagcggcaucgcuguuucuaaggugcuucaccuggaaggggaggucaacaagauuaaaaaugcccuccuguccaccaacaaggcugugguuagccugucuaacggaguguccguccucacgagcaaagugcuggaccuuaagaauuauaucgauaaacaacugcuccccauugugaacaagcagucuuguuccaucagcaauauugaaacagucaucgaguuucagcagaaaaacaaucgccugcuugagaucaccagagaauuuuccguuaacgccggcgugacaaccccugugucuaccuacaugcugacaaauagcgagcuccugucccugauuaacgacaugcccaucacgaaugaucaaaagaagcucaugagcaacaauguccagauugugcggcagcagucuuauuccaucaugagcauuaucaaagaagagguucuggcguacgugguccaacuuccucuguacggcgugaucgacacccccugcuggaagcuccauacaucuccucuguguaccacaaacaccaaagaagggagcaauauuugccuuacgcgcacagauagaggaugguauugugacaacgccggcuccguuucuuucuucccgcaggcugagaccugcaaggugcagagcaaucgggucuuuugugauaccaugaacucccugacacuccccagcgaggugaaccugugcaauaucgacauuuucaacccuaaauacgauuguaagaucaugaccucuaagacagacgucuccagcucugugauuacgucccugggggccaucguuagcugcuauggaaaaaccaagugcacagcuuccaauaaaaaccgcggcaucauuaagaccuuuucuaaugggugugauuacgugagcaacaaaggagucgacacaguguccguuggcaauacccucuauuacgugaacaagcaagaaggcaagucucuguaugucaaaggggagcccaucauuaauuucuacgacccucuuguguuucccagcgaugaguucgacgccuccaucagccaggugaacgaaaagauuaaucagucucuggccuucaucagaaaauccgaugaacuccugcacaacguuaaugucggaaagagcacgaccaacauuaugaucacaaccaucauuaucgugauuaucgugauucugcuucuccugaucgcugucggccuguuucucuacugcaaagcgcggucuacaccggugacccuguccaaggaccagcuuagcgggaucaauaacauugccuucucuaacugaggacuaguguccaccugucccuccugggcugcuggauugucucguuuuccugccaaauaaacaggaucagcgcuuuacagaucuaaaaaaaaaaaaaaaaaaaaaaaaaaaaaaaaaaaaaaaaaaaaaaaaaaaaaaaaaaaaaaaaugcaucccccccccccccccccccccccccccccccaaaggcucuuuucagagccaccagaauu

SEQ ID NO: 11933 - RNA, 2027 nt, Artificial Sequence
  mRNA product Design e-5 comprising derived and/or modified sequence from HRSV(Memphis-37)__AIY60640.1__F0 (opt6)
gggagagcggcucggccauuuugucccagucaguccggaggcugcggcugcagaaguaccgccugcggaguaacugcaaagaagcuuaccauggaacugccuauucuaaaaacaaaugccauaacaacaauucuugcagcaguaacauuauguuuugcaucaucacaaaacauuacagaagaauuuuaccaauccacuugcucagccguaucaaaaggauaccuaucagccuuaagaacagguugguacaccucaguaauaaccauagaacuaucaaacauaaaagaaaacaaaugcaaugguacugaugcaaaagucaaacuaaucaaacaagaacuggacaaauacaaaaaugcaguaaccgaacuacaacuccuaaugcaauccacaccugcagccaacaacagagcaagacgcgaacuaccaagauuuaugaauuacacauuaaacaacaccaagaacaacaauguaacucucucaaaaaaaagaaaaagacgcuuucuagguuuccuccuaggcgucggaucugcaauagccucaggaauagcaguaucaaaaguucuacaccuagaaggagaaguaaacaaaauuaaaaacgcauuacuaucaaccaacaaagcaguuguaucccuuucaaauggagucucuguacuuacaucaaaaguacucgaccuaaaaaacuauauagacaaacaacuacucccaauagucaauaagcaaucaugcagcauaucaaacauagaaacaguuauagaauuucaacaaaaaaacaacagacuacucgaaauaaccagagaauuuagcgucaacgcaggcguaaccacaccgguauccacauacaugcuuacaaacucagaacuccucucacuaauaaacgacaugccaauaacuaaugaccaaaaaaaacuaaugucaaacaauguccaaauaguccgucaacaaucauacucaauaaugucaauaauaaaagaagaaguauuagcauauguaguccaacuaccauuauacggcguuauagacacaccuuguuggaaacuucacacauccccacucuguacaaccaacacaaaagaagguuccaauauaugccuaacuagaaccgacagaggaugguauugcgacaacgcaggaucuguaucauucuuuccccaagcagaaacauguaaaguacaaaguaaccgcguauucugcgacaccaugaacucauuaacccucccauccgaaguuaauuuaugcaauauagacauauuuaauccuaaauacgacugcaaaauaaugacaucaaaaacagacguuaguuccuccguaaucacaucuuugggcgcaauagucucaugcuauggaaaaacaaaaugcacagccucaaacaaaaauagaggaauaauaaaaacauucagcaacggcugugauuauguauccaacaaaggaguagacacaguauccguaggcaauacccuuuacuacguuaauaaacaagaaggaaaaucauuauacgucaaaggagaaccuaucauaaauuucuacgacccauuaguauucccuucagacgaauuugaugccucaauaucccaagucaaugaaaaaaucaaccaaucacuagccuuuauccgcaaaucagacgaauuacuacacaacguaaacguaggcaaaucaacaacuaauauaaugauaacaacaauaauaauaguaauuauaguaauauuauuacuacuaaucgccguagguuuauucuuauacuguaaagcacgaucaacaccaguuacacucucaaaagaucaacuaucaggaauaaacaacauagcauuuuccaauuaaggacuaguguccaccugucccuccugggcugcuggauugucucguuuuccugccaaauaaacaggaucagcgcuuuacagaucuaaaaaaaaaaaaaaaaaaaaaaaaaaaaaaaaaaaaaaaaaaaaaaaaaaaaaaaaaaaaaaaaugcaucccccccccccccccccccccccccccccccaaaggcucuuuucagagccaccagaauu

SEQ ID NO: 11934 - RNA, 2027 nt, Artificial Sequence
  mRNA product Design e-5 comprising derived and/or modified sequence from HRSV(Memphis-37)__AIY60640.1__F0 (opt11)
gggagagcggcucggccauuuugucccagucaguccggaggcugcggcugcagaaguaccgccugcggaguaacugcaaagaagcuuaccauggaacuccccauccucaaaacaaacgccauaaccacuauccucgccgccgucacccucugcuucgccuccucccaaaacaucacagaggaguucuaccaauccacaugcuccgccgucuccaaaggcuaccucagcgcccuacguaccggcugguacaccagcgucaucacaauagaacucuccaacaucaaggaaaacaaaugcaacggcaccgaugccaaaguaaaacucaucaaacaagaacucgauaaauacaaaaacgccgucaccgaacuacaacuccuaaugcaaagcacacccgccgccaacaacagagcacggcgcgaacugccccgcuucaugaacuacacccucaacaacaccaaaaauaacaacgucacccuauccaagaaacgcaaacgccgauuccucgguuuccuacucggcguaggaagcgccauagccucaggcaucgccgucuccaaaguccuccaucuggaaggcgaagucaacaaaaucaaaaacgcacucuuauccaccaacaaagccgucgucucccucucgaacggggucuccguccuuaccuccaaaguccucgaccuuaaaaacuacaucgacaaacaacuacuaccaauagucaauaaacaauccugcuccaucucaaacauagaaaccgucauagaguuccaacagaagaacaaucgccuccucgaaauaacucgcgaguucuccgucaacgcaggcgucacgaccccugucucaacauacaugcuaacuaacucagaacuccuaagccuaaucaacgacaugcccaucacaaacgaccaaaagaaacucaugagcaacaauguccagauagucagacagcaauccuauagcaucaugucuauaauaaaagaagaagugcucgccuacguaguccaacucccucuuuacggcgucauagacacacccugcuggaaacuccacacaucuccucucugcaccaccaacacaaaagaaggcagcaacaucugccugacccgaaccgaccgcggaugguacugcgacaacgcuggcuccgugucuuucuuuccccaagccgaaaccugcaaaguccaguccaaccgcgucuucugcgacacaaugaacucccucacccuacccuccgaaguuaaccucugcaacaucgacaucuucaauccaaaauacgacugcaaaaucaugaccucgaaaacggacguauccuccuccgucauaacaucacuuggagccaucguuagcugcuacggaaaaaccaaauguaccgccuccaacaaaaaccgcggaauaaucaaaacauucuccaacggcugcgacuacguaagcaacaaaggggucgauacugucuccguagguaacacccuauacuacgucaacaaacaagaaggaaaaucacuauacguuaaaggcgaacccauuaucaacuucuacgacccccucguuuucccauccgacgaguucgacgccuccauaagccaaguuaacgaaaagauaaaccaaucgcucgcauucauccgcaaauccgacgaacuccuacacaacgucaacgugggcaaauccacaacaaacaucaugaucaccaccaucauuaucgucauaauagucauccuccuccugcucaucgccgugggacuauuccuauacugcaaagcccgcucgacgcccgucacacuuuccaaagaccaacuaagcggaaucaacaacauagcguucagcaauuaaggacuaguguccaccugucccuccugggcugcuggauugucucguuuuccugccaaauaaacaggaucagcgcuuuacagaucuaaaaaaaaaaaaaaaaaaaaaaaaaaaaaaaaaaaaaaaaaaaaaaaaaaaaaaaaaaaaaaaaugcaucccccccccccccccccccccccccccccccaaaggcucuuuucagagccaccagaauu

SEQ ID NO: 11935 - RNA, 2094 nt, Artificial Sequence
  mRNA product Design e-6 comprising derived and/or modified sequence from HRSV(Memphis-37)__AIY60640.1__F0 (wt)
gggagagcggcucggccauuuugucccagucaguccggaggcugcggcugcagaaguaccgccugcggaguaacugcaaagaagcuuaccauggaguugccaauccucaaaacaaaugcaauuaccacaauccuugcugcagucacacucuguuucgcuuccagucaaaacaucacugaagaauuuuaucaaucaacaugcagugcaguuagcaaaggcuaucuuagugcuuuaagaacugguugguauacuaguguuauaacuauagaauuaaguaauaucaaggaaaauaaguguaauggaacagaugcuaagguaaaauugauaaaacaagaauuagauaaauauaaaaaugcuguaacagaauugcaguugcucaugcaaagcacaccagcagccaacaaucgagccagaagagaacuaccaagguuuaugaauuauacacucaacaauaccaaaaauaacaauguaacauuaagcaagaaaaggaaaagaagauuucuuggcuuuuuguuagguguuggaucugcaaucgccaguggcauugcuguaucuaaaguccugcaccuagaaggggaagugaacaaaaucaaaaaugcucuacuauccacaaacaaggcuguagucagcuuaucaaauggaguuagugucuuaaccagcaaaguguuagaccucaaaaacuauauagauaaacaguuguuacccauugugaacaagcaaagcugcagcauaucaaacauugaaacugugauagaauuccaacaaaagaacaacagacuacuagagauuaccagggaauuuaguguuaaugcagguguaacuacaccuguaagcacuuauauguuaacaaauagugaauuauuaucauuaaucaaugauaugccuauaacaaaugaucagaaaaaguuaauguccaacaauguucaaauaguuagacagcaaaguuacucuaucauguccauaauaaaggaggaagucuuagcauauguaguucaauuaccacuauaugguguaauagauacaccuuguuggaaacuacacacauccccucuaugcacaaccaacacaaaggaaggguccaacaucuguuuaacaagaaccgacagaggaugguacugugacaaugcaggaucagugucuuucuucccacaagcugaaacaugcaaaguucaaucgaaucgaguauuuugugacacaaugaacagucuaacauuaccaagugaaguaaaucucugcaacauugacauauucaacccuaaauaugauugcaaaauuaugacuucaaaaacagaugugagcagcuccguuaucacaucucuaggagccauugugucaugcuauggcaaaacuaaauguacagcauccaauaaaaaucguggaaucauaaagacauuuucuaacgggugugauuauguaucaaauaaggggguggacacuguaucuguagguaauacauuauauuauguaaauaagcaagaaggaaaaagccucuauguaaaaggugaaccaauaauaaauuucuaugacccauuaguguucccuucugaugaauuugaugcaucaauaucucaagucaaugagaagauuaaccagagccuagcauuuauucguaaauccgaugaauuauuacauaauguaaauguugguaaauccaccacaaauaucaugauaacuacuauaauuauagugauuauaguaauauuguuauuauuaauugcaguugggcuguuccuauacugcaaggccagaagcacaccagucacacuaagcaaggaucaacugagugguauaaauaauauugcauuuaguaacugaggacuaguacuggcugcaucucccuuuccucuguccuccauccuucucccaggauggugaagggggaccugguacccagugauccccaccccaggauccuaaaucaugacuuaccugcuaauaaaaacucauuggaaaagugagaagaucuaaaaaaaaaaaaaaaaaaaaaaaaaaaaaaaaaaaaaaaaaaaaaaaaaaaaaaaaaaaaaaaaugcaucccccccccccccccccccccccccccccccaaaggcucuuuucagagccaccagaauu

SEQ ID NO: 11936 - RNA, 2094 nt, Artificial Sequence
  mRNA product Design e-6 comprising derived and/or modified sequence from HRSV(Memphis-37)__AIY60640.1__F0 (opt1)
gggagagcggcucggccauuuugucccagucaguccggaggcugcggcugcagaaguaccgccugcggaguaacugcaaagaagcuuaccauggagcugcccauccucaagaccaacgccaucaccacgauccuggccgcggugacccugugcuucgccagcucccagaacaucaccgaggaguucuaccagagcacgugcuccgccgucagcaagggcuaccucuccgcccugcgcaccgggugguacaccagcgugaucaccaucgagcuguccaacaucaaggagaacaagugcaacggcaccgacgccaaggugaagcucaucaagcaggagcuggacaaguacaagaacgcggucacggagcugcagcuccugaugcagagcaccccggccgccaacaaccgggcccgccgggagcugccccgcuucaugaacuacacccucaacaacaccaagaacaacaacgugacgcuguccaagaagcggaagcgccgguuccugggguuccuccugggcguggggagcgcgaucgccuccggcaucgccgucagcaaggugcugcaccucgagggcgaggugaacaagaucaagaacgcccugcuguccaccaacaaggccgucgugagccucuccaacggggugagcguccugaccuccaaggugcuggaccucaagaacuacaucgacaagcagcugcugcccaucgugaacaagcagagcugcuccaucagcaacaucgagaccgucaucgaguuccagcagaagaacaaccgccuccuggagaucacgcgggaguucagcgugaacgcgggcgugaccacccccgucuccaccuacaugcugacgaacagcgagcuccugucccugaucaacgacaugccgaucaccaacgaccagaagaagcucaugagcaacaacgugcagaucgugcgccagcaguccuacagcaucauguccaucaucaaggaggagguccuggccuacguggugcagcugccccucuacggggucaucgacacccccugcuggaagcugcacaccagcccccugugcacgaccaacaccaaggagggcuccaacaucugccucacccggacggaccgcgggugguacugcgacaacgccggcagcguguccuucuucccgcaggccgagaccugcaagguccagagcaaccggguguucugcgacaccaugaacucccugacccugcccagcgaggugaaccucugcaacaucgacaucuucaaccccaaguacgacugcaagaucaugacguccaagaccgacgucagcuccagcgugaucaccucccugggcgccaucgugagcugcuacgggaagaccaagugcacggcgagcaacaagaaccgcggcaucaucaagaccuucuccaacgggugcgacuacgucagcaacaagggcguggacaccguguccgucggcaacacccuguacuacgugaacaagcaggagggcaagagccucuacgugaagggggagcccaucaucaacuucuacgacccgcuggucuuccccuccgacgaguucgacgccagcaucucccaggugaacgagaagaucaaccagagccuggccuucauccggaaguccgacgagcuccugcacaacgugaacgucggcaagagcaccacgaacaucaugaucaccaccaucaucaucgugaucaucgugauccugcugcuccugaucgccgucgggcuguuccucuacugcaaggcccgcuccacccccgugacgcugagcaaggaccagcuguccgggaucaacaacaucgcguucagcaacugaggacuaguacuggcugcaucucccuuuccucuguccuccauccuucucccaggauggugaagggggaccugguacccagugauccccaccccaggauccuaaaucaugacuuaccugcuaauaaaaacucauuggaaaagugagaagaucuaaaaaaaaaaaaaaaaaaaaaaaaaaaaaaaaaaaaaaaaaaaaaaaaaaaaaaaaaaaaaaaaugcaucccccccccccccccccccccccccccccccaaaggcucuuuucagagccaccagaauu

SEQ ID NO: 11937 - RNA, 2094 nt, Artificial Sequence
  mRNA product Design e-6 comprising derived and/or modified sequence from HRSV(Memphis-37)__AIY60640.1__F0 (opt2)
gggagagcggcucggccauuuugucccagucaguccggaggcugcggcugcagaaguaccgccugcggaguaacugcaaagaagcuuaccauggagcuccccauccucaagaccaacgccaucaccaccauccucgccgccgucacccucugcuucgccuccucccagaacaucaccgaggaguucuaccaguccaccugcuccgccgucuccaagggcuaccucuccgcccuccgcaccggcugguacaccuccgucaucaccaucgagcucuccaacaucaaggagaacaagugcaacggcaccgacgccaaggucaagcucaucaagcaggagcucgacaaguacaagaacgccgucaccgagcuccagcuccucaugcaguccacccccgccgccaacaaccgcgcccgccgcgagcucccccgcuucaugaacuacacccucaacaacaccaagaacaacaacgucacccucuccaagaagcgcaagcgccgcuuccucggcuuccuccucggcgucggcuccgccaucgccuccggcaucgccgucuccaagguccuccaccucgagggcgaggucaacaagaucaagaacgcccuccucuccaccaacaaggccgucgucucccucuccaacggcgucuccguccucaccuccaagguccucgaccucaagaacuacaucgacaagcagcuccuccccaucgucaacaagcaguccugcuccaucuccaacaucgagaccgucaucgaguuccagcagaagaacaaccgccuccucgagaucacccgcgaguucuccgucaacgccggcgucaccacccccgucuccaccuacaugcucaccaacuccgagcuccucucccucaucaacgacaugcccaucaccaacgaccagaagaagcucauguccaacaacguccagaucguccgccagcaguccuacuccaucauguccaucaucaaggaggagguccucgccuacgucguccagcucccccucuacggcgucaucgacacccccugcuggaagcuccacaccuccccccucugcaccaccaacaccaaggagggcuccaacaucugccucacccgcaccgaccgcggcugguacugcgacaacgccggcuccgucuccuucuucccccaggccgagaccugcaagguccaguccaaccgcgucuucugcgacaccaugaacucccucacccuccccuccgaggucaaccucugcaacaucgacaucuucaaccccaaguacgacugcaagaucaugaccuccaagaccgacgucuccuccuccgucaucaccucccucggcgccaucgucuccugcuacggcaagaccaagugcaccgccuccaacaagaaccgcggcaucaucaagaccuucuccaacggcugcgacuacgucuccaacaagggcgucgacaccgucuccgucggcaacacccucuacuacgucaacaagcaggagggcaagucccucuacgucaagggcgagcccaucaucaacuucuacgacccccucgucuuccccuccgacgaguucgacgccuccaucucccaggucaacgagaagaucaaccagucccucgccuucauccgcaaguccgacgagcuccuccacaacgucaacgucggcaaguccaccaccaacaucaugaucaccaccaucaucaucgucaucaucgucauccuccuccuccucaucgccgucggccucuuccucuacugcaaggcccgcuccacccccgucacccucuccaaggaccagcucuccggcaucaacaacaucgccuucuccaacugaggacuaguacuggcugcaucucccuuuccucuguccuccauccuucucccaggauggugaagggggaccugguacccagugauccccaccccaggauccuaaaucaugacuuaccugcuaauaaaaacucauuggaaaagugagaagaucuaaaaaaaaaaaaaaaaaaaaaaaaaaaaaaaaaaaaaaaaaaaaaaaaaaaaaaaaaaaaaaaaugcaucccccccccccccccccccccccccccccccaaaggcucuuuucagagccaccagaauu

SEQ ID NO: 11938 - RNA, 2094 nt, Artificial Sequence
  mRNA product Design e-6 comprising derived and/or modified sequence from HRSV(Memphis-37)__AIY60640.1__F0 (opt3)
gggagagcggcucggccauuuugucccagucaguccggaggcugcggcugcagaaguaccgccugcggaguaacugcaaagaagcuuaccauggagcugcccauccucaagaccaacgccauuacaacuauacuugcugcagugacgcugugcuucgccagcucccagaauaucaccgaagaguuuuaccaaucuacauguucagcggucaguaaaggcuauuugagcgcuuuaagaacugggugguacaccuccguuauuacaaucgaacugucuaacauuaaggagaauaaaugcaacggaaccgacgccaaggugaaacuaaucaagcaggaacucgauaaguauaaaaaugcaguaacugagcugcagcuucugaugcagucgaccccugccgcuaacaauagggcacggcgcgaguugccacgauucaugaacuacacacucaauaacacgaagaauaacaaugugacucugagcaaaaagcguaaaagaagguuucuggguuuccucuuaggcgucgggucagccauagcuaguggaaucgccguguccaagguucugcaccuugaaggcgaggugaacaagauuaaaaaugcguugcugucuaccaacaaggcagucgugagccuauccaacgguguaucaguucucacaaguaaagugcuggaccuuaagaauuauaucgauaaacaacuguugccgauugucaacaagcagagcuguucuaucuccaauauagaaacugugauugaguuucagcagaaaaacaaucggcuccuggagaucacccgcgaguucucagugaacgccggggucacaacccccguuagcacguacauguuaacuaauagugaacugcucucucuuauuaacgacaugccuaucacaaaugaucaaaagaagcugauguccaacaaugugcagaucguaagacagcagagcuauucgauuaugucuauaaucaaagaagagguguuggcuuacgucgugcaacuaccacuguacggaguuauugacacccccugcuggaagcuccauacuuccccucuguguacaaccaacacgaaagaaggcucaaauaucugccuuaccaggacagaucggggcugguauugugacaacgccgggagugugagcuuuuucccacaggcagagacuugcaagguccaguccaaucgcguguuuugugauaccaugaacucucugacauugcccagcgagguaaaccucugcaauauagacauuuucaacccuaaauacgauuguaagaucaugacuucaaagaccgacguuaguuccagcgugaucacaucucugggagcuauugucucaugcuaugguaaaaccaagugcacugccaguaauaaaaaccgaggcaucauuaagacguuuagcaaugggugugauuacguguccaacaaaggagucgacacagugucuguuggcaauaccuuauauuacgugaacaagcaagaagguaagucgcuguauguaaaaggggagccaauaaucaauuucuacgacccgcuagucuuucccagcgaugaguucgacgcguccauuucacaggugaacgaaaagaucaaucagagucucgccuucaucagaaaaucugaugaacugcuucacaacguuaaugugggaaagagcacuaccaacauuaugauaacaaccaucauuaucgucauuaucgugauauugcugcuccugaucgcaguaggccuuuuucuguacugcaaagcuagguccacuccugugacauugucaaaggaccagcucagcggcauuaauaacaucgccuucucuaacugaggacuaguacuggcugcaucucccuuuccucuguccuccauccuucucccaggauggugaagggggaccugguacccagugauccccaccccaggauccuaaaucaugacuuaccugcuaauaaaaacucauuggaaaagugagaagaucuaaaaaaaaaaaaaaaaaaaaaaaaaaaaaaaaaaaaaaaaaaaaaaaaaaaaaaaaaaaaaaaaugcaucccccccccccccccccccccccccccccccaaaggcucuuuucagagccaccagaauu

SEQ ID NO: 11939 - RNA, 2094 nt, Artificial Sequence
  mRNA product Design e-6 comprising derived and/or modified sequence from HRSV(Memphis-37)__AIY60640.1__F0 (opt4)
gggagagcggcucggccauuuugucccagucaguccggaggcugcggcugcagaaguaccgccugcggaguaacugcaaagaagcuuaccauggagcugcccauccugaagaccaacgccaucaccaccauccuggccgccgugacccugugcuucgccagcagccagaacaucaccgaggaguucuaccagagcaccugcagcgccgugagcaagggcuaccugagcgcccugagaaccggcugguacaccagcgugaucaccaucgagcugagcaacaucaaggagaacaagugcaacggcaccgacgccaaggugaagcugaucaagcaggagcuggacaaguacaagaacgccgugaccgagcugcagcugcugaugcagagcacccccgccgccaacaacagagccagaagagagcugcccagauucaugaacuacacccugaacaacaccaagaacaacaacgugacccugagcaagaagagaaagagaagauuccugggcuuccugcugggcgugggcagcgccaucgccagcggcaucgccgugagcaaggugcugcaccuggagggcgaggugaacaagaucaagaacgcccugcugagcaccaacaaggccguggugagccugagcaacggcgugagcgugcugaccagcaaggugcuggaccugaagaacuacaucgacaagcagcugcugcccaucgugaacaagcagagcugcagcaucagcaacaucgagaccgugaucgaguuccagcagaagaacaacagacugcuggagaucaccagagaguucagcgugaacgccggcgugaccacccccgugagcaccuacaugcugaccaacagcgagcugcugagccugaucaacgacaugcccaucaccaacgaccagaagaagcugaugagcaacaacgugcagaucgugagacagcagagcuacagcaucaugagcaucaucaaggaggaggugcuggccuacguggugcagcugccccuguacggcgugaucgacacccccugcuggaagcugcacaccagcccccugugcaccaccaacaccaaggagggcagcaacaucugccugaccagaaccgacagaggcugguacugcgacaacgccggcagcgugagcuucuucccccaggccgagaccugcaaggugcagagcaacagaguguucugcgacaccaugaacagccugacccugcccagcgaggugaaccugugcaacaucgacaucuucaaccccaaguacgacugcaagaucaugaccagcaagaccgacgugagcagcagcgugaucaccagccugggcgccaucgugagcugcuacggcaagaccaagugcaccgccagcaacaagaacagaggcaucaucaagaccuucagcaacggcugcgacuacgugagcaacaagggcguggacaccgugagcgugggcaacacccuguacuacgugaacaagcaggagggcaagagccuguacgugaagggcgagcccaucaucaacuucuacgacccccugguguuccccagcgacgaguucgacgccagcaucagccaggugaacgagaagaucaaccagagccuggccuucaucagaaagagcgacgagcugcugcacaacgugaacgugggcaagagcaccaccaacaucaugaucaccaccaucaucaucgugaucaucgugauccugcugcugcugaucgccgugggccuguuccuguacugcaaggccagaagcacccccgugacccugagcaaggaccagcugagcggcaucaacaacaucgccuucagcaacugaggacuaguacuggcugcaucucccuuuccucuguccuccauccuucucccaggauggugaagggggaccugguacccagugauccccaccccaggauccuaaaucaugacuuaccugcuaauaaaaacucauuggaaaagugagaagaucuaaaaaaaaaaaaaaaaaaaaaaaaaaaaaaaaaaaaaaaaaaaaaaaaaaaaaaaaaaaaaaaaugcaucccccccccccccccccccccccccccccccaaaggcucuuuucagagccaccagaauu

SEQ ID NO: 11940 - RNA, 2094 nt, Artificial Sequence
  mRNA product Design e-6 comprising derived and/or modified sequence from HRSV(Memphis-37)__AIY60640.1__F0 (opt5)
gggagagcggcucggccauuuugucccagucaguccggaggcugcggcugcagaaguaccgccugcggaguaacugcaaagaagcuuaccauggagcugcccauccucaagaccaacgccauuacaacgauccuggcugccgugacccuuugcuucgcgagcucccagaauauuacagaagaguuuuaccaaucuaccuguagcgcugucuccaaaggcuaucugucugcccucagaacagggugguacaccagcguuaucacaauugaacuguccaacaucaaggagaauaaaugcaacggaaccgacgccaaggugaaacuuaucaagcaggaacuggauaaguauaaaaaugcugugacggagcuccagcugcugaugcagucuaccccugccgcuaacaaucgggcccgcagagagcucccgcgguucaugaacuacacacugaauaacaccaagaauaacaaugucacacuuagcaaaaagcgcaaaagacgguuucugggcuuccuccugggggugggauccgcgauugccagcggcaucgcuguuucuaaggugcuucaccuggaaggggaggucaacaagauuaaaaaugcccuccuguccaccaacaaggcugugguuagccugucuaacggaguguccguccucacgagcaaagugcuggaccuuaagaauuauaucgauaaacaacugcuccccauugugaacaagcagucuuguuccaucagcaauauugaaacagucaucgaguuucagcagaaaaacaaucgccugcuugagaucaccagagaauuuuccguuaacgccggcgugacaaccccugugucuaccuacaugcugacaaauagcgagcuccugucccugauuaacgacaugcccaucacgaaugaucaaaagaagcucaugagcaacaauguccagauugugcggcagcagucuuauuccaucaugagcauuaucaaagaagagguucuggcguacgugguccaacuuccucuguacggcgugaucgacacccccugcuggaagcuccauacaucuccucuguguaccacaaacaccaaagaagggagcaauauuugccuuacgcgcacagauagaggaugguauugugacaacgccggcuccguuucuuucuucccgcaggcugagaccugcaaggugcagagcaaucgggucuuuugugauaccaugaacucccugacacuccccagcgaggugaaccugugcaauaucgacauuuucaacccuaaauacgauuguaagaucaugaccucuaagacagacgucuccagcucugugauuacgucccugggggccaucguuagcugcuauggaaaaaccaagugcacagcuuccaauaaaaaccgcggcaucauuaagaccuuuucuaaugggugugauuacgugagcaacaaaggagucgacacaguguccguuggcaauacccucuauuacgugaacaagcaagaaggcaagucucuguaugucaaaggggagcccaucauuaauuucuacgacccucuuguguuucccagcgaugaguucgacgccuccaucagccaggugaacgaaaagauuaaucagucucuggccuucaucagaaaauccgaugaacuccugcacaacguuaaugucggaaagagcacgaccaacauuaugaucacaaccaucauuaucgugauuaucgugauucugcuucuccugaucgcugucggccuguuucucuacugcaaagcgcggucuacaccggugacccuguccaaggaccagcuuagcgggaucaauaacauugccuucucuaacugaggacuaguacuggcugcaucucccuuuccucuguccuccauccuucucccaggauggugaagggggaccugguacccagugauccccaccccaggauccuaaaucaugacuuaccugcuaauaaaaacucauuggaaaagugagaagaucuaaaaaaaaaaaaaaaaaaaaaaaaaaaaaaaaaaaaaaaaaaaaaaaaaaaaaaaaaaaaaaaaugcaucccccccccccccccccccccccccccccccaaaggcucuuuucagagccaccagaauu

SEQ ID NO: 11941 - RNA, 2094 nt, Artificial Sequence
  mRNA product Design e-6 comprising derived and/or modified sequence from HRSV(Memphis-37)__AIY60640.1__F0 (opt6)
gggagagcggcucggccauuuugucccagucaguccggaggcugcggcugcagaaguaccgccugcggaguaacugcaaagaagcuuaccauggaacugccuauucuaaaaacaaaugccauaacaacaauucuugcagcaguaacauuauguuuugcaucaucacaaaacauuacagaagaauuuuaccaauccacuugcucagccguaucaaaaggauaccuaucagccuuaagaacagguugguacaccucaguaauaaccauagaacuaucaaacauaaaagaaaacaaaugcaaugguacugaugcaaaagucaaacuaaucaaacaagaacuggacaaauacaaaaaugcaguaaccgaacuacaacuccuaaugcaauccacaccugcagccaacaacagagcaagacgcgaacuaccaagauuuaugaauuacacauuaaacaacaccaagaacaacaauguaacucucucaaaaaaaagaaaaagacgcuuucuagguuuccuccuaggcgucggaucugcaauagccucaggaauagcaguaucaaaaguucuacaccuagaaggagaaguaaacaaaauuaaaaacgcauuacuaucaaccaacaaagcaguuguaucccuuucaaauggagucucuguacuuacaucaaaaguacucgaccuaaaaaacuauauagacaaacaacuacucccaauagucaauaagcaaucaugcagcauaucaaacauagaaacaguuauagaauuucaacaaaaaaacaacagacuacucgaaauaaccagagaauuuagcgucaacgcaggcguaaccacaccgguauccacauacaugcuuacaaacucagaacuccucucacuaauaaacgacaugccaauaacuaaugaccaaaaaaaacuaaugucaaacaauguccaaauaguccgucaacaaucauacucaauaaugucaauaauaaaagaagaaguauuagcauauguaguccaacuaccauuauacggcguuauagacacaccuuguuggaaacuucacacauccccacucuguacaaccaacacaaaagaagguuccaauauaugccuaacuagaaccgacagaggaugguauugcgacaacgcaggaucuguaucauucuuuccccaagcagaaacauguaaaguacaaaguaaccgcguauucugcgacaccaugaacucauuaacccucccauccgaaguuaauuuaugcaauauagacauauuuaauccuaaauacgacugcaaaauaaugacaucaaaaacagacguuaguuccuccguaaucacaucuuugggcgcaauagucucaugcuauggaaaaacaaaaugcacagccucaaacaaaaauagaggaauaauaaaaacauucagcaacggcugugauuauguauccaacaaaggaguagacacaguauccguaggcaauacccuuuacuacguuaauaaacaagaaggaaaaucauuauacgucaaaggagaaccuaucauaaauuucuacgacccauuaguauucccuucagacgaauuugaugccucaauaucccaagucaaugaaaaaaucaaccaaucacuagccuuuauccgcaaaucagacgaauuacuacacaacguaaacguaggcaaaucaacaacuaauauaaugauaacaacaauaauaauaguaauuauaguaauauuauuacuacuaaucgccguagguuuauucuuauacuguaaagcacgaucaacaccaguuacacucucaaaagaucaacuaucaggaauaaacaacauagcauuuuccaauuaaggacuaguacuggcugcaucucccuuuccucuguccuccauccuucucccaggauggugaagggggaccugguacccagugauccccaccccaggauccuaaaucaugacuuaccugcuaauaaaaacucauuggaaaagugagaagaucuaaaaaaaaaaaaaaaaaaaaaaaaaaaaaaaaaaaaaaaaaaaaaaaaaaaaaaaaaaaaaaaaugcaucccccccccccccccccccccccccccccccaaaggcucuuuucagagccaccagaauu

SEQ ID NO: 11942 - RNA, 2094 nt, Artificial Sequence
  mRNA product Design e-6 comprising derived and/or modified sequence from HRSV(Memphis-37)__AIY60640.1__F0 (opt11)
gggagagcggcucggccauuuugucccagucaguccggaggcugcggcugcagaaguaccgccugcggaguaacugcaaagaagcuuaccauggaacuccccauccucaaaacaaacgccauaaccacuauccucgccgccgucacccucugcuucgccuccucccaaaacaucacagaggaguucuaccaauccacaugcuccgccgucuccaaaggcuaccucagcgcccuacguaccggcugguacaccagcgucaucacaauagaacucuccaacaucaaggaaaacaaaugcaacggcaccgaugccaaaguaaaacucaucaaacaagaacucgauaaauacaaaaacgccgucaccgaacuacaacuccuaaugcaaagcacacccgccgccaacaacagagcacggcgcgaacugccccgcuucaugaacuacacccucaacaacaccaaaaauaacaacgucacccuauccaagaaacgcaaacgccgauuccucgguuuccuacucggcguaggaagcgccauagccucaggcaucgccgucuccaaaguccuccaucuggaaggcgaagucaacaaaaucaaaaacgcacucuuauccaccaacaaagccgucgucucccucucgaacggggucuccguccuuaccuccaaaguccucgaccuuaaaaacuacaucgacaaacaacuacuaccaauagucaauaaacaauccugcuccaucucaaacauagaaaccgucauagaguuccaacagaagaacaaucgccuccucgaaauaacucgcgaguucuccgucaacgcaggcgucacgaccccugucucaacauacaugcuaacuaacucagaacuccuaagccuaaucaacgacaugcccaucacaaacgaccaaaagaaacucaugagcaacaauguccagauagucagacagcaauccuauagcaucaugucuauaauaaaagaagaagugcucgccuacguaguccaacucccucuuuacggcgucauagacacacccugcuggaaacuccacacaucuccucucugcaccaccaacacaaaagaaggcagcaacaucugccugacccgaaccgaccgcggaugguacugcgacaacgcuggcuccgugucuuucuuuccccaagccgaaaccugcaaaguccaguccaaccgcgucuucugcgacacaaugaacucccucacccuacccuccgaaguuaaccucugcaacaucgacaucuucaauccaaaauacgacugcaaaaucaugaccucgaaaacggacguauccuccuccgucauaacaucacuuggagccaucguuagcugcuacggaaaaaccaaauguaccgccuccaacaaaaaccgcggaauaaucaaaacauucuccaacggcugcgacuacguaagcaacaaaggggucgauacugucuccguagguaacacccuauacuacgucaacaaacaagaaggaaaaucacuauacguuaaaggcgaacccauuaucaacuucuacgacccccucguuuucccauccgacgaguucgacgccuccauaagccaaguuaacgaaaagauaaaccaaucgcucgcauucauccgcaaauccgacgaacuccuacacaacgucaacgugggcaaauccacaacaaacaucaugaucaccaccaucauuaucgucauaauagucauccuccuccugcucaucgccgugggacuauuccuauacugcaaagcccgcucgacgcccgucacacuuuccaaagaccaacuaagcggaaucaacaacauagcguucagcaauuaaggacuaguacuggcugcaucucccuuuccucuguccuccauccuucucccaggauggugaagggggaccugguacccagugauccccaccccaggauccuaaaucaugacuuaccugcuaauaaaaacucauuggaaaagugagaagaucuaaaaaaaaaaaaaaaaaaaaaaaaaaaaaaaaaaaaaaaaaaaaaaaaaaaaaaaaaaaaaaaaugcaucccccccccccccccccccccccccccccccaaaggcucuuuucagagccaccagaauu

SEQ ID NO: 11943 - RNA, 2310 nt, Artificial Sequence
  mRNA product Design f-1 comprising derived and/or modified sequence from HRSV(Memphis-37)__AIY60640.1__F0 (wt)
gggagagcggcucggccauuuugucccagucaguccggaggcugcggcugcagaaguaccgccugcggaguaacugcaaagaagcuuaccauggaguugccaauccucaaaacaaaugcaauuaccacaauccuugcugcagucacacucuguuucgcuuccagucaaaacaucacugaagaauuuuaucaaucaacaugcagugcaguuagcaaaggcuaucuuagugcuuuaagaacugguugguauacuaguguuauaacuauagaauuaaguaauaucaaggaaaauaaguguaauggaacagaugcuaagguaaaauugauaaaacaagaauuagauaaauauaaaaaugcuguaacagaauugcaguugcucaugcaaagcacaccagcagccaacaaucgagccagaagagaacuaccaagguuuaugaauuauacacucaacaauaccaaaaauaacaauguaacauuaagcaagaaaaggaaaagaagauuucuuggcuuuuuguuagguguuggaucugcaaucgccaguggcauugcuguaucuaaaguccugcaccuagaaggggaagugaacaaaaucaaaaaugcucuacuauccacaaacaaggcuguagucagcuuaucaaauggaguuagugucuuaaccagcaaaguguuagaccucaaaaacuauauagauaaacaguuguuacccauugugaacaagcaaagcugcagcauaucaaacauugaaacugugauagaauuccaacaaaagaacaacagacuacuagagauuaccagggaauuuaguguuaaugcagguguaacuacaccuguaagcacuuauauguuaacaaauagugaauuauuaucauuaaucaaugauaugccuauaacaaaugaucagaaaaaguuaauguccaacaauguucaaauaguuagacagcaaaguuacucuaucauguccauaauaaaggaggaagucuuagcauauguaguucaauuaccacuauaugguguaauagauacaccuuguuggaaacuacacacauccccucuaugcacaaccaacacaaaggaaggguccaacaucuguuuaacaagaaccgacagaggaugguacugugacaaugcaggaucagugucuuucuucccacaagcugaaacaugcaaaguucaaucgaaucgaguauuuugugacacaaugaacagucuaacauuaccaagugaaguaaaucucugcaacauugacauauucaacccuaaauaugauugcaaaauuaugacuucaaaaacagaugugagcagcuccguuaucacaucucuaggagccauugugucaugcuauggcaaaacuaaauguacagcauccaauaaaaaucguggaaucauaaagacauuuucuaacgggugugauuauguaucaaauaaggggguggacacuguaucuguagguaauacauuauauuauguaaauaagcaagaaggaaaaagccucuauguaaaaggugaaccaauaauaaauuucuaugacccauuaguguucccuucugaugaauuugaugcaucaauaucucaagucaaugagaagauuaaccagagccuagcauuuauucguaaauccgaugaauuauuacauaauguaaauguugguaaauccaccacaaauaucaugauaacuacuauaauuauagugauuauaguaauauuguuauuauuaauugcaguugggcuguuccuauacugcaaggccagaagcacaccagucacacuaagcaaggaucaacugagugguauaaauaauauugcauuuaguaacugaggacuagugaagggaacacccaaauuuaauucagccuuaagcacaauuaauuaagagugaaacguaauuguacaagcaguuggucacccaccauagggcaugaucaacaccgcaaccuuuccuuuuucccccagugauucugaaaaaccccucuucccuucagcuugcuuagauguuccaaauuuaguaagcuuaaggcggccuacagaagaaaaagaaaaaaaaggccacaaaaguucccucucacuuucaguaaauaaaauaaaagcagcaacagaaauaaagaaauaaaugaaauucaaaaugaaauaaauauuguguugugcagcauuaaaaaaucaauaaaaauuaaaaaugagcaagaucuaaaaaaaaaaaaaaaaaaaaaaaaaaaaaaaaaaaaaaaaaaaaaaaaaaaaaaaaaaaaaaaaugcaucccccccccccccccccccccccccccccccaaaggcucuuuucagagccaccagaauu

SEQ ID NO: 11944 - RNA, 2310 nt, Artificial Sequence
  mRNA product Design f-1 comprising derived and/or modified sequence from HRSV(Memphis-37)__AIY60640.1__F0 (opt1)
gggagagcggcucggccauuuugucccagucaguccggaggcugcggcugcagaaguaccgccugcggaguaacugcaaagaagcuuaccauggagcugcccauccucaagaccaacgccaucaccacgauccuggccgcggugacccugugcuucgccagcucccagaacaucaccgaggaguucuaccagagcacgugcuccgccgucagcaagggcuaccucuccgcccugcgcaccgggugguacaccagcgugaucaccaucgagcuguccaacaucaaggagaacaagugcaacggcaccgacgccaaggugaagcucaucaagcaggagcuggacaaguacaagaacgcggucacggagcugcagcuccugaugcagagcaccccggccgccaacaaccgggcccgccgggagcugccccgcuucaugaacuacacccucaacaacaccaagaacaacaacgugacgcuguccaagaagcggaagcgccgguuccugggguuccuccugggcguggggagcgcgaucgccuccggcaucgccgucagcaaggugcugcaccucgagggcgaggugaacaagaucaagaacgcccugcuguccaccaacaaggccgucgugagccucuccaacggggugagcguccugaccuccaaggugcuggaccucaagaacuacaucgacaagcagcugcugcccaucgugaacaagcagagcugcuccaucagcaacaucgagaccgucaucgaguuccagcagaagaacaaccgccuccuggagaucacgcgggaguucagcgugaacgcgggcgugaccacccccgucuccaccuacaugcugacgaacagcgagcuccugucccugaucaacgacaugccgaucaccaacgaccagaagaagcucaugagcaacaacgugcagaucgugcgccagcaguccuacagcaucauguccaucaucaaggaggagguccuggccuacguggugcagcugccccucuacggggucaucgacacccccugcuggaagcugcacaccagcccccugugcacgaccaacaccaaggagggcuccaacaucugccucacccggacggaccgcgggugguacugcgacaacgccggcagcguguccuucuucccgcaggccgagaccugcaagguccagagcaaccggguguucugcgacaccaugaacucccugacccugcccagcgaggugaaccucugcaacaucgacaucuucaaccccaaguacgacugcaagaucaugacguccaagaccgacgucagcuccagcgugaucaccucccugggcgccaucgugagcugcuacgggaagaccaagugcacggcgagcaacaagaaccgcggcaucaucaagaccuucuccaacgggugcgacuacgucagcaacaagggcguggacaccguguccgucggcaacacccuguacuacgugaacaagcaggagggcaagagccucuacgugaagggggagcccaucaucaacuucuacgacccgcuggucuuccccuccgacgaguucgacgccagcaucucccaggugaacgagaagaucaaccagagccuggccuucauccggaaguccgacgagcuccugcacaacgugaacgucggcaagagcaccacgaacaucaugaucaccaccaucaucaucgugaucaucgugauccugcugcuccugaucgccgucgggcuguuccucuacugcaaggcccgcuccacccccgugacgcugagcaaggaccagcuguccgggaucaacaacaucgcguucagcaacugaggacuagugaagggaacacccaaauuuaauucagccuuaagcacaauuaauuaagagugaaacguaauuguacaagcaguuggucacccaccauagggcaugaucaacaccgcaaccuuuccuuuuucccccagugauucugaaaaaccccucuucccuucagcuugcuuagauguuccaaauuuaguaagcuuaaggcggccuacagaagaaaaagaaaaaaaaggccacaaaaguucccucucacuuucaguaaauaaaauaaaagcagcaacagaaauaaagaaauaaaugaaauucaaaaugaaauaaauauuguguugugcagcauuaaaaaaucaauaaaaauuaaaaaugagcaagaucuaaaaaaaaaaaaaaaaaaaaaaaaaaaaaaaaaaaaaaaaaaaaaaaaaaaaaaaaaaaaaaaaugcaucccccccccccccccccccccccccccccccaaaggcucuuuucagagccaccagaauu

SEQ ID NO: 11945 - RNA, 2310 nt, Artificial Sequence
  mRNA product Design f-1 comprising derived and/or modified sequence from HRSV(Memphis-37)__AIY60640.1__F0 (opt2)
gggagagcggcucggccauuuugucccagucaguccggaggcugcggcugcagaaguaccgccugcggaguaacugcaaagaagcuuaccauggagcuccccauccucaagaccaacgccaucaccaccauccucgccgccgucacccucugcuucgccuccucccagaacaucaccgaggaguucuaccaguccaccugcuccgccgucuccaagggcuaccucuccgcccuccgcaccggcugguacaccuccgucaucaccaucgagcucuccaacaucaaggagaacaagugcaacggcaccgacgccaaggucaagcucaucaagcaggagcucgacaaguacaagaacgccgucaccgagcuccagcuccucaugcaguccacccccgccgccaacaaccgcgcccgccgcgagcucccccgcuucaugaacuacacccucaacaacaccaagaacaacaacgucacccucuccaagaagcgcaagcgccgcuuccucggcuuccuccucggcgucggcuccgccaucgccuccggcaucgccgucuccaagguccuccaccucgagggcgaggucaacaagaucaagaacgcccuccucuccaccaacaaggccgucgucucccucuccaacggcgucuccguccucaccuccaagguccucgaccucaagaacuacaucgacaagcagcuccuccccaucgucaacaagcaguccugcuccaucuccaacaucgagaccgucaucgaguuccagcagaagaacaaccgccuccucgagaucacccgcgaguucuccgucaacgccggcgucaccacccccgucuccaccuacaugcucaccaacuccgagcuccucucccucaucaacgacaugcccaucaccaacgaccagaagaagcucauguccaacaacguccagaucguccgccagcaguccuacuccaucauguccaucaucaaggaggagguccucgccuacgucguccagcucccccucuacggcgucaucgacacccccugcuggaagcuccacaccuccccccucugcaccaccaacaccaaggagggcuccaacaucugccucacccgcaccgaccgcggcugguacugcgacaacgccggcuccgucuccuucuucccccaggccgagaccugcaagguccaguccaaccgcgucuucugcgacaccaugaacucccucacccuccccuccgaggucaaccucugcaacaucgacaucuucaaccccaaguacgacugcaagaucaugaccuccaagaccgacgucuccuccuccgucaucaccucccucggcgccaucgucuccugcuacggcaagaccaagugcaccgccuccaacaagaaccgcggcaucaucaagaccuucuccaacggcugcgacuacgucuccaacaagggcgucgacaccgucuccgucggcaacacccucuacuacgucaacaagcaggagggcaagucccucuacgucaagggcgagcccaucaucaacuucuacgacccccucgucuuccccuccgacgaguucgacgccuccaucucccaggucaacgagaagaucaaccagucccucgccuucauccgcaaguccgacgagcuccuccacaacgucaacgucggcaaguccaccaccaacaucaugaucaccaccaucaucaucgucaucaucgucauccuccuccuccucaucgccgucggccucuuccucuacugcaaggcccgcuccacccccgucacccucuccaaggaccagcucuccggcaucaacaacaucgccuucuccaacugaggacuagugaagggaacacccaaauuuaauucagccuuaagcacaauuaauuaagagugaaacguaauuguacaagcaguuggucacccaccauagggcaugaucaacaccgcaaccuuuccuuuuucccccagugauucugaaaaaccccucuucccuucagcuugcuuagauguuccaaauuuaguaagcuuaaggcggccuacagaagaaaaagaaaaaaaaggccacaaaaguucccucucacuuucaguaaauaaaauaaaagcagcaacagaaauaaagaaauaaaugaaauucaaaaugaaauaaauauuguguugugcagcauuaaaaaaucaauaaaaauuaaaaaugagcaagaucuaaaaaaaaaaaaaaaaaaaaaaaaaaaaaaaaaaaaaaaaaaaaaaaaaaaaaaaaaaaaaaaaugcaucccccccccccccccccccccccccccccccaaaggcucuuuucagagccaccagaauu

SEQ ID NO: 11946 - RNA, 2310 nt, Artificial Sequence
  mRNA product Design f-1 comprising derived and/or modified sequence from HRSV(Memphis-37)__AIY60640.1__F0 (opt3)
gggagagcggcucggccauuuugucccagucaguccggaggcugcggcugcagaaguaccgccugcggaguaacugcaaagaagcuuaccauggagcugcccauccucaagaccaacgccauuacaacuauacuugcugcagugacgcugugcuucgccagcucccagaauaucaccgaagaguuuuaccaaucuacauguucagcggucaguaaaggcuauuugagcgcuuuaagaacugggugguacaccuccguuauuacaaucgaacugucuaacauuaaggagaauaaaugcaacggaaccgacgccaaggugaaacuaaucaagcaggaacucgauaaguauaaaaaugcaguaacugagcugcagcuucugaugcagucgaccccugccgcuaacaauagggcacggcgcgaguugccacgauucaugaacuacacacucaauaacacgaagaauaacaaugugacucugagcaaaaagcguaaaagaagguuucuggguuuccucuuaggcgucgggucagccauagcuaguggaaucgccguguccaagguucugcaccuugaaggcgaggugaacaagauuaaaaaugcguugcugucuaccaacaaggcagucgugagccuauccaacgguguaucaguucucacaaguaaagugcuggaccuuaagaauuauaucgauaaacaacuguugccgauugucaacaagcagagcuguucuaucuccaauauagaaacugugauugaguuucagcagaaaaacaaucggcuccuggagaucacccgcgaguucucagugaacgccggggucacaacccccguuagcacguacauguuaacuaauagugaacugcucucucuuauuaacgacaugccuaucacaaaugaucaaaagaagcugauguccaacaaugugcagaucguaagacagcagagcuauucgauuaugucuauaaucaaagaagagguguuggcuuacgucgugcaacuaccacuguacggaguuauugacacccccugcuggaagcuccauacuuccccucuguguacaaccaacacgaaagaaggcucaaauaucugccuuaccaggacagaucggggcugguauugugacaacgccgggagugugagcuuuuucccacaggcagagacuugcaagguccaguccaaucgcguguuuugugauaccaugaacucucugacauugcccagcgagguaaaccucugcaauauagacauuuucaacccuaaauacgauuguaagaucaugacuucaaagaccgacguuaguuccagcgugaucacaucucugggagcuauugucucaugcuaugguaaaaccaagugcacugccaguaauaaaaaccgaggcaucauuaagacguuuagcaaugggugugauuacguguccaacaaaggagucgacacagugucuguuggcaauaccuuauauuacgugaacaagcaagaagguaagucgcuguauguaaaaggggagccaauaaucaauuucuacgacccgcuagucuuucccagcgaugaguucgacgcguccauuucacaggugaacgaaaagaucaaucagagucucgccuucaucagaaaaucugaugaacugcuucacaacguuaaugugggaaagagcacuaccaacauuaugauaacaaccaucauuaucgucauuaucgugauauugcugcuccugaucgcaguaggccuuuuucuguacugcaaagcuagguccacuccugugacauugucaaaggaccagcucagcggcauuaauaacaucgccuucucuaacugaggacuagugaagggaacacccaaauuuaauucagccuuaagcacaauuaauuaagagugaaacguaauuguacaagcaguuggucacccaccauagggcaugaucaacaccgcaaccuuuccuuuuucccccagugauucugaaaaaccccucuucccuucagcuugcuuagauguuccaaauuuaguaagcuuaaggcggccuacagaagaaaaagaaaaaaaaggccacaaaaguucccucucacuuucaguaaauaaaauaaaagcagcaacagaaauaaagaaauaaaugaaauucaaaaugaaauaaauauuguguugugcagcauuaaaaaaucaauaaaaauuaaaaaugagcaagaucuaaaaaaaaaaaaaaaaaaaaaaaaaaaaaaaaaaaaaaaaaaaaaaaaaaaaaaaaaaaaaaaaugcaucccccccccccccccccccccccccccccccaaaggcucuuuucagagccaccagaauu

SEQ ID NO: 11947 - RNA, 2310 nt, Artificial Sequence
  mRNA product Design f-1 comprising derived and/or modified sequence from HRSV(Memphis-37)__AIY60640.1__F0 (opt4)
gggagagcggcucggccauuuugucccagucaguccggaggcugcggcugcagaaguaccgccugcggaguaacugcaaagaagcuuaccauggagcugcccauccugaagaccaacgccaucaccaccauccuggccgccgugacccugugcuucgccagcagccagaacaucaccgaggaguucuaccagagcaccugcagcgccgugagcaagggcuaccugagcgcccugagaaccggcugguacaccagcgugaucaccaucgagcugagcaacaucaaggagaacaagugcaacggcaccgacgccaaggugaagcugaucaagcaggagcuggacaaguacaagaacgccgugaccgagcugcagcugcugaugcagagcacccccgccgccaacaacagagccagaagagagcugcccagauucaugaacuacacccugaacaacaccaagaacaacaacgugacccugagcaagaagagaaagagaagauuccugggcuuccugcugggcgugggcagcgccaucgccagcggcaucgccgugagcaaggugcugcaccuggagggcgaggugaacaagaucaagaacgcccugcugagcaccaacaaggccguggugagccugagcaacggcgugagcgugcugaccagcaaggugcuggaccugaagaacuacaucgacaagcagcugcugcccaucgugaacaagcagagcugcagcaucagcaacaucgagaccgugaucgaguuccagcagaagaacaacagacugcuggagaucaccagagaguucagcgugaacgccggcgugaccacccccgugagcaccuacaugcugaccaacagcgagcugcugagccugaucaacgacaugcccaucaccaacgaccagaagaagcugaugagcaacaacgugcagaucgugagacagcagagcuacagcaucaugagcaucaucaaggaggaggugcuggccuacguggugcagcugccccuguacggcgugaucgacacccccugcuggaagcugcacaccagcccccugugcaccaccaacaccaaggagggcagcaacaucugccugaccagaaccgacagaggcugguacugcgacaacgccggcagcgugagcuucuucccccaggccgagaccugcaaggugcagagcaacagaguguucugcgacaccaugaacagccugacccugcccagcgaggugaaccugugcaacaucgacaucuucaaccccaaguacgacugcaagaucaugaccagcaagaccgacgugagcagcagcgugaucaccagccugggcgccaucgugagcugcuacggcaagaccaagugcaccgccagcaacaagaacagaggcaucaucaagaccuucagcaacggcugcgacuacgugagcaacaagggcguggacaccgugagcgugggcaacacccuguacuacgugaacaagcaggagggcaagagccuguacgugaagggcgagcccaucaucaacuucuacgacccccugguguuccccagcgacgaguucgacgccagcaucagccaggugaacgagaagaucaaccagagccuggccuucaucagaaagagcgacgagcugcugcacaacgugaacgugggcaagagcaccaccaacaucaugaucaccaccaucaucaucgugaucaucgugauccugcugcugcugaucgccgugggccuguuccuguacugcaaggccagaagcacccccgugacccugagcaaggaccagcugagcggcaucaacaacaucgccuucagcaacugaggacuagugaagggaacacccaaauuuaauucagccuuaagcacaauuaauuaagagugaaacguaauuguacaagcaguuggucacccaccauagggcaugaucaacaccgcaaccuuuccuuuuucccccagugauucugaaaaaccccucuucccuucagcuugcuuagauguuccaaauuuaguaagcuuaaggcggccuacagaagaaaaagaaaaaaaaggccacaaaaguucccucucacuuucaguaaauaaaauaaaagcagcaacagaaauaaagaaauaaaugaaauucaaaaugaaauaaauauuguguugugcagcauuaaaaaaucaauaaaaauuaaaaaugagcaagaucuaaaaaaaaaaaaaaaaaaaaaaaaaaaaaaaaaaaaaaaaaaaaaaaaaaaaaaaaaaaaaaaaugcaucccccccccccccccccccccccccccccccaaaggcucuuuucagagccaccagaauu

SEQ ID NO: 11948 - RNA, 2310 nt, Artificial Sequence
  mRNA product Design f-1 comprising derived and/or modified sequence from HRSV(Memphis-37)__AIY60640.1__F0 (opt5)
gggagagcggcucggccauuuugucccagucaguccggaggcugcggcugcagaaguaccgccugcggaguaacugcaaagaagcuuaccauggagcugcccauccucaagaccaacgccauuacaacgauccuggcugccgugacccuuugcuucgcgagcucccagaauauuacagaagaguuuuaccaaucuaccuguagcgcugucuccaaaggcuaucugucugcccucagaacagggugguacaccagcguuaucacaauugaacuguccaacaucaaggagaauaaaugcaacggaaccgacgccaaggugaaacuuaucaagcaggaacuggauaaguauaaaaaugcugugacggagcuccagcugcugaugcagucuaccccugccgcuaacaaucgggcccgcagagagcucccgcgguucaugaacuacacacugaauaacaccaagaauaacaaugucacacuuagcaaaaagcgcaaaagacgguuucugggcuuccuccugggggugggauccgcgauugccagcggcaucgcuguuucuaaggugcuucaccuggaaggggaggucaacaagauuaaaaaugcccuccuguccaccaacaaggcugugguuagccugucuaacggaguguccguccucacgagcaaagugcuggaccuuaagaauuauaucgauaaacaacugcuccccauugugaacaagcagucuuguuccaucagcaauauugaaacagucaucgaguuucagcagaaaaacaaucgccugcuugagaucaccagagaauuuuccguuaacgccggcgugacaaccccugugucuaccuacaugcugacaaauagcgagcuccugucccugauuaacgacaugcccaucacgaaugaucaaaagaagcucaugagcaacaauguccagauugugcggcagcagucuuauuccaucaugagcauuaucaaagaagagguucuggcguacgugguccaacuuccucuguacggcgugaucgacacccccugcuggaagcuccauacaucuccucuguguaccacaaacaccaaagaagggagcaauauuugccuuacgcgcacagauagaggaugguauugugacaacgccggcuccguuucuuucuucccgcaggcugagaccugcaaggugcagagcaaucgggucuuuugugauaccaugaacucccugacacuccccagcgaggugaaccugugcaauaucgacauuuucaacccuaaauacgauuguaagaucaugaccucuaagacagacgucuccagcucugugauuacgucccugggggccaucguuagcugcuauggaaaaaccaagugcacagcuuccaauaaaaaccgcggcaucauuaagaccuuuucuaaugggugugauuacgugagcaacaaaggagucgacacaguguccguuggcaauacccucuauuacgugaacaagcaagaaggcaagucucuguaugucaaaggggagcccaucauuaauuucuacgacccucuuguguuucccagcgaugaguucgacgccuccaucagccaggugaacgaaaagauuaaucagucucuggccuucaucagaaaauccgaugaacuccugcacaacguuaaugucggaaagagcacgaccaacauuaugaucacaaccaucauuaucgugauuaucgugauucugcuucuccugaucgcugucggccuguuucucuacugcaaagcgcggucuacaccggugacccuguccaaggaccagcuuagcgggaucaauaacauugccuucucuaacugaggacuagugaagggaacacccaaauuuaauucagccuuaagcacaauuaauuaagagugaaacguaauuguacaagcaguuggucacccaccauagggcaugaucaacaccgcaaccuuuccuuuuucccccagugauucugaaaaaccccucuucccuucagcuugcuuagauguuccaaauuuaguaagcuuaaggcggccuacagaagaaaaagaaaaaaaaggccacaaaaguucccucucacuuucaguaaauaaaauaaaagcagcaacagaaauaaagaaauaaaugaaauucaaaaugaaauaaauauuguguugugcagcauuaaaaaaucaauaaaaauuaaaaaugagcaagaucuaaaaaaaaaaaaaaaaaaaaaaaaaaaaaaaaaaaaaaaaaaaaaaaaaaaaaaaaaaaaaaaaugcaucccccccccccccccccccccccccccccccaaaggcucuuuucagagccaccagaauu

SEQ ID NO: 11949 - RNA, 2310 nt, Artificial Sequence
  mRNA product Design f-1 comprising derived and/or modified sequence from HRSV(Memphis-37)__AIY60640.1__F0 (opt6)
gggagagcggcucggccauuuugucccagucaguccggaggcugcggcugcagaaguaccgccugcggaguaacugcaaagaagcuuaccauggaacugccuauucuaaaaacaaaugccauaacaacaauucuugcagcaguaacauuauguuuugcaucaucacaaaacauuacagaagaauuuuaccaauccacuugcucagccguaucaaaaggauaccuaucagccuuaagaacagguugguacaccucaguaauaaccauagaacuaucaaacauaaaagaaaacaaaugcaaugguacugaugcaaaagucaaacuaaucaaacaagaacuggacaaauacaaaaaugcaguaaccgaacuacaacuccuaaugcaauccacaccugcagccaacaacagagcaagacgcgaacuaccaagauuuaugaauuacacauuaaacaacaccaagaacaacaauguaacucucucaaaaaaaagaaaaagacgcuuucuagguuuccuccuaggcgucggaucugcaauagccucaggaauagcaguaucaaaaguucuacaccuagaaggagaaguaaacaaaauuaaaaacgcauuacuaucaaccaacaaagcaguuguaucccuuucaaauggagucucuguacuuacaucaaaaguacucgaccuaaaaaacuauauagacaaacaacuacucccaauagucaauaagcaaucaugcagcauaucaaacauagaaacaguuauagaauuucaacaaaaaaacaacagacuacucgaaauaaccagagaauuuagcgucaacgcaggcguaaccacaccgguauccacauacaugcuuacaaacucagaacuccucucacuaauaaacgacaugccaauaacuaaugaccaaaaaaaacuaaugucaaacaauguccaaauaguccgucaacaaucauacucaauaaugucaauaauaaaagaagaaguauuagcauauguaguccaacuaccauuauacggcguuauagacacaccuuguuggaaacuucacacauccccacucuguacaaccaacacaaaagaagguuccaauauaugccuaacuagaaccgacagaggaugguauugcgacaacgcaggaucuguaucauucuuuccccaagcagaaacauguaaaguacaaaguaaccgcguauucugcgacaccaugaacucauuaacccucccauccgaaguuaauuuaugcaauauagacauauuuaauccuaaauacgacugcaaaauaaugacaucaaaaacagacguuaguuccuccguaaucacaucuuugggcgcaauagucucaugcuauggaaaaacaaaaugcacagccucaaacaaaaauagaggaauaauaaaaacauucagcaacggcugugauuauguauccaacaaaggaguagacacaguauccguaggcaauacccuuuacuacguuaauaaacaagaaggaaaaucauuauacgucaaaggagaaccuaucauaaauuucuacgacccauuaguauucccuucagacgaauuugaugccucaauaucccaagucaaugaaaaaaucaaccaaucacuagccuuuauccgcaaaucagacgaauuacuacacaacguaaacguaggcaaaucaacaacuaauauaaugauaacaacaauaauaauaguaauuauaguaauauuauuacuacuaaucgccguagguuuauucuuauacuguaaagcacgaucaacaccaguuacacucucaaaagaucaacuaucaggaauaaacaacauagcauuuuccaauuaaggacuagugaagggaacacccaaauuuaauucagccuuaagcacaauuaauuaagagugaaacguaauuguacaagcaguuggucacccaccauagggcaugaucaacaccgcaaccuuuccuuuuucccccagugauucugaaaaaccccucuucccuucagcuugcuuagauguuccaaauuuaguaagcuuaaggcggccuacagaagaaaaagaaaaaaaaggccacaaaaguucccucucacuuucaguaaauaaaauaaaagcagcaacagaaauaaagaaauaaaugaaauucaaaaugaaauaaauauuguguugugcagcauuaaaaaaucaauaaaaauuaaaaaugagcaagaucuaaaaaaaaaaaaaaaaaaaaaaaaaaaaaaaaaaaaaaaaaaaaaaaaaaaaaaaaaaaaaaaaugcaucccccccccccccccccccccccccccccccaaaggcucuuuucagagccaccagaauu

SEQ ID NO: 11950 - RNA, 2310 nt, Artificial Sequence
  mRNA product Design f-1 comprising derived and/or modified sequence from HRSV(Memphis-37)__AIY60640.1__F0 (opt11)
gggagagcggcucggccauuuugucccagucaguccggaggcugcggcugcagaaguaccgccugcggaguaacugcaaagaagcuuaccauggaacuccccauccucaaaacaaacgccauaaccacuauccucgccgccgucacccucugcuucgccuccucccaaaacaucacagaggaguucuaccaauccacaugcuccgccgucuccaaaggcuaccucagcgcccuacguaccggcugguacaccagcgucaucacaauagaacucuccaacaucaaggaaaacaaaugcaacggcaccgaugccaaaguaaaacucaucaaacaagaacucgauaaauacaaaaacgccgucaccgaacuacaacuccuaaugcaaagcacacccgccgccaacaacagagcacggcgcgaacugccccgcuucaugaacuacacccucaacaacaccaaaaauaacaacgucacccuauccaagaaacgcaaacgccgauuccucgguuuccuacucggcguaggaagcgccauagccucaggcaucgccgucuccaaaguccuccaucuggaaggcgaagucaacaaaaucaaaaacgcacucuuauccaccaacaaagccgucgucucccucucgaacggggucuccguccuuaccuccaaaguccucgaccuuaaaaacuacaucgacaaacaacuacuaccaauagucaauaaacaauccugcuccaucucaaacauagaaaccgucauagaguuccaacagaagaacaaucgccuccucgaaauaacucgcgaguucuccgucaacgcaggcgucacgaccccugucucaacauacaugcuaacuaacucagaacuccuaagccuaaucaacgacaugcccaucacaaacgaccaaaagaaacucaugagcaacaauguccagauagucagacagcaauccuauagcaucaugucuauaauaaaagaagaagugcucgccuacguaguccaacucccucuuuacggcgucauagacacacccugcuggaaacuccacacaucuccucucugcaccaccaacacaaaagaaggcagcaacaucugccugacccgaaccgaccgcggaugguacugcgacaacgcuggcuccgugucuuucuuuccccaagccgaaaccugcaaaguccaguccaaccgcgucuucugcgacacaaugaacucccucacccuacccuccgaaguuaaccucugcaacaucgacaucuucaauccaaaauacgacugcaaaaucaugaccucgaaaacggacguauccuccuccgucauaacaucacuuggagccaucguuagcugcuacggaaaaaccaaauguaccgccuccaacaaaaaccgcggaauaaucaaaacauucuccaacggcugcgacuacguaagcaacaaaggggucgauacugucuccguagguaacacccuauacuacgucaacaaacaagaaggaaaaucacuauacguuaaaggcgaacccauuaucaacuucuacgacccccucguuuucccauccgacgaguucgacgccuccauaagccaaguuaacgaaaagauaaaccaaucgcucgcauucauccgcaaauccgacgaacuccuacacaacgucaacgugggcaaauccacaacaaacaucaugaucaccaccaucauuaucgucauaauagucauccuccuccugcucaucgccgugggacuauuccuauacugcaaagcccgcucgacgcccgucacacuuuccaaagaccaacuaagcggaaucaacaacauagcguucagcaauuaaggacuagugaagggaacacccaaauuuaauucagccuuaagcacaauuaauuaagagugaaacguaauuguacaagcaguuggucacccaccauagggcaugaucaacaccgcaaccuuuccuuuuucccccagugauucugaaaaaccccucuucccuucagcuugcuuagauguuccaaauuuaguaagcuuaaggcggccuacagaagaaaaagaaaaaaaaggccacaaaaguucccucucacuuucaguaaauaaaauaaaagcagcaacagaaauaaagaaauaaaugaaauucaaaaugaaauaaauauuguguugugcagcauuaaaaaaucaauaaaaauuaaaaaugagcaagaucuaaaaaaaaaaaaaaaaaaaaaaaaaaaaaaaaaaaaaaaaaaaaaaaaaaaaaaaaaaaaaaaaugcaucccccccccccccccccccccccccccccccaaaggcucuuuucagagccaccagaauu

SEQ ID NO: 11951 - RNA, 2090 nt, Artificial Sequence
  mRNA product Design f-2 comprising derived and/or modified sequence from HRSV(Memphis-37)__AIY60640.1__F0 (wt)
gggagagcggcucggccauuuugucccagucaguccggaggcugcggcugcagaaguaccgccugcggaguaacugcaaagaagcuuaccauggaguugccaauccucaaaacaaaugcaauuaccacaauccuugcugcagucacacucuguuucgcuuccagucaaaacaucacugaagaauuuuaucaaucaacaugcagugcaguuagcaaaggcuaucuuagugcuuuaagaacugguugguauacuaguguuauaacuauagaauuaaguaauaucaaggaaaauaaguguaauggaacagaugcuaagguaaaauugauaaaacaagaauuagauaaauauaaaaaugcuguaacagaauugcaguugcucaugcaaagcacaccagcagccaacaaucgagccagaagagaacuaccaagguuuaugaauuauacacucaacaauaccaaaaauaacaauguaacauuaagcaagaaaaggaaaagaagauuucuuggcuuuuuguuagguguuggaucugcaaucgccaguggcauugcuguaucuaaaguccugcaccuagaaggggaagugaacaaaaucaaaaaugcucuacuauccacaaacaaggcuguagucagcuuaucaaauggaguuagugucuuaaccagcaaaguguuagaccucaaaaacuauauagauaaacaguuguuacccauugugaacaagcaaagcugcagcauaucaaacauugaaacugugauagaauuccaacaaaagaacaacagacuacuagagauuaccagggaauuuaguguuaaugcagguguaacuacaccuguaagcacuuauauguuaacaaauagugaauuauuaucauuaaucaaugauaugccuauaacaaaugaucagaaaaaguuaauguccaacaauguucaaauaguuagacagcaaaguuacucuaucauguccauaauaaaggaggaagucuuagcauauguaguucaauuaccacuauaugguguaauagauacaccuuguuggaaacuacacacauccccucuaugcacaaccaacacaaaggaaggguccaacaucuguuuaacaagaaccgacagaggaugguacugugacaaugcaggaucagugucuuucuucccacaagcugaaacaugcaaaguucaaucgaaucgaguauuuugugacacaaugaacagucuaacauuaccaagugaaguaaaucucugcaacauugacauauucaacccuaaauaugauugcaaaauuaugacuucaaaaacagaugugagcagcuccguuaucacaucucuaggagccauugugucaugcuauggcaaaacuaaauguacagcauccaauaaaaaucguggaaucauaaagacauuuucuaacgggugugauuauguaucaaauaaggggguggacacuguaucuguagguaauacauuauauuauguaaauaagcaagaaggaaaaagccucuauguaaaaggugaaccaauaauaaauuucuaugacccauuaguguucccuucugaugaauuugaugcaucaauaucucaagucaaugagaagauuaaccagagccuagcauuuauucguaaauccgaugaauuauuacauaauguaaauguugguaaauccaccacaaauaucaugauaacuacuauaauuauagugauuauaguaauauuguuauuauuaauugcaguugggcuguuccuauacugcaaggccagaagcacaccagucacacuaagcaaggaucaacugagugguauaaauaauauugcauuuaguaacugaggacuaguggaagcauuuuccuggcugauuaaaagaaauuacucagcuauggucaucuguuccuguuagaaggcuaugcagcauauuauauacuaugcgcauguuaugaaaugcauaauaaaaaauuuuaaaaaaucuaaaagaucuaaaaaaaaaaaaaaaaaaaaaaaaaaaaaaaaaaaaaaaaaaaaaaaaaaaaaaaaaaaaaaaaugcaucccccccccccccccccccccccccccccccaaaggcucuuuucagagccaccagaauu

SEQ ID NO: 11952 - RNA, 2090 nt, Artificial Sequence
  mRNA product Design f-2 comprising derived and/or modified sequence from HRSV(Memphis-37)__AIY60640.1__F0 (opt1)
gggagagcggcucggccauuuugucccagucaguccggaggcugcggcugcagaaguaccgccugcggaguaacugcaaagaagcuuaccauggagcugcccauccucaagaccaacgccaucaccacgauccuggccgcggugacccugugcuucgccagcucccagaacaucaccgaggaguucuaccagagcacgugcuccgccgucagcaagggcuaccucuccgcccugcgcaccgggugguacaccagcgugaucaccaucgagcuguccaacaucaaggagaacaagugcaacggcaccgacgccaaggugaagcucaucaagcaggagcuggacaaguacaagaacgcggucacggagcugcagcuccugaugcagagcaccccggccgccaacaaccgggcccgccgggagcugccccgcuucaugaacuacacccucaacaacaccaagaacaacaacgugacgcuguccaagaagcggaagcgccgguuccugggguuccuccugggcguggggagcgcgaucgccuccggcaucgccgucagcaaggugcugcaccucgagggcgaggugaacaagaucaagaacgcccugcuguccaccaacaaggccgucgugagccucuccaacggggugagcguccugaccuccaaggugcuggaccucaagaacuacaucgacaagcagcugcugcccaucgugaacaagcagagcugcuccaucagcaacaucgagaccgucaucgaguuccagcagaagaacaaccgccuccuggagaucacgcgggaguucagcgugaacgcgggcgugaccacccccgucuccaccuacaugcugacgaacagcgagcuccugucccugaucaacgacaugccgaucaccaacgaccagaagaagcucaugagcaacaacgugcagaucgugcgccagcaguccuacagcaucauguccaucaucaaggaggagguccuggccuacguggugcagcugccccucuacggggucaucgacacccccugcuggaagcugcacaccagcccccugugcacgaccaacaccaaggagggcuccaacaucugccucacccggacggaccgcgggugguacugcgacaacgccggcagcguguccuucuucccgcaggccgagaccugcaagguccagagcaaccggguguucugcgacaccaugaacucccugacccugcccagcgaggugaaccucugcaacaucgacaucuucaaccccaaguacgacugcaagaucaugacguccaagaccgacgucagcuccagcgugaucaccucccugggcgccaucgugagcugcuacgggaagaccaagugcacggcgagcaacaagaaccgcggcaucaucaagaccuucuccaacgggugcgacuacgucagcaacaagggcguggacaccguguccgucggcaacacccuguacuacgugaacaagcaggagggcaagagccucuacgugaagggggagcccaucaucaacuucuacgacccgcuggucuuccccuccgacgaguucgacgccagcaucucccaggugaacgagaagaucaaccagagccuggccuucauccggaaguccgacgagcuccugcacaacgugaacgucggcaagagcaccacgaacaucaugaucaccaccaucaucaucgugaucaucgugauccugcugcuccugaucgccgucgggcuguuccucuacugcaaggcccgcuccacccccgugacgcugagcaaggaccagcuguccgggaucaacaacaucgcguucagcaacugaggacuaguggaagcauuuuccuggcugauuaaaagaaauuacucagcuauggucaucuguuccuguuagaaggcuaugcagcauauuauauacuaugcgcauguuaugaaaugcauaauaaaaaauuuuaaaaaaucuaaaagaucuaaaaaaaaaaaaaaaaaaaaaaaaaaaaaaaaaaaaaaaaaaaaaaaaaaaaaaaaaaaaaaaaugcaucccccccccccccccccccccccccccccccaaaggcucuuuucagagccaccagaauu

SEQ ID NO: 11953 - RNA, 2090 nt, Artificial Sequence
  mRNA product Design f-2 comprising derived and/or modified sequence from HRSV(Memphis-37)__AIY60640.1__F0 (opt2)
gggagagcggcucggccauuuugucccagucaguccggaggcugcggcugcagaaguaccgccugcggaguaacugcaaagaagcuuaccauggagcuccccauccucaagaccaacgccaucaccaccauccucgccgccgucacccucugcuucgccuccucccagaacaucaccgaggaguucuaccaguccaccugcuccgccgucuccaagggcuaccucuccgcccuccgcaccggcugguacaccuccgucaucaccaucgagcucuccaacaucaaggagaacaagugcaacggcaccgacgccaaggucaagcucaucaagcaggagcucgacaaguacaagaacgccgucaccgagcuccagcuccucaugcaguccacccccgccgccaacaaccgcgcccgccgcgagcucccccgcuucaugaacuacacccucaacaacaccaagaacaacaacgucacccucuccaagaagcgcaagcgccgcuuccucggcuuccuccucggcgucggcuccgccaucgccuccggcaucgccgucuccaagguccuccaccucgagggcgaggucaacaagaucaagaacgcccuccucuccaccaacaaggccgucgucucccucuccaacggcgucuccguccucaccuccaagguccucgaccucaagaacuacaucgacaagcagcuccuccccaucgucaacaagcaguccugcuccaucuccaacaucgagaccgucaucgaguuccagcagaagaacaaccgccuccucgagaucacccgcgaguucuccgucaacgccggcgucaccacccccgucuccaccuacaugcucaccaacuccgagcuccucucccucaucaacgacaugcccaucaccaacgaccagaagaagcucauguccaacaacguccagaucguccgccagcaguccuacuccaucauguccaucaucaaggaggagguccucgccuacgucguccagcucccccucuacggcgucaucgacacccccugcuggaagcuccacaccuccccccucugcaccaccaacaccaaggagggcuccaacaucugccucacccgcaccgaccgcggcugguacugcgacaacgccggcuccgucuccuucuucccccaggccgagaccugcaagguccaguccaaccgcgucuucugcgacaccaugaacucccucacccuccccuccgaggucaaccucugcaacaucgacaucuucaaccccaaguacgacugcaagaucaugaccuccaagaccgacgucuccuccuccgucaucaccucccucggcgccaucgucuccugcuacggcaagaccaagugcaccgccuccaacaagaaccgcggcaucaucaagaccuucuccaacggcugcgacuacgucuccaacaagggcgucgacaccgucuccgucggcaacacccucuacuacgucaacaagcaggagggcaagucccucuacgucaagggcgagcccaucaucaacuucuacgacccccucgucuuccccuccgacgaguucgacgccuccaucucccaggucaacgagaagaucaaccagucccucgccuucauccgcaaguccgacgagcuccuccacaacgucaacgucggcaaguccaccaccaacaucaugaucaccaccaucaucaucgucaucaucgucauccuccuccuccucaucgccgucggccucuuccucuacugcaaggcccgcuccacccccgucacccucuccaaggaccagcucuccggcaucaacaacaucgccuucuccaacugaggacuaguggaagcauuuuccuggcugauuaaaagaaauuacucagcuauggucaucuguuccuguuagaaggcuaugcagcauauuauauacuaugcgcauguuaugaaaugcauaauaaaaaauuuuaaaaaaucuaaaagaucuaaaaaaaaaaaaaaaaaaaaaaaaaaaaaaaaaaaaaaaaaaaaaaaaaaaaaaaaaaaaaaaaugcaucccccccccccccccccccccccccccccccaaaggcucuuuucagagccaccagaauu

SEQ ID NO: 11954 - RNA, 2090 nt, Artificial Sequence
  mRNA product Design f-2 comprising derived and/or modified sequence from HRSV(Memphis-37)__AIY60640.1__F0 (opt3)
gggagagcggcucggccauuuugucccagucaguccggaggcugcggcugcagaaguaccgccugcggaguaacugcaaagaagcuuaccauggagcugcccauccucaagaccaacgccauuacaacuauacuugcugcagugacgcugugcuucgccagcucccagaauaucaccgaagaguuuuaccaaucuacauguucagcggucaguaaaggcuauuugagcgcuuuaagaacugggugguacaccuccguuauuacaaucgaacugucuaacauuaaggagaauaaaugcaacggaaccgacgccaaggugaaacuaaucaagcaggaacucgauaaguauaaaaaugcaguaacugagcugcagcuucugaugcagucgaccccugccgcuaacaauagggcacggcgcgaguugccacgauucaugaacuacacacucaauaacacgaagaauaacaaugugacucugagcaaaaagcguaaaagaagguuucuggguuuccucuuaggcgucgggucagccauagcuaguggaaucgccguguccaagguucugcaccuugaaggcgaggugaacaagauuaaaaaugcguugcugucuaccaacaaggcagucgugagccuauccaacgguguaucaguucucacaaguaaagugcuggaccuuaagaauuauaucgauaaacaacuguugccgauugucaacaagcagagcuguucuaucuccaauauagaaacugugauugaguuucagcagaaaaacaaucggcuccuggagaucacccgcgaguucucagugaacgccggggucacaacccccguuagcacguacauguuaacuaauagugaacugcucucucuuauuaacgacaugccuaucacaaaugaucaaaagaagcugauguccaacaaugugcagaucguaagacagcagagcuauucgauuaugucuauaaucaaagaagagguguuggcuuacgucgugcaacuaccacuguacggaguuauugacacccccugcuggaagcuccauacuuccccucuguguacaaccaacacgaaagaaggcucaaauaucugccuuaccaggacagaucggggcugguauugugacaacgccgggagugugagcuuuuucccacaggcagagacuugcaagguccaguccaaucgcguguuuugugauaccaugaacucucugacauugcccagcgagguaaaccucugcaauauagacauuuucaacccuaaauacgauuguaagaucaugacuucaaagaccgacguuaguuccagcgugaucacaucucugggagcuauugucucaugcuaugguaaaaccaagugcacugccaguaauaaaaaccgaggcaucauuaagacguuuagcaaugggugugauuacguguccaacaaaggagucgacacagugucuguuggcaauaccuuauauuacgugaacaagcaagaagguaagucgcuguauguaaaaggggagccaauaaucaauuucuacgacccgcuagucuuucccagcgaugaguucgacgcguccauuucacaggugaacgaaaagaucaaucagagucucgccuucaucagaaaaucugaugaacugcuucacaacguuaaugugggaaagagcacuaccaacauuaugauaacaaccaucauuaucgucauuaucgugauauugcugcuccugaucgcaguaggccuuuuucuguacugcaaagcuagguccacuccugugacauugucaaaggaccagcucagcggcauuaauaacaucgccuucucuaacugaggacuaguggaagcauuuuccuggcugauuaaaagaaauuacucagcuauggucaucuguuccuguuagaaggcuaugcagcauauuauauacuaugcgcauguuaugaaaugcauaauaaaaaauuuuaaaaaaucuaaaagaucuaaaaaaaaaaaaaaaaaaaaaaaaaaaaaaaaaaaaaaaaaaaaaaaaaaaaaaaaaaaaaaaaugcaucccccccccccccccccccccccccccccccaaaggcucuuuucagagccaccagaauu

SEQ ID NO: 11955 - RNA, 2090 nt, Artificial Sequence
  mRNA product Design f-2 comprising derived and/or modified sequence from HRSV(Memphis-37)__AIY60640.1__F0 (opt4)
gggagagcggcucggccauuuugucccagucaguccggaggcugcggcugcagaaguaccgccugcggaguaacugcaaagaagcuuaccauggagcugcccauccugaagaccaacgccaucaccaccauccuggccgccgugacccugugcuucgccagcagccagaacaucaccgaggaguucuaccagagcaccugcagcgccgugagcaagggcuaccugagcgcccugagaaccggcugguacaccagcgugaucaccaucgagcugagcaacaucaaggagaacaagugcaacggcaccgacgccaaggugaagcugaucaagcaggagcuggacaaguacaagaacgccgugaccgagcugcagcugcugaugcagagcacccccgccgccaacaacagagccagaagagagcugcccagauucaugaacuacacccugaacaacaccaagaacaacaacgugacccugagcaagaagagaaagagaagauuccugggcuuccugcugggcgugggcagcgccaucgccagcggcaucgccgugagcaaggugcugcaccuggagggcgaggugaacaagaucaagaacgcccugcugagcaccaacaaggccguggugagccugagcaacggcgugagcgugcugaccagcaaggugcuggaccugaagaacuacaucgacaagcagcugcugcccaucgugaacaagcagagcugcagcaucagcaacaucgagaccgugaucgaguuccagcagaagaacaacagacugcuggagaucaccagagaguucagcgugaacgccggcgugaccacccccgugagcaccuacaugcugaccaacagcgagcugcugagccugaucaacgacaugcccaucaccaacgaccagaagaagcugaugagcaacaacgugcagaucgugagacagcagagcuacagcaucaugagcaucaucaaggaggaggugcuggccuacguggugcagcugccccuguacggcgugaucgacacccccugcuggaagcugcacaccagcccccugugcaccaccaacaccaaggagggcagcaacaucugccugaccagaaccgacagaggcugguacugcgacaacgccggcagcgugagcuucuucccccaggccgagaccugcaaggugcagagcaacagaguguucugcgacaccaugaacagccugacccugcccagcgaggugaaccugugcaacaucgacaucuucaaccccaaguacgacugcaagaucaugaccagcaagaccgacgugagcagcagcgugaucaccagccugggcgccaucgugagcugcuacggcaagaccaagugcaccgccagcaacaagaacagaggcaucaucaagaccuucagcaacggcugcgacuacgugagcaacaagggcguggacaccgugagcgugggcaacacccuguacuacgugaacaagcaggagggcaagagccuguacgugaagggcgagcccaucaucaacuucuacgacccccugguguuccccagcgacgaguucgacgccagcaucagccaggugaacgagaagaucaaccagagccuggccuucaucagaaagagcgacgagcugcugcacaacgugaacgugggcaagagcaccaccaacaucaugaucaccaccaucaucaucgugaucaucgugauccugcugcugcugaucgccgugggccuguuccuguacugcaaggccagaagcacccccgugacccugagcaaggaccagcugagcggcaucaacaacaucgccuucagcaacugaggacuaguggaagcauuuuccuggcugauuaaaagaaauuacucagcuauggucaucuguuccuguuagaaggcuaugcagcauauuauauacuaugcgcauguuaugaaaugcauaauaaaaaauuuuaaaaaaucuaaaagaucuaaaaaaaaaaaaaaaaaaaaaaaaaaaaaaaaaaaaaaaaaaaaaaaaaaaaaaaaaaaaaaaaugcaucccccccccccccccccccccccccccccccaaaggcucuuuucagagccaccagaauu

SEQ ID NO: 11956 - RNA, 2090 nt, Artificial Sequence
  mRNA product Design f-2 comprising derived and/or modified sequence from HRSV(Memphis-37)__AIY60640.1__F0 (opt5)
gggagagcggcucggccauuuugucccagucaguccggaggcugcggcugcagaaguaccgccugcggaguaacugcaaagaagcuuaccauggagcugcccauccucaagaccaacgccauuacaacgauccuggcugccgugacccuuugcuucgcgagcucccagaauauuacagaagaguuuuaccaaucuaccuguagcgcugucuccaaaggcuaucugucugcccucagaacagggugguacaccagcguuaucacaauugaacuguccaacaucaaggagaauaaaugcaacggaaccgacgccaaggugaaacuuaucaagcaggaacuggauaaguauaaaaaugcugugacggagcuccagcugcugaugcagucuaccccugccgcuaacaaucgggcccgcagagagcucccgcgguucaugaacuacacacugaauaacaccaagaauaacaaugucacacuuagcaaaaagcgcaaaagacgguuucugggcuuccuccugggggugggauccgcgauugccagcggcaucgcuguuucuaaggugcuucaccuggaaggggaggucaacaagauuaaaaaugcccuccuguccaccaacaaggcugugguuagccugucuaacggaguguccguccucacgagcaaagugcuggaccuuaagaauuauaucgauaaacaacugcuccccauugugaacaagcagucuuguuccaucagcaauauugaaacagucaucgaguuucagcagaaaaacaaucgccugcuugagaucaccagagaauuuuccguuaacgccggcgugacaaccccugugucuaccuacaugcugacaaauagcgagcuccugucccugauuaacgacaugcccaucacgaaugaucaaaagaagcucaugagcaacaauguccagauugugcggcagcagucuuauuccaucaugagcauuaucaaagaagagguucuggcguacgugguccaacuuccucuguacggcgugaucgacacccccugcuggaagcuccauacaucuccucuguguaccacaaacaccaaagaagggagcaauauuugccuuacgcgcacagauagaggaugguauugugacaacgccggcuccguuucuuucuucccgcaggcugagaccugcaaggugcagagcaaucgggucuuuugugauaccaugaacucccugacacuccccagcgaggugaaccugugcaauaucgacauuuucaacccuaaauacgauuguaagaucaugaccucuaagacagacgucuccagcucugugauuacgucccugggggccaucguuagcugcuauggaaaaaccaagugcacagcuuccaauaaaaaccgcggcaucauuaagaccuuuucuaaugggugugauuacgugagcaacaaaggagucgacacaguguccguuggcaauacccucuauuacgugaacaagcaagaaggcaagucucuguaugucaaaggggagcccaucauuaauuucuacgacccucuuguguuucccagcgaugaguucgacgccuccaucagccaggugaacgaaaagauuaaucagucucuggccuucaucagaaaauccgaugaacuccugcacaacguuaaugucggaaagagcacgaccaacauuaugaucacaaccaucauuaucgugauuaucgugauucugcuucuccugaucgcugucggccuguuucucuacugcaaagcgcggucuacaccggugacccuguccaaggaccagcuuagcgggaucaauaacauugccuucucuaacugaggacuaguggaagcauuuuccuggcugauuaaaagaaauuacucagcuauggucaucuguuccuguuagaaggcuaugcagcauauuauauacuaugcgcauguuaugaaaugcauaauaaaaaauuuuaaaaaaucuaaaagaucuaaaaaaaaaaaaaaaaaaaaaaaaaaaaaaaaaaaaaaaaaaaaaaaaaaaaaaaaaaaaaaaaugcaucccccccccccccccccccccccccccccccaaaggcucuuuucagagccaccagaauu

SEQ ID NO: 11957 - RNA, 2090 nt, Artificial Sequence
  mRNA product Design f-2 comprising derived and/or modified sequence from HRSV(Memphis-37)__AIY60640.1__F0 (opt6)
gggagagcggcucggccauuuugucccagucaguccggaggcugcggcugcagaaguaccgccugcggaguaacugcaaagaagcuuaccauggaacugccuauucuaaaaacaaaugccauaacaacaauucuugcagcaguaacauuauguuuugcaucaucacaaaacauuacagaagaauuuuaccaauccacuugcucagccguaucaaaaggauaccuaucagccuuaagaacagguugguacaccucaguaauaaccauagaacuaucaaacauaaaagaaaacaaaugcaaugguacugaugcaaaagucaaacuaaucaaacaagaacuggacaaauacaaaaaugcaguaaccgaacuacaacuccuaaugcaauccacaccugcagccaacaacagagcaagacgcgaacuaccaagauuuaugaauuacacauuaaacaacaccaagaacaacaauguaacucucucaaaaaaaagaaaaagacgcuuucuagguuuccuccuaggcgucggaucugcaauagccucaggaauagcaguaucaaaaguucuacaccuagaaggagaaguaaacaaaauuaaaaacgcauuacuaucaaccaacaaagcaguuguaucccuuucaaauggagucucuguacuuacaucaaaaguacucgaccuaaaaaacuauauagacaaacaacuacucccaauagucaauaagcaaucaugcagcauaucaaacauagaaacaguuauagaauuucaacaaaaaaacaacagacuacucgaaauaaccagagaauuuagcgucaacgcaggcguaaccacaccgguauccacauacaugcuuacaaacucagaacuccucucacuaauaaacgacaugccaauaacuaaugaccaaaaaaaacuaaugucaaacaauguccaaauaguccgucaacaaucauacucaauaaugucaauaauaaaagaagaaguauuagcauauguaguccaacuaccauuauacggcguuauagacacaccuuguuggaaacuucacacauccccacucuguacaaccaacacaaaagaagguuccaauauaugccuaacuagaaccgacagaggaugguauugcgacaacgcaggaucuguaucauucuuuccccaagcagaaacauguaaaguacaaaguaaccgcguauucugcgacaccaugaacucauuaacccucccauccgaaguuaauuuaugcaauauagacauauuuaauccuaaauacgacugcaaaauaaugacaucaaaaacagacguuaguuccuccguaaucacaucuuugggcgcaauagucucaugcuauggaaaaacaaaaugcacagccucaaacaaaaauagaggaauaauaaaaacauucagcaacggcugugauuauguauccaacaaaggaguagacacaguauccguaggcaauacccuuuacuacguuaauaaacaagaaggaaaaucauuauacgucaaaggagaaccuaucauaaauuucuacgacccauuaguauucccuucagacgaauuugaugccucaauaucccaagucaaugaaaaaaucaaccaaucacuagccuuuauccgcaaaucagacgaauuacuacacaacguaaacguaggcaaaucaacaacuaauauaaugauaacaacaauaauaauaguaauuauaguaauauuauuacuacuaaucgccguagguuuauucuuauacuguaaagcacgaucaacaccaguuacacucucaaaagaucaacuaucaggaauaaacaacauagcauuuuccaauuaaggacuaguggaagcauuuuccuggcugauuaaaagaaauuacucagcuauggucaucuguuccuguuagaaggcuaugcagcauauuauauacuaugcgcauguuaugaaaugcauaauaaaaaauuuuaaaaaaucuaaaagaucuaaaaaaaaaaaaaaaaaaaaaaaaaaaaaaaaaaaaaaaaaaaaaaaaaaaaaaaaaaaaaaaaugcaucccccccccccccccccccccccccccccccaaaggcucuuuucagagccaccagaauu

SEQ ID NO: 11958 - RNA, 2090 nt, Artificial Sequence
  mRNA product Design f-2 comprising derived and/or modified sequence from HRSV(Memphis-37)__AIY60640.1__F0 (opt11)
gggagagcggcucggccauuuugucccagucaguccggaggcugcggcugcagaaguaccgccugcggaguaacugcaaagaagcuuaccauggaacuccccauccucaaaacaaacgccauaaccacuauccucgccgccgucacccucugcuucgccuccucccaaaacaucacagaggaguucuaccaauccacaugcuccgccgucuccaaaggcuaccucagcgcccuacguaccggcugguacaccagcgucaucacaauagaacucuccaacaucaaggaaaacaaaugcaacggcaccgaugccaaaguaaaacucaucaaacaagaacucgauaaauacaaaaacgccgucaccgaacuacaacuccuaaugcaaagcacacccgccgccaacaacagagcacggcgcgaacugccccgcuucaugaacuacacccucaacaacaccaaaaauaacaacgucacccuauccaagaaacgcaaacgccgauuccucgguuuccuacucggcguaggaagcgccauagccucaggcaucgccgucuccaaaguccuccaucuggaaggcgaagucaacaaaaucaaaaacgcacucuuauccaccaacaaagccgucgucucccucucgaacggggucuccguccuuaccuccaaaguccucgaccuuaaaaacuacaucgacaaacaacuacuaccaauagucaauaaacaauccugcuccaucucaaacauagaaaccgucauagaguuccaacagaagaacaaucgccuccucgaaauaacucgcgaguucuccgucaacgcaggcgucacgaccccugucucaacauacaugcuaacuaacucagaacuccuaagccuaaucaacgacaugcccaucacaaacgaccaaaagaaacucaugagcaacaauguccagauagucagacagcaauccuauagcaucaugucuauaauaaaagaagaagugcucgccuacguaguccaacucccucuuuacggcgucauagacacacccugcuggaaacuccacacaucuccucucugcaccaccaacacaaaagaaggcagcaacaucugccugacccgaaccgaccgcggaugguacugcgacaacgcuggcuccgugucuuucuuuccccaagccgaaaccugcaaaguccaguccaaccgcgucuucugcgacacaaugaacucccucacccuacccuccgaaguuaaccucugcaacaucgacaucuucaauccaaaauacgacugcaaaaucaugaccucgaaaacggacguauccuccuccgucauaacaucacuuggagccaucguuagcugcuacggaaaaaccaaauguaccgccuccaacaaaaaccgcggaauaaucaaaacauucuccaacggcugcgacuacguaagcaacaaaggggucgauacugucuccguagguaacacccuauacuacgucaacaaacaagaaggaaaaucacuauacguuaaaggcgaacccauuaucaacuucuacgacccccucguuuucccauccgacgaguucgacgccuccauaagccaaguuaacgaaaagauaaaccaaucgcucgcauucauccgcaaauccgacgaacuccuacacaacgucaacgugggcaaauccacaacaaacaucaugaucaccaccaucauuaucgucauaauagucauccuccuccugcucaucgccgugggacuauuccuauacugcaaagcccgcucgacgcccgucacacuuuccaaagaccaacuaagcggaaucaacaacauagcguucagcaauuaaggacuaguggaagcauuuuccuggcugauuaaaagaaauuacucagcuauggucaucuguuccuguuagaaggcuaugcagcauauuauauacuaugcgcauguuaugaaaugcauaauaaaaaauuuuaaaaaaucuaaaagaucuaaaaaaaaaaaaaaaaaaaaaaaaaaaaaaaaaaaaaaaaaaaaaaaaaaaaaaaaaaaaaaaaugcaucccccccccccccccccccccccccccccccaaaggcucuuuucagagccaccagaauu

SEQ ID NO: 11959 - RNA, 2081 nt, Artificial Sequence
  mRNA product Design f-3 comprising derived and/or modified sequence from HRSV(Memphis-37)__AIY60640.1__F0 (wt)
gggagagucccgcagucggcguccagcggcucugcuuguucgugugugugucguugcaggccuuauucaagcuuaccauggaguugccaauccucaaaacaaaugcaauuaccacaauccuugcugcagucacacucuguuucgcuuccagucaaaacaucacugaagaauuuuaucaaucaacaugcagugcaguuagcaaaggcuaucuuagugcuuuaagaacugguugguauacuaguguuauaacuauagaauuaaguaauaucaaggaaaauaaguguaauggaacagaugcuaagguaaaauugauaaaacaagaauuagauaaauauaaaaaugcuguaacagaauugcaguugcucaugcaaagcacaccagcagccaacaaucgagccagaagagaacuaccaagguuuaugaauuauacacucaacaauaccaaaaauaacaauguaacauuaagcaagaaaaggaaaagaagauuucuuggcuuuuuguuagguguuggaucugcaaucgccaguggcauugcuguaucuaaaguccugcaccuagaaggggaagugaacaaaaucaaaaaugcucuacuauccacaaacaaggcuguagucagcuuaucaaauggaguuagugucuuaaccagcaaaguguuagaccucaaaaacuauauagauaaacaguuguuacccauugugaacaagcaaagcugcagcauaucaaacauugaaacugugauagaauuccaacaaaagaacaacagacuacuagagauuaccagggaauuuaguguuaaugcagguguaacuacaccuguaagcacuuauauguuaacaaauagugaauuauuaucauuaaucaaugauaugccuauaacaaaugaucagaaaaaguuaauguccaacaauguucaaauaguuagacagcaaaguuacucuaucauguccauaauaaaggaggaagucuuagcauauguaguucaauuaccacuauaugguguaauagauacaccuuguuggaaacuacacacauccccucuaugcacaaccaacacaaaggaaggguccaacaucuguuuaacaagaaccgacagaggaugguacugugacaaugcaggaucagugucuuucuucccacaagcugaaacaugcaaaguucaaucgaaucgaguauuuugugacacaaugaacagucuaacauuaccaagugaaguaaaucucugcaacauugacauauucaacccuaaauaugauugcaaaauuaugacuucaaaaacagaugugagcagcuccguuaucacaucucuaggagccauugugucaugcuauggcaaaacuaaauguacagcauccaauaaaaaucguggaaucauaaagacauuuucuaacgggugugauuauguaucaaauaaggggguggacacuguaucuguagguaauacauuauauuauguaaauaagcaagaaggaaaaagccucuauguaaaaggugaaccaauaauaaauuucuaugacccauuaguguucccuucugaugaauuugaugcaucaauaucucaagucaaugagaagauuaaccagagccuagcauuuauucguaaauccgaugaauuauuacauaauguaaauguugguaaauccaccacaaauaucaugauaacuacuauaauuauagugauuauaguaauauuguuauuauuaauugcaguugggcuguuccuauacugcaaggccagaagcacaccagucacacuaagcaaggaucaacugagugguauaaauaauauugcauuuaguaacugaggacuaguacuggcugcaucucccuuuccucuguccuccauccuucucccaggauggugaagggggaccugguacccagugauccccaccccaggauccuaaaucaugacuuaccugcuaauaaaaacucauuggaaaagugagaagaucuaaaaaaaaaaaaaaaaaaaaaaaaaaaaaaaaaaaaaaaaaaaaaaaaaaaaaaaaaaaaaaaaugcaucccccccccccccccccccccccccccccccaaaggcucuuuucagagccaccagaauu

SEQ ID NO: 11960 - RNA, 2081 nt, Artificial Sequence
  mRNA product Design f-3 comprising derived and/or modified sequence from HRSV(Memphis-37)__AIY60640.1__F0 (opt1)
gggagagucccgcagucggcguccagcggcucugcuuguucgugugugugucguugcaggccuuauucaagcuuaccauggagcugcccauccucaagaccaacgccaucaccacgauccuggccgcggugacccugugcuucgccagcucccagaacaucaccgaggaguucuaccagagcacgugcuccgccgucagcaagggcuaccucuccgcccugcgcaccgggugguacaccagcgugaucaccaucgagcuguccaacaucaaggagaacaagugcaacggcaccgacgccaaggugaagcucaucaagcaggagcuggacaaguacaagaacgcggucacggagcugcagcuccugaugcagagcaccccggccgccaacaaccgggcccgccgggagcugccccgcuucaugaacuacacccucaacaacaccaagaacaacaacgugacgcuguccaagaagcggaagcgccgguuccugggguuccuccugggcguggggagcgcgaucgccuccggcaucgccgucagcaaggugcugcaccucgagggcgaggugaacaagaucaagaacgcccugcuguccaccaacaaggccgucgugagccucuccaacggggugagcguccugaccuccaaggugcuggaccucaagaacuacaucgacaagcagcugcugcccaucgugaacaagcagagcugcuccaucagcaacaucgagaccgucaucgaguuccagcagaagaacaaccgccuccuggagaucacgcgggaguucagcgugaacgcgggcgugaccacccccgucuccaccuacaugcugacgaacagcgagcuccugucccugaucaacgacaugccgaucaccaacgaccagaagaagcucaugagcaacaacgugcagaucgugcgccagcaguccuacagcaucauguccaucaucaaggaggagguccuggccuacguggugcagcugccccucuacggggucaucgacacccccugcuggaagcugcacaccagcccccugugcacgaccaacaccaaggagggcuccaacaucugccucacccggacggaccgcgggugguacugcgacaacgccggcagcguguccuucuucccgcaggccgagaccugcaagguccagagcaaccggguguucugcgacaccaugaacucccugacccugcccagcgaggugaaccucugcaacaucgacaucuucaaccccaaguacgacugcaagaucaugacguccaagaccgacgucagcuccagcgugaucaccucccugggcgccaucgugagcugcuacgggaagaccaagugcacggcgagcaacaagaaccgcggcaucaucaagaccuucuccaacgggugcgacuacgucagcaacaagggcguggacaccguguccgucggcaacacccuguacuacgugaacaagcaggagggcaagagccucuacgugaagggggagcccaucaucaacuucuacgacccgcuggucuuccccuccgacgaguucgacgccagcaucucccaggugaacgagaagaucaaccagagccuggccuucauccggaaguccgacgagcuccugcacaacgugaacgucggcaagagcaccacgaacaucaugaucaccaccaucaucaucgugaucaucgugauccugcugcuccugaucgccgucgggcuguuccucuacugcaaggcccgcuccacccccgugacgcugagcaaggaccagcuguccgggaucaacaacaucgcguucagcaacugaggacuaguacuggcugcaucucccuuuccucuguccuccauccuucucccaggauggugaagggggaccugguacccagugauccccaccccaggauccuaaaucaugacuuaccugcuaauaaaaacucauuggaaaagugagaagaucuaaaaaaaaaaaaaaaaaaaaaaaaaaaaaaaaaaaaaaaaaaaaaaaaaaaaaaaaaaaaaaaaugcaucccccccccccccccccccccccccccccccaaaggcucuuuucagagccaccagaauu

SEQ ID NO: 11961 - RNA, 2081 nt, Artificial Sequence
  mRNA product Design f-3 comprising derived and/or modified sequence from HRSV(Memphis-37)__AIY60640.1__F0 (opt2)
gggagagucccgcagucggcguccagcggcucugcuuguucgugugugugucguugcaggccuuauucaagcuuaccauggagcuccccauccucaagaccaacgccaucaccaccauccucgccgccgucacccucugcuucgccuccucccagaacaucaccgaggaguucuaccaguccaccugcuccgccgucuccaagggcuaccucuccgcccuccgcaccggcugguacaccuccgucaucaccaucgagcucuccaacaucaaggagaacaagugcaacggcaccgacgccaaggucaagcucaucaagcaggagcucgacaaguacaagaacgccgucaccgagcuccagcuccucaugcaguccacccccgccgccaacaaccgcgcccgccgcgagcucccccgcuucaugaacuacacccucaacaacaccaagaacaacaacgucacccucuccaagaagcgcaagcgccgcuuccucggcuuccuccucggcgucggcuccgccaucgccuccggcaucgccgucuccaagguccuccaccucgagggcgaggucaacaagaucaagaacgcccuccucuccaccaacaaggccgucgucucccucuccaacggcgucuccguccucaccuccaagguccucgaccucaagaacuacaucgacaagcagcuccuccccaucgucaacaagcaguccugcuccaucuccaacaucgagaccgucaucgaguuccagcagaagaacaaccgccuccucgagaucacccgcgaguucuccgucaacgccggcgucaccacccccgucuccaccuacaugcucaccaacuccgagcuccucucccucaucaacgacaugcccaucaccaacgaccagaagaagcucauguccaacaacguccagaucguccgccagcaguccuacuccaucauguccaucaucaaggaggagguccucgccuacgucguccagcucccccucuacggcgucaucgacacccccugcuggaagcuccacaccuccccccucugcaccaccaacaccaaggagggcuccaacaucugccucacccgcaccgaccgcggcugguacugcgacaacgccggcuccgucuccuucuucccccaggccgagaccugcaagguccaguccaaccgcgucuucugcgacaccaugaacucccucacccuccccuccgaggucaaccucugcaacaucgacaucuucaaccccaaguacgacugcaagaucaugaccuccaagaccgacgucuccuccuccgucaucaccucccucggcgccaucgucuccugcuacggcaagaccaagugcaccgccuccaacaagaaccgcggcaucaucaagaccuucuccaacggcugcgacuacgucuccaacaagggcgucgacaccgucuccgucggcaacacccucuacuacgucaacaagcaggagggcaagucccucuacgucaagggcgagcccaucaucaacuucuacgacccccucgucuuccccuccgacgaguucgacgccuccaucucccaggucaacgagaagaucaaccagucccucgccuucauccgcaaguccgacgagcuccuccacaacgucaacgucggcaaguccaccaccaacaucaugaucaccaccaucaucaucgucaucaucgucauccuccuccuccucaucgccgucggccucuuccucuacugcaaggcccgcuccacccccgucacccucuccaaggaccagcucuccggcaucaacaacaucgccuucuccaacugaggacuaguacuggcugcaucucccuuuccucuguccuccauccuucucccaggauggugaagggggaccugguacccagugauccccaccccaggauccuaaaucaugacuuaccugcuaauaaaaacucauuggaaaagugagaagaucuaaaaaaaaaaaaaaaaaaaaaaaaaaaaaaaaaaaaaaaaaaaaaaaaaaaaaaaaaaaaaaaaugcaucccccccccccccccccccccccccccccccaaaggcucuuuucagagccaccagaauu

SEQ ID NO: 11962 - RNA, 2081 nt, Artificial Sequence
  mRNA product Design f-3 comprising derived and/or modified sequence from HRSV(Memphis-37)__AIY60640.1__F0 (opt3)
gggagagucccgcagucggcguccagcggcucugcuuguucgugugugugucguugcaggccuuauucaagcuuaccauggagcugcccauccucaagaccaacgccauuacaacuauacuugcugcagugacgcugugcuucgccagcucccagaauaucaccgaagaguuuuaccaaucuacauguucagcggucaguaaaggcuauuugagcgcuuuaagaacugggugguacaccuccguuauuacaaucgaacugucuaacauuaaggagaauaaaugcaacggaaccgacgccaaggugaaacuaaucaagcaggaacucgauaaguauaaaaaugcaguaacugagcugcagcuucugaugcagucgaccccugccgcuaacaauagggcacggcgcgaguugccacgauucaugaacuacacacucaauaacacgaagaauaacaaugugacucugagcaaaaagcguaaaagaagguuucuggguuuccucuuaggcgucgggucagccauagcuaguggaaucgccguguccaagguucugcaccuugaaggcgaggugaacaagauuaaaaaugcguugcugucuaccaacaaggcagucgugagccuauccaacgguguaucaguucucacaaguaaagugcuggaccuuaagaauuauaucgauaaacaacuguugccgauugucaacaagcagagcuguucuaucuccaauauagaaacugugauugaguuucagcagaaaaacaaucggcuccuggagaucacccgcgaguucucagugaacgccggggucacaacccccguuagcacguacauguuaacuaauagugaacugcucucucuuauuaacgacaugccuaucacaaaugaucaaaagaagcugauguccaacaaugugcagaucguaagacagcagagcuauucgauuaugucuauaaucaaagaagagguguuggcuuacgucgugcaacuaccacuguacggaguuauugacacccccugcuggaagcuccauacuuccccucuguguacaaccaacacgaaagaaggcucaaauaucugccuuaccaggacagaucggggcugguauugugacaacgccgggagugugagcuuuuucccacaggcagagacuugcaagguccaguccaaucgcguguuuugugauaccaugaacucucugacauugcccagcgagguaaaccucugcaauauagacauuuucaacccuaaauacgauuguaagaucaugacuucaaagaccgacguuaguuccagcgugaucacaucucugggagcuauugucucaugcuaugguaaaaccaagugcacugccaguaauaaaaaccgaggcaucauuaagacguuuagcaaugggugugauuacguguccaacaaaggagucgacacagugucuguuggcaauaccuuauauuacgugaacaagcaagaagguaagucgcuguauguaaaaggggagccaauaaucaauuucuacgacccgcuagucuuucccagcgaugaguucgacgcguccauuucacaggugaacgaaaagaucaaucagagucucgccuucaucagaaaaucugaugaacugcuucacaacguuaaugugggaaagagcacuaccaacauuaugauaacaaccaucauuaucgucauuaucgugauauugcugcuccugaucgcaguaggccuuuuucuguacugcaaagcuagguccacuccugugacauugucaaaggaccagcucagcggcauuaauaacaucgccuucucuaacugaggacuaguacuggcugcaucucccuuuccucuguccuccauccuucucccaggauggugaagggggaccugguacccagugauccccaccccaggauccuaaaucaugacuuaccugcuaauaaaaacucauuggaaaagugagaagaucuaaaaaaaaaaaaaaaaaaaaaaaaaaaaaaaaaaaaaaaaaaaaaaaaaaaaaaaaaaaaaaaaugcaucccccccccccccccccccccccccccccccaaaggcucuuuucagagccaccagaauu

SEQ ID NO: 11963 - RNA, 2081 nt, Artificial Sequence
  mRNA product Design f-3 comprising derived and/or modified sequence from HRSV(Memphis-37)__AIY60640.1__F0 (opt4)
gggagagucccgcagucggcguccagcggcucugcuuguucgugugugugucguugcaggccuuauucaagcuuaccauggagcugcccauccugaagaccaacgccaucaccaccauccuggccgccgugacccugugcuucgccagcagccagaacaucaccgaggaguucuaccagagcaccugcagcgccgugagcaagggcuaccugagcgcccugagaaccggcugguacaccagcgugaucaccaucgagcugagcaacaucaaggagaacaagugcaacggcaccgacgccaaggugaagcugaucaagcaggagcuggacaaguacaagaacgccgugaccgagcugcagcugcugaugcagagcacccccgccgccaacaacagagccagaagagagcugcccagauucaugaacuacacccugaacaacaccaagaacaacaacgugacccugagcaagaagagaaagagaagauuccugggcuuccugcugggcgugggcagcgccaucgccagcggcaucgccgugagcaaggugcugcaccuggagggcgaggugaacaagaucaagaacgcccugcugagcaccaacaaggccguggugagccugagcaacggcgugagcgugcugaccagcaaggugcuggaccugaagaacuacaucgacaagcagcugcugcccaucgugaacaagcagagcugcagcaucagcaacaucgagaccgugaucgaguuccagcagaagaacaacagacugcuggagaucaccagagaguucagcgugaacgccggcgugaccacccccgugagcaccuacaugcugaccaacagcgagcugcugagccugaucaacgacaugcccaucaccaacgaccagaagaagcugaugagcaacaacgugcagaucgugagacagcagagcuacagcaucaugagcaucaucaaggaggaggugcuggccuacguggugcagcugccccuguacggcgugaucgacacccccugcuggaagcugcacaccagcccccugugcaccaccaacaccaaggagggcagcaacaucugccugaccagaaccgacagaggcugguacugcgacaacgccggcagcgugagcuucuucccccaggccgagaccugcaaggugcagagcaacagaguguucugcgacaccaugaacagccugacccugcccagcgaggugaaccugugcaacaucgacaucuucaaccccaaguacgacugcaagaucaugaccagcaagaccgacgugagcagcagcgugaucaccagccugggcgccaucgugagcugcuacggcaagaccaagugcaccgccagcaacaagaacagaggcaucaucaagaccuucagcaacggcugcgacuacgugagcaacaagggcguggacaccgugagcgugggcaacacccuguacuacgugaacaagcaggagggcaagagccuguacgugaagggcgagcccaucaucaacuucuacgacccccugguguuccccagcgacgaguucgacgccagcaucagccaggugaacgagaagaucaaccagagccuggccuucaucagaaagagcgacgagcugcugcacaacgugaacgugggcaagagcaccaccaacaucaugaucaccaccaucaucaucgugaucaucgugauccugcugcugcugaucgccgugggccuguuccuguacugcaaggccagaagcacccccgugacccugagcaaggaccagcugagcggcaucaacaacaucgccuucagcaacugaggacuaguacuggcugcaucucccuuuccucuguccuccauccuucucccaggauggugaagggggaccugguacccagugauccccaccccaggauccuaaaucaugacuuaccugcuaauaaaaacucauuggaaaagugagaagaucuaaaaaaaaaaaaaaaaaaaaaaaaaaaaaaaaaaaaaaaaaaaaaaaaaaaaaaaaaaaaaaaaugcaucccccccccccccccccccccccccccccccaaaggcucuuuucagagccaccagaauu

SEQ ID NO: 11964 - RNA, 2081 nt, Artificial Sequence
  mRNA product Design f-3 comprising derived and/or modified sequence from HRSV(Memphis-37)__AIY60640.1__F0 (opt5)
gggagagucccgcagucggcguccagcggcucugcuuguucgugugugugucguugcaggccuuauucaagcuuaccauggagcugcccauccucaagaccaacgccauuacaacgauccuggcugccgugacccuuugcuucgcgagcucccagaauauuacagaagaguuuuaccaaucuaccuguagcgcugucuccaaaggcuaucugucugcccucagaacagggugguacaccagcguuaucacaauugaacuguccaacaucaaggagaauaaaugcaacggaaccgacgccaaggugaaacuuaucaagcaggaacuggauaaguauaaaaaugcugugacggagcuccagcugcugaugcagucuaccccugccgcuaacaaucgggcccgcagagagcucccgcgguucaugaacuacacacugaauaacaccaagaauaacaaugucacacuuagcaaaaagcgcaaaagacgguuucugggcuuccuccugggggugggauccgcgauugccagcggcaucgcuguuucuaaggugcuucaccuggaaggggaggucaacaagauuaaaaaugcccuccuguccaccaacaaggcugugguuagccugucuaacggaguguccguccucacgagcaaagugcuggaccuuaagaauuauaucgauaaacaacugcuccccauugugaacaagcagucuuguuccaucagcaauauugaaacagucaucgaguuucagcagaaaaacaaucgccugcuugagaucaccagagaauuuuccguuaacgccggcgugacaaccccugugucuaccuacaugcugacaaauagcgagcuccugucccugauuaacgacaugcccaucacgaaugaucaaaagaagcucaugagcaacaauguccagauugugcggcagcagucuuauuccaucaugagcauuaucaaagaagagguucuggcguacgugguccaacuuccucuguacggcgugaucgacacccccugcuggaagcuccauacaucuccucuguguaccacaaacaccaaagaagggagcaauauuugccuuacgcgcacagauagaggaugguauugugacaacgccggcuccguuucuuucuucccgcaggcugagaccugcaaggugcagagcaaucgggucuuuugugauaccaugaacucccugacacuccccagcgaggugaaccugugcaauaucgacauuuucaacccuaaauacgauuguaagaucaugaccucuaagacagacgucuccagcucugugauuacgucccugggggccaucguuagcugcuauggaaaaaccaagugcacagcuuccaauaaaaaccgcggcaucauuaagaccuuuucuaaugggugugauuacgugagcaacaaaggagucgacacaguguccguuggcaauacccucuauuacgugaacaagcaagaaggcaagucucuguaugucaaaggggagcccaucauuaauuucuacgacccucuuguguuucccagcgaugaguucgacgccuccaucagccaggugaacgaaaagauuaaucagucucuggccuucaucagaaaauccgaugaacuccugcacaacguuaaugucggaaagagcacgaccaacauuaugaucacaaccaucauuaucgugauuaucgugauucugcuucuccugaucgcugucggccuguuucucuacugcaaagcgcggucuacaccggugacccuguccaaggaccagcuuagcgggaucaauaacauugccuucucuaacugaggacuaguacuggcugcaucucccuuuccucuguccuccauccuucucccaggauggugaagggggaccugguacccagugauccccaccccaggauccuaaaucaugacuuaccugcuaauaaaaacucauuggaaaagugagaagaucuaaaaaaaaaaaaaaaaaaaaaaaaaaaaaaaaaaaaaaaaaaaaaaaaaaaaaaaaaaaaaaaaugcaucccccccccccccccccccccccccccccccaaaggcucuuuucagagccaccagaauu

SEQ ID NO: 11965 - RNA, 2081 nt, Artificial Sequence
  mRNA product Design f-3 comprising derived and/or modified sequence from HRSV(Memphis-37)__AIY60640.1__F0 (opt6)
gggagagucccgcagucggcguccagcggcucugcuuguucgugugugugucguugcaggccuuauucaagcuuaccauggaacugccuauucuaaaaacaaaugccauaacaacaauucuugcagcaguaacauuauguuuugcaucaucacaaaacauuacagaagaauuuuaccaauccacuugcucagccguaucaaaaggauaccuaucagccuuaagaacagguugguacaccucaguaauaaccauagaacuaucaaacauaaaagaaaacaaaugcaaugguacugaugcaaaagucaaacuaaucaaacaagaacuggacaaauacaaaaaugcaguaaccgaacuacaacuccuaaugcaauccacaccugcagccaacaacagagcaagacgcgaacuaccaagauuuaugaauuacacauuaaacaacaccaagaacaacaauguaacucucucaaaaaaaagaaaaagacgcuuucuagguuuccuccuaggcgucggaucugcaauagccucaggaauagcaguaucaaaaguucuacaccuagaaggagaaguaaacaaaauuaaaaacgcauuacuaucaaccaacaaagcaguuguaucccuuucaaauggagucucuguacuuacaucaaaaguacucgaccuaaaaaacuauauagacaaacaacuacucccaauagucaauaagcaaucaugcagcauaucaaacauagaaacaguuauagaauuucaacaaaaaaacaacagacuacucgaaauaaccagagaauuuagcgucaacgcaggcguaaccacaccgguauccacauacaugcuuacaaacucagaacuccucucacuaauaaacgacaugccaauaacuaaugaccaaaaaaaacuaaugucaaacaauguccaaauaguccgucaacaaucauacucaauaaugucaauaauaaaagaagaaguauuagcauauguaguccaacuaccauuauacggcguuauagacacaccuuguuggaaacuucacacauccccacucuguacaaccaacacaaaagaagguuccaauauaugccuaacuagaaccgacagaggaugguauugcgacaacgcaggaucuguaucauucuuuccccaagcagaaacauguaaaguacaaaguaaccgcguauucugcgacaccaugaacucauuaacccucccauccgaaguuaauuuaugcaauauagacauauuuaauccuaaauacgacugcaaaauaaugacaucaaaaacagacguuaguuccuccguaaucacaucuuugggcgcaauagucucaugcuauggaaaaacaaaaugcacagccucaaacaaaaauagaggaauaauaaaaacauucagcaacggcugugauuauguauccaacaaaggaguagacacaguauccguaggcaauacccuuuacuacguuaauaaacaagaaggaaaaucauuauacgucaaaggagaaccuaucauaaauuucuacgacccauuaguauucccuucagacgaauuugaugccucaauaucccaagucaaugaaaaaaucaaccaaucacuagccuuuauccgcaaaucagacgaauuacuacacaacguaaacguaggcaaaucaacaacuaauauaaugauaacaacaauaauaauaguaauuauaguaauauuauuacuacuaaucgccguagguuuauucuuauacuguaaagcacgaucaacaccaguuacacucucaaaagaucaacuaucaggaauaaacaacauagcauuuuccaauuaaggacuaguacuggcugcaucucccuuuccucuguccuccauccuucucccaggauggugaagggggaccugguacccagugauccccaccccaggauccuaaaucaugacuuaccugcuaauaaaaacucauuggaaaagugagaagaucuaaaaaaaaaaaaaaaaaaaaaaaaaaaaaaaaaaaaaaaaaaaaaaaaaaaaaaaaaaaaaaaaugcaucccccccccccccccccccccccccccccccaaaggcucuuuucagagccaccagaauu

SEQ ID NO: 11966 - RNA, 2081 nt, Artificial Sequence
  mRNA product Design f-3 comprising derived and/or modified sequence from HRSV(Memphis-37)__AIY60640.1__F0 (opt11)
gggagagucccgcagucggcguccagcggcucugcuuguucgugugugugucguugcaggccuuauucaagcuuaccauggaacuccccauccucaaaacaaacgccauaaccacuauccucgccgccgucacccucugcuucgccuccucccaaaacaucacagaggaguucuaccaauccacaugcuccgccgucuccaaaggcuaccucagcgcccuacguaccggcugguacaccagcgucaucacaauagaacucuccaacaucaaggaaaacaaaugcaacggcaccgaugccaaaguaaaacucaucaaacaagaacucgauaaauacaaaaacgccgucaccgaacuacaacuccuaaugcaaagcacacccgccgccaacaacagagcacggcgcgaacugccccgcuucaugaacuacacccucaacaacaccaaaaauaacaacgucacccuauccaagaaacgcaaacgccgauuccucgguuuccuacucggcguaggaagcgccauagccucaggcaucgccgucuccaaaguccuccaucuggaaggcgaagucaacaaaaucaaaaacgcacucuuauccaccaacaaagccgucgucucccucucgaacggggucuccguccuuaccuccaaaguccucgaccuuaaaaacuacaucgacaaacaacuacuaccaauagucaauaaacaauccugcuccaucucaaacauagaaaccgucauagaguuccaacagaagaacaaucgccuccucgaaauaacucgcgaguucuccgucaacgcaggcgucacgaccccugucucaacauacaugcuaacuaacucagaacuccuaagccuaaucaacgacaugcccaucacaaacgaccaaaagaaacucaugagcaacaauguccagauagucagacagcaauccuauagcaucaugucuauaauaaaagaagaagugcucgccuacguaguccaacucccucuuuacggcgucauagacacacccugcuggaaacuccacacaucuccucucugcaccaccaacacaaaagaaggcagcaacaucugccugacccgaaccgaccgcggaugguacugcgacaacgcuggcuccgugucuuucuuuccccaagccgaaaccugcaaaguccaguccaaccgcgucuucugcgacacaaugaacucccucacccuacccuccgaaguuaaccucugcaacaucgacaucuucaauccaaaauacgacugcaaaaucaugaccucgaaaacggacguauccuccuccgucauaacaucacuuggagccaucguuagcugcuacggaaaaaccaaauguaccgccuccaacaaaaaccgcggaauaaucaaaacauucuccaacggcugcgacuacguaagcaacaaaggggucgauacugucuccguagguaacacccuauacuacgucaacaaacaagaaggaaaaucacuauacguuaaaggcgaacccauuaucaacuucuacgacccccucguuuucccauccgacgaguucgacgccuccauaagccaaguuaacgaaaagauaaaccaaucgcucgcauucauccgcaaauccgacgaacuccuacacaacgucaacgugggcaaauccacaacaaacaucaugaucaccaccaucauuaucgucauaauagucauccuccuccugcucaucgccgugggacuauuccuauacugcaaagcccgcucgacgcccgucacacuuuccaaagaccaacuaagcggaaucaacaacauagcguucagcaauuaaggacuaguacuggcugcaucucccuuuccucuguccuccauccuucucccaggauggugaagggggaccugguacccagugauccccaccccaggauccuaaaucaugacuuaccugcuaauaaaaacucauuggaaaagugagaagaucuaaaaaaaaaaaaaaaaaaaaaaaaaaaaaaaaaaaaaaaaaaaaaaaaaaaaaaaaaaaaaaaaugcaucccccccccccccccccccccccccccccccaaaggcucuuuucagagccaccagaauu

SEQ ID NO: 11967 - RNA, 2297 nt, Artificial Sequence
  mRNA product Design f-4 comprising derived and/or modified sequence from HRSV(Memphis-37)__AIY60640.1__F0 (wt)
gggagagucccgcagucggcguccagcggcucugcuuguucgugugugugucguugcaggccuuauucaagcuuaccauggaguugccaauccucaaaacaaaugcaauuaccacaauccuugcugcagucacacucuguuucgcuuccagucaaaacaucacugaagaauuuuaucaaucaacaugcagugcaguuagcaaaggcuaucuuagugcuuuaagaacugguugguauacuaguguuauaacuauagaauuaaguaauaucaaggaaaauaaguguaauggaacagaugcuaagguaaaauugauaaaacaagaauuagauaaauauaaaaaugcuguaacagaauugcaguugcucaugcaaagcacaccagcagccaacaaucgagccagaagagaacuaccaagguuuaugaauuauacacucaacaauaccaaaaauaacaauguaacauuaagcaagaaaaggaaaagaagauuucuuggcuuuuuguuagguguuggaucugcaaucgccaguggcauugcuguaucuaaaguccugcaccuagaaggggaagugaacaaaaucaaaaaugcucuacuauccacaaacaaggcuguagucagcuuaucaaauggaguuagugucuuaaccagcaaaguguuagaccucaaaaacuauauagauaaacaguuguuacccauugugaacaagcaaagcugcagcauaucaaacauugaaacugugauagaauuccaacaaaagaacaacagacuacuagagauuaccagggaauuuaguguuaaugcagguguaacuacaccuguaagcacuuauauguuaacaaauagugaauuauuaucauuaaucaaugauaugccuauaacaaaugaucagaaaaaguuaauguccaacaauguucaaauaguuagacagcaaaguuacucuaucauguccauaauaaaggaggaagucuuagcauauguaguucaauuaccacuauaugguguaauagauacaccuuguuggaaacuacacacauccccucuaugcacaaccaacacaaaggaaggguccaacaucuguuuaacaagaaccgacagaggaugguacugugacaaugcaggaucagugucuuucuucccacaagcugaaacaugcaaaguucaaucgaaucgaguauuuugugacacaaugaacagucuaacauuaccaagugaaguaaaucucugcaacauugacauauucaacccuaaauaugauugcaaaauuaugacuucaaaaacagaugugagcagcuccguuaucacaucucuaggagccauugugucaugcuauggcaaaacuaaauguacagcauccaauaaaaaucguggaaucauaaagacauuuucuaacgggugugauuauguaucaaauaaggggguggacacuguaucuguagguaauacauuauauuauguaaauaagcaagaaggaaaaagccucuauguaaaaggugaaccaauaauaaauuucuaugacccauuaguguucccuucugaugaauuugaugcaucaauaucucaagucaaugagaagauuaaccagagccuagcauuuauucguaaauccgaugaauuauuacauaauguaaauguugguaaauccaccacaaauaucaugauaacuacuauaauuauagugauuauaguaauauuguuauuauuaauugcaguugggcuguuccuauacugcaaggccagaagcacaccagucacacuaagcaaggaucaacugagugguauaaauaauauugcauuuaguaacugaggacuagugaagggaacacccaaauuuaauucagccuuaagcacaauuaauuaagagugaaacguaauuguacaagcaguuggucacccaccauagggcaugaucaacaccgcaaccuuuccuuuuucccccagugauucugaaaaaccccucuucccuucagcuugcuuagauguuccaaauuuaguaagcuuaaggcggccuacagaagaaaaagaaaaaaaaggccacaaaaguucccucucacuuucaguaaauaaaauaaaagcagcaacagaaauaaagaaauaaaugaaauucaaaaugaaauaaauauuguguugugcagcauuaaaaaaucaauaaaaauuaaaaaugagcaagaucuaaaaaaaaaaaaaaaaaaaaaaaaaaaaaaaaaaaaaaaaaaaaaaaaaaaaaaaaaaaaaaaaugcaucccccccccccccccccccccccccccccccaaaggcucuuuucagagccaccagaauu

SEQ ID NO: 11968 - RNA, 2297 nt, Artificial Sequence
  mRNA product Design f-4 comprising derived and/or modified sequence from HRSV(Memphis-37)__AIY60640.1__F0 (opt1)
gggagagucccgcagucggcguccagcggcucugcuuguucgugugugugucguugcaggccuuauucaagcuuaccauggagcugcccauccucaagaccaacgccaucaccacgauccuggccgcggugacccugugcuucgccagcucccagaacaucaccgaggaguucuaccagagcacgugcuccgccgucagcaagggcuaccucuccgcccugcgcaccgggugguacaccagcgugaucaccaucgagcuguccaacaucaaggagaacaagugcaacggcaccgacgccaaggugaagcucaucaagcaggagcuggacaaguacaagaacgcggucacggagcugcagcuccugaugcagagcaccccggccgccaacaaccgggcccgccgggagcugccccgcuucaugaacuacacccucaacaacaccaagaacaacaacgugacgcuguccaagaagcggaagcgccgguuccugggguuccuccugggcguggggagcgcgaucgccuccggcaucgccgucagcaaggugcugcaccucgagggcgaggugaacaagaucaagaacgcccugcuguccaccaacaaggccgucgugagccucuccaacggggugagcguccugaccuccaaggugcuggaccucaagaacuacaucgacaagcagcugcugcccaucgugaacaagcagagcugcuccaucagcaacaucgagaccgucaucgaguuccagcagaagaacaaccgccuccuggagaucacgcgggaguucagcgugaacgcgggcgugaccacccccgucuccaccuacaugcugacgaacagcgagcuccugucccugaucaacgacaugccgaucaccaacgaccagaagaagcucaugagcaacaacgugcagaucgugcgccagcaguccuacagcaucauguccaucaucaaggaggagguccuggccuacguggugcagcugccccucuacggggucaucgacacccccugcuggaagcugcacaccagcccccugugcacgaccaacaccaaggagggcuccaacaucugccucacccggacggaccgcgggugguacugcgacaacgccggcagcguguccuucuucccgcaggccgagaccugcaagguccagagcaaccggguguucugcgacaccaugaacucccugacccugcccagcgaggugaaccucugcaacaucgacaucuucaaccccaaguacgacugcaagaucaugacguccaagaccgacgucagcuccagcgugaucaccucccugggcgccaucgugagcugcuacgggaagaccaagugcacggcgagcaacaagaaccgcggcaucaucaagaccuucuccaacgggugcgacuacgucagcaacaagggcguggacaccguguccgucggcaacacccuguacuacgugaacaagcaggagggcaagagccucuacgugaagggggagcccaucaucaacuucuacgacccgcuggucuuccccuccgacgaguucgacgccagcaucucccaggugaacgagaagaucaaccagagccuggccuucauccggaaguccgacgagcuccugcacaacgugaacgucggcaagagcaccacgaacaucaugaucaccaccaucaucaucgugaucaucgugauccugcugcuccugaucgccgucgggcuguuccucuacugcaaggcccgcuccacccccgugacgcugagcaaggaccagcuguccgggaucaacaacaucgcguucagcaacugaggacuagugaagggaacacccaaauuuaauucagccuuaagcacaauuaauuaagagugaaacguaauuguacaagcaguuggucacccaccauagggcaugaucaacaccgcaaccuuuccuuuuucccccagugauucugaaaaaccccucuucccuucagcuugcuuagauguuccaaauuuaguaagcuuaaggcggccuacagaagaaaaagaaaaaaaaggccacaaaaguucccucucacuuucaguaaauaaaauaaaagcagcaacagaaauaaagaaauaaaugaaauucaaaaugaaauaaauauuguguugugcagcauuaaaaaaucaauaaaaauuaaaaaugagcaagaucuaaaaaaaaaaaaaaaaaaaaaaaaaaaaaaaaaaaaaaaaaaaaaaaaaaaaaaaaaaaaaaaaugcaucccccccccccccccccccccccccccccccaaaggcucuuuucagagccaccagaauu

SEQ ID NO: 11969 - RNA, 2297 nt, Artificial Sequence
  mRNA product Design f-4 comprising derived and/or modified sequence from HRSV(Memphis-37)__AIY60640.1__F0 (opt2)
gggagagucccgcagucggcguccagcggcucugcuuguucgugugugugucguugcaggccuuauucaagcuuaccauggagcuccccauccucaagaccaacgccaucaccaccauccucgccgccgucacccucugcuucgccuccucccagaacaucaccgaggaguucuaccaguccaccugcuccgccgucuccaagggcuaccucuccgcccuccgcaccggcugguacaccuccgucaucaccaucgagcucuccaacaucaaggagaacaagugcaacggcaccgacgccaaggucaagcucaucaagcaggagcucgacaaguacaagaacgccgucaccgagcuccagcuccucaugcaguccacccccgccgccaacaaccgcgcccgccgcgagcucccccgcuucaugaacuacacccucaacaacaccaagaacaacaacgucacccucuccaagaagcgcaagcgccgcuuccucggcuuccuccucggcgucggcuccgccaucgccuccggcaucgccgucuccaagguccuccaccucgagggcgaggucaacaagaucaagaacgcccuccucuccaccaacaaggccgucgucucccucuccaacggcgucuccguccucaccuccaagguccucgaccucaagaacuacaucgacaagcagcuccuccccaucgucaacaagcaguccugcuccaucuccaacaucgagaccgucaucgaguuccagcagaagaacaaccgccuccucgagaucacccgcgaguucuccgucaacgccggcgucaccacccccgucuccaccuacaugcucaccaacuccgagcuccucucccucaucaacgacaugcccaucaccaacgaccagaagaagcucauguccaacaacguccagaucguccgccagcaguccuacuccaucauguccaucaucaaggaggagguccucgccuacgucguccagcucccccucuacggcgucaucgacacccccugcuggaagcuccacaccuccccccucugcaccaccaacaccaaggagggcuccaacaucugccucacccgcaccgaccgcggcugguacugcgacaacgccggcuccgucuccuucuucccccaggccgagaccugcaagguccaguccaaccgcgucuucugcgacaccaugaacucccucacccuccccuccgaggucaaccucugcaacaucgacaucuucaaccccaaguacgacugcaagaucaugaccuccaagaccgacgucuccuccuccgucaucaccucccucggcgccaucgucuccugcuacggcaagaccaagugcaccgccuccaacaagaaccgcggcaucaucaagaccuucuccaacggcugcgacuacgucuccaacaagggcgucgacaccgucuccgucggcaacacccucuacuacgucaacaagcaggagggcaagucccucuacgucaagggcgagcccaucaucaacuucuacgacccccucgucuuccccuccgacgaguucgacgccuccaucucccaggucaacgagaagaucaaccagucccucgccuucauccgcaaguccgacgagcuccuccacaacgucaacgucggcaaguccaccaccaacaucaugaucaccaccaucaucaucgucaucaucgucauccuccuccuccucaucgccgucggccucuuccucuacugcaaggcccgcuccacccccgucacccucuccaaggaccagcucuccggcaucaacaacaucgccuucuccaacugaggacuagugaagggaacacccaaauuuaauucagccuuaagcacaauuaauuaagagugaaacguaauuguacaagcaguuggucacccaccauagggcaugaucaacaccgcaaccuuuccuuuuucccccagugauucugaaaaaccccucuucccuucagcuugcuuagauguuccaaauuuaguaagcuuaaggcggccuacagaagaaaaagaaaaaaaaggccacaaaaguucccucucacuuucaguaaauaaaauaaaagcagcaacagaaauaaagaaauaaaugaaauucaaaaugaaauaaauauuguguugugcagcauuaaaaaaucaauaaaaauuaaaaaugagcaagaucuaaaaaaaaaaaaaaaaaaaaaaaaaaaaaaaaaaaaaaaaaaaaaaaaaaaaaaaaaaaaaaaaugcaucccccccccccccccccccccccccccccccaaaggcucuuuucagagccaccagaauu

SEQ ID NO: 11970 - RNA, 2297 nt, Artificial Sequence
  mRNA product Design f-4 comprising derived and/or modified sequence from HRSV(Memphis-37)__AIY60640.1__F0 (opt3)
gggagagucccgcagucggcguccagcggcucugcuuguucgugugugugucguugcaggccuuauucaagcuuaccauggagcugcccauccucaagaccaacgccauuacaacuauacuugcugcagugacgcugugcuucgccagcucccagaauaucaccgaagaguuuuaccaaucuacauguucagcggucaguaaaggcuauuugagcgcuuuaagaacugggugguacaccuccguuauuacaaucgaacugucuaacauuaaggagaauaaaugcaacggaaccgacgccaaggugaaacuaaucaagcaggaacucgauaaguauaaaaaugcaguaacugagcugcagcuucugaugcagucgaccccugccgcuaacaauagggcacggcgcgaguugccacgauucaugaacuacacacucaauaacacgaagaauaacaaugugacucugagcaaaaagcguaaaagaagguuucuggguuuccucuuaggcgucgggucagccauagcuaguggaaucgccguguccaagguucugcaccuugaaggcgaggugaacaagauuaaaaaugcguugcugucuaccaacaaggcagucgugagccuauccaacgguguaucaguucucacaaguaaagugcuggaccuuaagaauuauaucgauaaacaacuguugccgauugucaacaagcagagcuguucuaucuccaauauagaaacugugauugaguuucagcagaaaaacaaucggcuccuggagaucacccgcgaguucucagugaacgccggggucacaacccccguuagcacguacauguuaacuaauagugaacugcucucucuuauuaacgacaugccuaucacaaaugaucaaaagaagcugauguccaacaaugugcagaucguaagacagcagagcuauucgauuaugucuauaaucaaagaagagguguuggcuuacgucgugcaacuaccacuguacggaguuauugacacccccugcuggaagcuccauacuuccccucuguguacaaccaacacgaaagaaggcucaaauaucugccuuaccaggacagaucggggcugguauugugacaacgccgggagugugagcuuuuucccacaggcagagacuugcaagguccaguccaaucgcguguuuugugauaccaugaacucucugacauugcccagcgagguaaaccucugcaauauagacauuuucaacccuaaauacgauuguaagaucaugacuucaaagaccgacguuaguuccagcgugaucacaucucugggagcuauugucucaugcuaugguaaaaccaagugcacugccaguaauaaaaaccgaggcaucauuaagacguuuagcaaugggugugauuacguguccaacaaaggagucgacacagugucuguuggcaauaccuuauauuacgugaacaagcaagaagguaagucgcuguauguaaaaggggagccaauaaucaauuucuacgacccgcuagucuuucccagcgaugaguucgacgcguccauuucacaggugaacgaaaagaucaaucagagucucgccuucaucagaaaaucugaugaacugcuucacaacguuaaugugggaaagagcacuaccaacauuaugauaacaaccaucauuaucgucauuaucgugauauugcugcuccugaucgcaguaggccuuuuucuguacugcaaagcuagguccacuccugugacauugucaaaggaccagcucagcggcauuaauaacaucgccuucucuaacugaggacuagugaagggaacacccaaauuuaauucagccuuaagcacaauuaauuaagagugaaacguaauuguacaagcaguuggucacccaccauagggcaugaucaacaccgcaaccuuuccuuuuucccccagugauucugaaaaaccccucuucccuucagcuugcuuagauguuccaaauuuaguaagcuuaaggcggccuacagaagaaaaagaaaaaaaaggccacaaaaguucccucucacuuucaguaaauaaaauaaaagcagcaacagaaauaaagaaauaaaugaaauucaaaaugaaauaaauauuguguugugcagcauuaaaaaaucaauaaaaauuaaaaaugagcaagaucuaaaaaaaaaaaaaaaaaaaaaaaaaaaaaaaaaaaaaaaaaaaaaaaaaaaaaaaaaaaaaaaaugcaucccccccccccccccccccccccccccccccaaaggcucuuuucagagccaccagaauu

SEQ ID NO: 11971 - RNA, 2297 nt, Artificial Sequence
  mRNA product Design f-4 comprising derived and/or modified sequence from HRSV(Memphis-37)__AIY60640.1__F0 (opt4)
gggagagucccgcagucggcguccagcggcucugcuuguucgugugugugucguugcaggccuuauucaagcuuaccauggagcugcccauccugaagaccaacgccaucaccaccauccuggccgccgugacccugugcuucgccagcagccagaacaucaccgaggaguucuaccagagcaccugcagcgccgugagcaagggcuaccugagcgcccugagaaccggcugguacaccagcgugaucaccaucgagcugagcaacaucaaggagaacaagugcaacggcaccgacgccaaggugaagcugaucaagcaggagcuggacaaguacaagaacgccgugaccgagcugcagcugcugaugcagagcacccccgccgccaacaacagagccagaagagagcugcccagauucaugaacuacacccugaacaacaccaagaacaacaacgugacccugagcaagaagagaaagagaagauuccugggcuuccugcugggcgugggcagcgccaucgccagcggcaucgccgugagcaaggugcugcaccuggagggcgaggugaacaagaucaagaacgcccugcugagcaccaacaaggccguggugagccugagcaacggcgugagcgugcugaccagcaaggugcuggaccugaagaacuacaucgacaagcagcugcugcccaucgugaacaagcagagcugcagcaucagcaacaucgagaccgugaucgaguuccagcagaagaacaacagacugcuggagaucaccagagaguucagcgugaacgccggcgugaccacccccgugagcaccuacaugcugaccaacagcgagcugcugagccugaucaacgacaugcccaucaccaacgaccagaagaagcugaugagcaacaacgugcagaucgugagacagcagagcuacagcaucaugagcaucaucaaggaggaggugcuggccuacguggugcagcugccccuguacggcgugaucgacacccccugcuggaagcugcacaccagcccccugugcaccaccaacaccaaggagggcagcaacaucugccugaccagaaccgacagaggcugguacugcgacaacgccggcagcgugagcuucuucccccaggccgagaccugcaaggugcagagcaacagaguguucugcgacaccaugaacagccugacccugcccagcgaggugaaccugugcaacaucgacaucuucaaccccaaguacgacugcaagaucaugaccagcaagaccgacgugagcagcagcgugaucaccagccugggcgccaucgugagcugcuacggcaagaccaagugcaccgccagcaacaagaacagaggcaucaucaagaccuucagcaacggcugcgacuacgugagcaacaagggcguggacaccgugagcgugggcaacacccuguacuacgugaacaagcaggagggcaagagccuguacgugaagggcgagcccaucaucaacuucuacgacccccugguguuccccagcgacgaguucgacgccagcaucagccaggugaacgagaagaucaaccagagccuggccuucaucagaaagagcgacgagcugcugcacaacgugaacgugggcaagagcaccaccaacaucaugaucaccaccaucaucaucgugaucaucgugauccugcugcugcugaucgccgugggccuguuccuguacugcaaggccagaagcacccccgugacccugagcaaggaccagcugagcggcaucaacaacaucgccuucagcaacugaggacuagugaagggaacacccaaauuuaauucagccuuaagcacaauuaauuaagagugaaacguaauuguacaagcaguuggucacccaccauagggcaugaucaacaccgcaaccuuuccuuuuucccccagugauucugaaaaaccccucuucccuucagcuugcuuagauguuccaaauuuaguaagcuuaaggcggccuacagaagaaaaagaaaaaaaaggccacaaaaguucccucucacuuucaguaaauaaaauaaaagcagcaacagaaauaaagaaauaaaugaaauucaaaaugaaauaaauauuguguugugcagcauuaaaaaaucaauaaaaauuaaaaaugagcaagaucuaaaaaaaaaaaaaaaaaaaaaaaaaaaaaaaaaaaaaaaaaaaaaaaaaaaaaaaaaaaaaaaaugcaucccccccccccccccccccccccccccccccaaaggcucuuuucagagccaccagaauu

SEQ ID NO: 11972 - RNA, 2297 nt, Artificial Sequence
  mRNA product Design f-4 comprising derived and/or modified sequence from HRSV(Memphis-37)__AIY60640.1__F0 (opt5)
gggagagucccgcagucggcguccagcggcucugcuuguucgugugugugucguugcaggccuuauucaagcuuaccauggagcugcccauccucaagaccaacgccauuacaacgauccuggcugccgugacccuuugcuucgcgagcucccagaauauuacagaagaguuuuaccaaucuaccuguagcgcugucuccaaaggcuaucugucugcccucagaacagggugguacaccagcguuaucacaauugaacuguccaacaucaaggagaauaaaugcaacggaaccgacgccaaggugaaacuuaucaagcaggaacuggauaaguauaaaaaugcugugacggagcuccagcugcugaugcagucuaccccugccgcuaacaaucgggcccgcagagagcucccgcgguucaugaacuacacacugaauaacaccaagaauaacaaugucacacuuagcaaaaagcgcaaaagacgguuucugggcuuccuccugggggugggauccgcgauugccagcggcaucgcuguuucuaaggugcuucaccuggaaggggaggucaacaagauuaaaaaugcccuccuguccaccaacaaggcugugguuagccugucuaacggaguguccguccucacgagcaaagugcuggaccuuaagaauuauaucgauaaacaacugcuccccauugugaacaagcagucuuguuccaucagcaauauugaaacagucaucgaguuucagcagaaaaacaaucgccugcuugagaucaccagagaauuuuccguuaacgccggcgugacaaccccugugucuaccuacaugcugacaaauagcgagcuccugucccugauuaacgacaugcccaucacgaaugaucaaaagaagcucaugagcaacaauguccagauugugcggcagcagucuuauuccaucaugagcauuaucaaagaagagguucuggcguacgugguccaacuuccucuguacggcgugaucgacacccccugcuggaagcuccauacaucuccucuguguaccacaaacaccaaagaagggagcaauauuugccuuacgcgcacagauagaggaugguauugugacaacgccggcuccguuucuuucuucccgcaggcugagaccugcaaggugcagagcaaucgggucuuuugugauaccaugaacucccugacacuccccagcgaggugaaccugugcaauaucgacauuuucaacccuaaauacgauuguaagaucaugaccucuaagacagacgucuccagcucugugauuacgucccugggggccaucguuagcugcuauggaaaaaccaagugcacagcuuccaauaaaaaccgcggcaucauuaagaccuuuucuaaugggugugauuacgugagcaacaaaggagucgacacaguguccguuggcaauacccucuauuacgugaacaagcaagaaggcaagucucuguaugucaaaggggagcccaucauuaauuucuacgacccucuuguguuucccagcgaugaguucgacgccuccaucagccaggugaacgaaaagauuaaucagucucuggccuucaucagaaaauccgaugaacuccugcacaacguuaaugucggaaagagcacgaccaacauuaugaucacaaccaucauuaucgugauuaucgugauucugcuucuccugaucgcugucggccuguuucucuacugcaaagcgcggucuacaccggugacccuguccaaggaccagcuuagcgggaucaauaacauugccuucucuaacugaggacuagugaagggaacacccaaauuuaauucagccuuaagcacaauuaauuaagagugaaacguaauuguacaagcaguuggucacccaccauagggcaugaucaacaccgcaaccuuuccuuuuucccccagugauucugaaaaaccccucuucccuucagcuugcuuagauguuccaaauuuaguaagcuuaaggcggccuacagaagaaaaagaaaaaaaaggccacaaaaguucccucucacuuucaguaaauaaaauaaaagcagcaacagaaauaaagaaauaaaugaaauucaaaaugaaauaaauauuguguugugcagcauuaaaaaaucaauaaaaauuaaaaaugagcaagaucuaaaaaaaaaaaaaaaaaaaaaaaaaaaaaaaaaaaaaaaaaaaaaaaaaaaaaaaaaaaaaaaaugcaucccccccccccccccccccccccccccccccaaaggcucuuuucagagccaccagaauu

SEQ ID NO: 11973 - RNA, 2297 nt, Artificial Sequence
  mRNA product Design f-4 comprising derived and/or modified sequence from HRSV(Memphis-37)__AIY60640.1__F0 (opt6)
gggagagucccgcagucggcguccagcggcucugcuuguucgugugugugucguugcaggccuuauucaagcuuaccauggaacugccuauucuaaaaacaaaugccauaacaacaauucuugcagcaguaacauuauguuuugcaucaucacaaaacauuacagaagaauuuuaccaauccacuugcucagccguaucaaaaggauaccuaucagccuuaagaacagguugguacaccucaguaauaaccauagaacuaucaaacauaaaagaaaacaaaugcaaugguacugaugcaaaagucaaacuaaucaaacaagaacuggacaaauacaaaaaugcaguaaccgaacuacaacuccuaaugcaauccacaccugcagccaacaacagagcaagacgcgaacuaccaagauuuaugaauuacacauuaaacaacaccaagaacaacaauguaacucucucaaaaaaaagaaaaagacgcuuucuagguuuccuccuaggcgucggaucugcaauagccucaggaauagcaguaucaaaaguucuacaccuagaaggagaaguaaacaaaauuaaaaacgcauuacuaucaaccaacaaagcaguuguaucccuuucaaauggagucucuguacuuacaucaaaaguacucgaccuaaaaaacuauauagacaaacaacuacucccaauagucaauaagcaaucaugcagcauaucaaacauagaaacaguuauagaauuucaacaaaaaaacaacagacuacucgaaauaaccagagaauuuagcgucaacgcaggcguaaccacaccgguauccacauacaugcuuacaaacucagaacuccucucacuaauaaacgacaugccaauaacuaaugaccaaaaaaaacuaaugucaaacaauguccaaauaguccgucaacaaucauacucaauaaugucaauaauaaaagaagaaguauuagcauauguaguccaacuaccauuauacggcguuauagacacaccuuguuggaaacuucacacauccccacucuguacaaccaacacaaaagaagguuccaauauaugccuaacuagaaccgacagaggaugguauugcgacaacgcaggaucuguaucauucuuuccccaagcagaaacauguaaaguacaaaguaaccgcguauucugcgacaccaugaacucauuaacccucccauccgaaguuaauuuaugcaauauagacauauuuaauccuaaauacgacugcaaaauaaugacaucaaaaacagacguuaguuccuccguaaucacaucuuugggcgcaauagucucaugcuauggaaaaacaaaaugcacagccucaaacaaaaauagaggaauaauaaaaacauucagcaacggcugugauuauguauccaacaaaggaguagacacaguauccguaggcaauacccuuuacuacguuaauaaacaagaaggaaaaucauuauacgucaaaggagaaccuaucauaaauuucuacgacccauuaguauucccuucagacgaauuugaugccucaauaucccaagucaaugaaaaaaucaaccaaucacuagccuuuauccgcaaaucagacgaauuacuacacaacguaaacguaggcaaaucaacaacuaauauaaugauaacaacaauaauaauaguaauuauaguaauauuauuacuacuaaucgccguagguuuauucuuauacuguaaagcacgaucaacaccaguuacacucucaaaagaucaacuaucaggaauaaacaacauagcauuuuccaauuaaggacuagugaagggaacacccaaauuuaauucagccuuaagcacaauuaauuaagagugaaacguaauuguacaagcaguuggucacccaccauagggcaugaucaacaccgcaaccuuuccuuuuucccccagugauucugaaaaaccccucuucccuucagcuugcuuagauguuccaaauuuaguaagcuuaaggcggccuacagaagaaaaagaaaaaaaaggccacaaaaguucccucucacuuucaguaaauaaaauaaaagcagcaacagaaauaaagaaauaaaugaaauucaaaaugaaauaaauauuguguugugcagcauuaaaaaaucaauaaaaauuaaaaaugagcaagaucuaaaaaaaaaaaaaaaaaaaaaaaaaaaaaaaaaaaaaaaaaaaaaaaaaaaaaaaaaaaaaaaaugcaucccccccccccccccccccccccccccccccaaaggcucuuuucagagccaccagaauu

SEQ ID NO: 11974 - RNA, 2297 nt, Artificial Sequence
  mRNA product Design f-4 comprising derived and/or modified sequence from HRSV(Memphis-37)__AIY60640.1__F0 (opt11)
gggagagucccgcagucggcguccagcggcucugcuuguucgugugugugucguugcaggccuuauucaagcuuaccauggaacuccccauccucaaaacaaacgccauaaccacuauccucgccgccgucacccucugcuucgccuccucccaaaacaucacagaggaguucuaccaauccacaugcuccgccgucuccaaaggcuaccucagcgcccuacguaccggcugguacaccagcgucaucacaauagaacucuccaacaucaaggaaaacaaaugcaacggcaccgaugccaaaguaaaacucaucaaacaagaacucgauaaauacaaaaacgccgucaccgaacuacaacuccuaaugcaaagcacacccgccgccaacaacagagcacggcgcgaacugccccgcuucaugaacuacacccucaacaacaccaaaaauaacaacgucacccuauccaagaaacgcaaacgccgauuccucgguuuccuacucggcguaggaagcgccauagccucaggcaucgccgucuccaaaguccuccaucuggaaggcgaagucaacaaaaucaaaaacgcacucuuauccaccaacaaagccgucgucucccucucgaacggggucuccguccuuaccuccaaaguccucgaccuuaaaaacuacaucgacaaacaacuacuaccaauagucaauaaacaauccugcuccaucucaaacauagaaaccgucauagaguuccaacagaagaacaaucgccuccucgaaauaacucgcgaguucuccgucaacgcaggcgucacgaccccugucucaacauacaugcuaacuaacucagaacuccuaagccuaaucaacgacaugcccaucacaaacgaccaaaagaaacucaugagcaacaauguccagauagucagacagcaauccuauagcaucaugucuauaauaaaagaagaagugcucgccuacguaguccaacucccucuuuacggcgucauagacacacccugcuggaaacuccacacaucuccucucugcaccaccaacacaaaagaaggcagcaacaucugccugacccgaaccgaccgcggaugguacugcgacaacgcuggcuccgugucuuucuuuccccaagccgaaaccugcaaaguccaguccaaccgcgucuucugcgacacaaugaacucccucacccuacccuccgaaguuaaccucugcaacaucgacaucuucaauccaaaauacgacugcaaaaucaugaccucgaaaacggacguauccuccuccgucauaacaucacuuggagccaucguuagcugcuacggaaaaaccaaauguaccgccuccaacaaaaaccgcggaauaaucaaaacauucuccaacggcugcgacuacguaagcaacaaaggggucgauacugucuccguagguaacacccuauacuacgucaacaaacaagaaggaaaaucacuauacguuaaaggcgaacccauuaucaacuucuacgacccccucguuuucccauccgacgaguucgacgccuccauaagccaaguuaacgaaaagauaaaccaaucgcucgcauucauccgcaaauccgacgaacuccuacacaacgucaacgugggcaaauccacaacaaacaucaugaucaccaccaucauuaucgucauaauagucauccuccuccugcucaucgccgugggacuauuccuauacugcaaagcccgcucgacgcccgucacacuuuccaaagaccaacuaagcggaaucaacaacauagcguucagcaauuaaggacuagugaagggaacacccaaauuuaauucagccuuaagcacaauuaauuaagagugaaacguaauuguacaagcaguuggucacccaccauagggcaugaucaacaccgcaaccuuuccuuuuucccccagugauucugaaaaaccccucuucccuucagcuugcuuagauguuccaaauuuaguaagcuuaaggcggccuacagaagaaaaagaaaaaaaaggccacaaaaguucccucucacuuucaguaaauaaaauaaaagcagcaacagaaauaaagaaauaaaugaaauucaaaaugaaauaaauauuguguugugcagcauuaaaaaaucaauaaaaauuaaaaaugagcaagaucuaaaaaaaaaaaaaaaaaaaaaaaaaaaaaaaaaaaaaaaaaaaaaaaaaaaaaaaaaaaaaaaaugcaucccccccccccccccccccccccccccccccaaaggcucuuuucagagccaccagaauu

SEQ ID NO: 11975 - RNA, 2073 nt, Artificial Sequence
  mRNA product Design f-5 comprising derived and/or modified sequence from HRSV(Memphis-37)__AIY60640.1__F0 (wt)
gggagacuuucccauucuguagcagaauuugguguugccuguggucuuggucccgcggagaagcuuaccauggaguugccaauccucaaaacaaaugcaauuaccacaauccuugcugcagucacacucuguuucgcuuccagucaaaacaucacugaagaauuuuaucaaucaacaugcagugcaguuagcaaaggcuaucuuagugcuuuaagaacugguugguauacuaguguuauaacuauagaauuaaguaauaucaaggaaaauaaguguaauggaacagaugcuaagguaaaauugauaaaacaagaauuagauaaauauaaaaaugcuguaacagaauugcaguugcucaugcaaagcacaccagcagccaacaaucgagccagaagagaacuaccaagguuuaugaauuauacacucaacaauaccaaaaauaacaauguaacauuaagcaagaaaaggaaaagaagauuucuuggcuuuuuguuagguguuggaucugcaaucgccaguggcauugcuguaucuaaaguccugcaccuagaaggggaagugaacaaaaucaaaaaugcucuacuauccacaaacaaggcuguagucagcuuaucaaauggaguuagugucuuaaccagcaaaguguuagaccucaaaaacuauauagauaaacaguuguuacccauugugaacaagcaaagcugcagcauaucaaacauugaaacugugauagaauuccaacaaaagaacaacagacuacuagagauuaccagggaauuuaguguuaaugcagguguaacuacaccuguaagcacuuauauguuaacaaauagugaauuauuaucauuaaucaaugauaugccuauaacaaaugaucagaaaaaguuaauguccaacaauguucaaauaguuagacagcaaaguuacucuaucauguccauaauaaaggaggaagucuuagcauauguaguucaauuaccacuauaugguguaauagauacaccuuguuggaaacuacacacauccccucuaugcacaaccaacacaaaggaaggguccaacaucuguuuaacaagaaccgacagaggaugguacugugacaaugcaggaucagugucuuucuucccacaagcugaaacaugcaaaguucaaucgaaucgaguauuuugugacacaaugaacagucuaacauuaccaagugaaguaaaucucugcaacauugacauauucaacccuaaauaugauugcaaaauuaugacuucaaaaacagaugugagcagcuccguuaucacaucucuaggagccauugugucaugcuauggcaaaacuaaauguacagcauccaauaaaaaucguggaaucauaaagacauuuucuaacgggugugauuauguaucaaauaaggggguggacacuguaucuguagguaauacauuauauuauguaaauaagcaagaaggaaaaagccucuauguaaaaggugaaccaauaauaaauuucuaugacccauuaguguucccuucugaugaauuugaugcaucaauaucucaagucaaugagaagauuaaccagagccuagcauuuauucguaaauccgaugaauuauuacauaauguaaauguugguaaauccaccacaaauaucaugauaacuacuauaauuauagugauuauaguaauauuguuauuauuaauugcaguugggcuguuccuauacugcaaggccagaagcacaccagucacacuaagcaaggaucaacugagugguauaaauaauauugcauuuaguaacugaggacuaguacuggcugcaucucccuuuccucuguccuccauccuucucccaggauggugaagggggaccugguacccagugauccccaccccaggauccuaaaucaugacuuaccugcuaauaaaaacucauuggaaaagugagaagaucuaaaaaaaaaaaaaaaaaaaaaaaaaaaaaaaaaaaaaaaaaaaaaaaaaaaaaaaaaaaaaaaaugcaucccccccccccccccccccccccccccccccaaaggcucuuuucagagccaccagaauu

SEQ ID NO: 11976 - RNA, 2073 nt, Artificial Sequence
  mRNA product Design f-5 comprising derived and/or modified sequence from HRSV(Memphis-37)__AIY60640.1__F0 (opt1)
gggagacuuucccauucuguagcagaauuugguguugccuguggucuuggucccgcggagaagcuuaccauggagcugcccauccucaagaccaacgccaucaccacgauccuggccgcggugacccugugcuucgccagcucccagaacaucaccgaggaguucuaccagagcacgugcuccgccgucagcaagggcuaccucuccgcccugcgcaccgggugguacaccagcgugaucaccaucgagcuguccaacaucaaggagaacaagugcaacggcaccgacgccaaggugaagcucaucaagcaggagcuggacaaguacaagaacgcggucacggagcugcagcuccugaugcagagcaccccggccgccaacaaccgggcccgccgggagcugccccgcuucaugaacuacacccucaacaacaccaagaacaacaacgugacgcuguccaagaagcggaagcgccgguuccugggguuccuccugggcguggggagcgcgaucgccuccggcaucgccgucagcaaggugcugcaccucgagggcgaggugaacaagaucaagaacgcccugcuguccaccaacaaggccgucgugagccucuccaacggggugagcguccugaccuccaaggugcuggaccucaagaacuacaucgacaagcagcugcugcccaucgugaacaagcagagcugcuccaucagcaacaucgagaccgucaucgaguuccagcagaagaacaaccgccuccuggagaucacgcgggaguucagcgugaacgcgggcgugaccacccccgucuccaccuacaugcugacgaacagcgagcuccugucccugaucaacgacaugccgaucaccaacgaccagaagaagcucaugagcaacaacgugcagaucgugcgccagcaguccuacagcaucauguccaucaucaaggaggagguccuggccuacguggugcagcugccccucuacggggucaucgacacccccugcuggaagcugcacaccagcccccugugcacgaccaacaccaaggagggcuccaacaucugccucacccggacggaccgcgggugguacugcgacaacgccggcagcguguccuucuucccgcaggccgagaccugcaagguccagagcaaccggguguucugcgacaccaugaacucccugacccugcccagcgaggugaaccucugcaacaucgacaucuucaaccccaaguacgacugcaagaucaugacguccaagaccgacgucagcuccagcgugaucaccucccugggcgccaucgugagcugcuacgggaagaccaagugcacggcgagcaacaagaaccgcggcaucaucaagaccuucuccaacgggugcgacuacgucagcaacaagggcguggacaccguguccgucggcaacacccuguacuacgugaacaagcaggagggcaagagccucuacgugaagggggagcccaucaucaacuucuacgacccgcuggucuuccccuccgacgaguucgacgccagcaucucccaggugaacgagaagaucaaccagagccuggccuucauccggaaguccgacgagcuccugcacaacgugaacgucggcaagagcaccacgaacaucaugaucaccaccaucaucaucgugaucaucgugauccugcugcuccugaucgccgucgggcuguuccucuacugcaaggcccgcuccacccccgugacgcugagcaaggaccagcuguccgggaucaacaacaucgcguucagcaacugaggacuaguacuggcugcaucucccuuuccucuguccuccauccuucucccaggauggugaagggggaccugguacccagugauccccaccccaggauccuaaaucaugacuuaccugcuaauaaaaacucauuggaaaagugagaagaucuaaaaaaaaaaaaaaaaaaaaaaaaaaaaaaaaaaaaaaaaaaaaaaaaaaaaaaaaaaaaaaaaugcaucccccccccccccccccccccccccccccccaaaggcucuuuucagagccaccagaauu

SEQ ID NO: 11977 - RNA, 2073 nt, Artificial Sequence
  mRNA product Design f-5 comprising derived and/or modified sequence from HRSV(Memphis-37)__AIY60640.1__F0 (opt2)
gggagacuuucccauucuguagcagaauuugguguugccuguggucuuggucccgcggagaagcuuaccauggagcuccccauccucaagaccaacgccaucaccaccauccucgccgccgucacccucugcuucgccuccucccagaacaucaccgaggaguucuaccaguccaccugcuccgccgucuccaagggcuaccucuccgcccuccgcaccggcugguacaccuccgucaucaccaucgagcucuccaacaucaaggagaacaagugcaacggcaccgacgccaaggucaagcucaucaagcaggagcucgacaaguacaagaacgccgucaccgagcuccagcuccucaugcaguccacccccgccgccaacaaccgcgcccgccgcgagcucccccgcuucaugaacuacacccucaacaacaccaagaacaacaacgucacccucuccaagaagcgcaagcgccgcuuccucggcuuccuccucggcgucggcuccgccaucgccuccggcaucgccgucuccaagguccuccaccucgagggcgaggucaacaagaucaagaacgcccuccucuccaccaacaaggccgucgucucccucuccaacggcgucuccguccucaccuccaagguccucgaccucaagaacuacaucgacaagcagcuccuccccaucgucaacaagcaguccugcuccaucuccaacaucgagaccgucaucgaguuccagcagaagaacaaccgccuccucgagaucacccgcgaguucuccgucaacgccggcgucaccacccccgucuccaccuacaugcucaccaacuccgagcuccucucccucaucaacgacaugcccaucaccaacgaccagaagaagcucauguccaacaacguccagaucguccgccagcaguccuacuccaucauguccaucaucaaggaggagguccucgccuacgucguccagcucccccucuacggcgucaucgacacccccugcuggaagcuccacaccuccccccucugcaccaccaacaccaaggagggcuccaacaucugccucacccgcaccgaccgcggcugguacugcgacaacgccggcuccgucuccuucuucccccaggccgagaccugcaagguccaguccaaccgcgucuucugcgacaccaugaacucccucacccuccccuccgaggucaaccucugcaacaucgacaucuucaaccccaaguacgacugcaagaucaugaccuccaagaccgacgucuccuccuccgucaucaccucccucggcgccaucgucuccugcuacggcaagaccaagugcaccgccuccaacaagaaccgcggcaucaucaagaccuucuccaacggcugcgacuacgucuccaacaagggcgucgacaccgucuccgucggcaacacccucuacuacgucaacaagcaggagggcaagucccucuacgucaagggcgagcccaucaucaacuucuacgacccccucgucuuccccuccgacgaguucgacgccuccaucucccaggucaacgagaagaucaaccagucccucgccuucauccgcaaguccgacgagcuccuccacaacgucaacgucggcaaguccaccaccaacaucaugaucaccaccaucaucaucgucaucaucgucauccuccuccuccucaucgccgucggccucuuccucuacugcaaggcccgcuccacccccgucacccucuccaaggaccagcucuccggcaucaacaacaucgccuucuccaacugaggacuaguacuggcugcaucucccuuuccucuguccuccauccuucucccaggauggugaagggggaccugguacccagugauccccaccccaggauccuaaaucaugacuuaccugcuaauaaaaacucauuggaaaagugagaagaucuaaaaaaaaaaaaaaaaaaaaaaaaaaaaaaaaaaaaaaaaaaaaaaaaaaaaaaaaaaaaaaaaugcaucccccccccccccccccccccccccccccccaaaggcucuuuucagagccaccagaauu

SEQ ID NO: 11978 - RNA, 2073 nt, Artificial Sequence
  mRNA product Design f-5 comprising derived and/or modified sequence from HRSV(Memphis-37)__AIY60640.1__F0 (opt3)
gggagacuuucccauucuguagcagaauuugguguugccuguggucuuggucccgcggagaagcuuaccauggagcugcccauccucaagaccaacgccauuacaacuauacuugcugcagugacgcugugcuucgccagcucccagaauaucaccgaagaguuuuaccaaucuacauguucagcggucaguaaaggcuauuugagcgcuuuaagaacugggugguacaccuccguuauuacaaucgaacugucuaacauuaaggagaauaaaugcaacggaaccgacgccaaggugaaacuaaucaagcaggaacucgauaaguauaaaaaugcaguaacugagcugcagcuucugaugcagucgaccccugccgcuaacaauagggcacggcgcgaguugccacgauucaugaacuacacacucaauaacacgaagaauaacaaugugacucugagcaaaaagcguaaaagaagguuucuggguuuccucuuaggcgucgggucagccauagcuaguggaaucgccguguccaagguucugcaccuugaaggcgaggugaacaagauuaaaaaugcguugcugucuaccaacaaggcagucgugagccuauccaacgguguaucaguucucacaaguaaagugcuggaccuuaagaauuauaucgauaaacaacuguugccgauugucaacaagcagagcuguucuaucuccaauauagaaacugugauugaguuucagcagaaaaacaaucggcuccuggagaucacccgcgaguucucagugaacgccggggucacaacccccguuagcacguacauguuaacuaauagugaacugcucucucuuauuaacgacaugccuaucacaaaugaucaaaagaagcugauguccaacaaugugcagaucguaagacagcagagcuauucgauuaugucuauaaucaaagaagagguguuggcuuacgucgugcaacuaccacuguacggaguuauugacacccccugcuggaagcuccauacuuccccucuguguacaaccaacacgaaagaaggcucaaauaucugccuuaccaggacagaucggggcugguauugugacaacgccgggagugugagcuuuuucccacaggcagagacuugcaagguccaguccaaucgcguguuuugugauaccaugaacucucugacauugcccagcgagguaaaccucugcaauauagacauuuucaacccuaaauacgauuguaagaucaugacuucaaagaccgacguuaguuccagcgugaucacaucucugggagcuauugucucaugcuaugguaaaaccaagugcacugccaguaauaaaaaccgaggcaucauuaagacguuuagcaaugggugugauuacguguccaacaaaggagucgacacagugucuguuggcaauaccuuauauuacgugaacaagcaagaagguaagucgcuguauguaaaaggggagccaauaaucaauuucuacgacccgcuagucuuucccagcgaugaguucgacgcguccauuucacaggugaacgaaaagaucaaucagagucucgccuucaucagaaaaucugaugaacugcuucacaacguuaaugugggaaagagcacuaccaacauuaugauaacaaccaucauuaucgucauuaucgugauauugcugcuccugaucgcaguaggccuuuuucuguacugcaaagcuagguccacuccugugacauugucaaaggaccagcucagcggcauuaauaacaucgccuucucuaacugaggacuaguacuggcugcaucucccuuuccucuguccuccauccuucucccaggauggugaagggggaccugguacccagugauccccaccccaggauccuaaaucaugacuuaccugcuaauaaaaacucauuggaaaagugagaagaucuaaaaaaaaaaaaaaaaaaaaaaaaaaaaaaaaaaaaaaaaaaaaaaaaaaaaaaaaaaaaaaaaugcaucccccccccccccccccccccccccccccccaaaggcucuuuucagagccaccagaauu

SEQ ID NO: 11979 - RNA, 2073 nt, Artificial Sequence
  mRNA product Design f-5 comprising derived and/or modified sequence from HRSV(Memphis-37)__AIY60640.1__F0 (opt4)
gggagacuuucccauucuguagcagaauuugguguugccuguggucuuggucccgcggagaagcuuaccauggagcugcccauccugaagaccaacgccaucaccaccauccuggccgccgugacccugugcuucgccagcagccagaacaucaccgaggaguucuaccagagcaccugcagcgccgugagcaagggcuaccugagcgcccugagaaccggcugguacaccagcgugaucaccaucgagcugagcaacaucaaggagaacaagugcaacggcaccgacgccaaggugaagcugaucaagcaggagcuggacaaguacaagaacgccgugaccgagcugcagcugcugaugcagagcacccccgccgccaacaacagagccagaagagagcugcccagauucaugaacuacacccugaacaacaccaagaacaacaacgugacccugagcaagaagagaaagagaagauuccugggcuuccugcugggcgugggcagcgccaucgccagcggcaucgccgugagcaaggugcugcaccuggagggcgaggugaacaagaucaagaacgcccugcugagcaccaacaaggccguggugagccugagcaacggcgugagcgugcugaccagcaaggugcuggaccugaagaacuacaucgacaagcagcugcugcccaucgugaacaagcagagcugcagcaucagcaacaucgagaccgugaucgaguuccagcagaagaacaacagacugcuggagaucaccagagaguucagcgugaacgccggcgugaccacccccgugagcaccuacaugcugaccaacagcgagcugcugagccugaucaacgacaugcccaucaccaacgaccagaagaagcugaugagcaacaacgugcagaucgugagacagcagagcuacagcaucaugagcaucaucaaggaggaggugcuggccuacguggugcagcugccccuguacggcgugaucgacacccccugcuggaagcugcacaccagcccccugugcaccaccaacaccaaggagggcagcaacaucugccugaccagaaccgacagaggcugguacugcgacaacgccggcagcgugagcuucuucccccaggccgagaccugcaaggugcagagcaacagaguguucugcgacaccaugaacagccugacccugcccagcgaggugaaccugugcaacaucgacaucuucaaccccaaguacgacugcaagaucaugaccagcaagaccgacgugagcagcagcgugaucaccagccugggcgccaucgugagcugcuacggcaagaccaagugcaccgccagcaacaagaacagaggcaucaucaagaccuucagcaacggcugcgacuacgugagcaacaagggcguggacaccgugagcgugggcaacacccuguacuacgugaacaagcaggagggcaagagccuguacgugaagggcgagcccaucaucaacuucuacgacccccugguguuccccagcgacgaguucgacgccagcaucagccaggugaacgagaagaucaaccagagccuggccuucaucagaaagagcgacgagcugcugcacaacgugaacgugggcaagagcaccaccaacaucaugaucaccaccaucaucaucgugaucaucgugauccugcugcugcugaucgccgugggccuguuccuguacugcaaggccagaagcacccccgugacccugagcaaggaccagcugagcggcaucaacaacaucgccuucagcaacugaggacuaguacuggcugcaucucccuuuccucuguccuccauccuucucccaggauggugaagggggaccugguacccagugauccccaccccaggauccuaaaucaugacuuaccugcuaauaaaaacucauuggaaaagugagaagaucuaaaaaaaaaaaaaaaaaaaaaaaaaaaaaaaaaaaaaaaaaaaaaaaaaaaaaaaaaaaaaaaaugcaucccccccccccccccccccccccccccccccaaaggcucuuuucagagccaccagaauu

SEQ ID NO: 11980 - RNA, 2073 nt, Artificial Sequence
  mRNA product Design f-5 comprising derived and/or modified sequence from HRSV(Memphis-37)__AIY60640.1__F0 (opt5)
gggagacuuucccauucuguagcagaauuugguguugccuguggucuuggucccgcggagaagcuuaccauggagcugcccauccucaagaccaacgccauuacaacgauccuggcugccgugacccuuugcuucgcgagcucccagaauauuacagaagaguuuuaccaaucuaccuguagcgcugucuccaaaggcuaucugucugcccucagaacagggugguacaccagcguuaucacaauugaacuguccaacaucaaggagaauaaaugcaacggaaccgacgccaaggugaaacuuaucaagcaggaacuggauaaguauaaaaaugcugugacggagcuccagcugcugaugcagucuaccccugccgcuaacaaucgggcccgcagagagcucccgcgguucaugaacuacacacugaauaacaccaagaauaacaaugucacacuuagcaaaaagcgcaaaagacgguuucugggcuuccuccugggggugggauccgcgauugccagcggcaucgcuguuucuaaggugcuucaccuggaaggggaggucaacaagauuaaaaaugcccuccuguccaccaacaaggcugugguuagccugucuaacggaguguccguccucacgagcaaagugcuggaccuuaagaauuauaucgauaaacaacugcuccccauugugaacaagcagucuuguuccaucagcaauauugaaacagucaucgaguuucagcagaaaaacaaucgccugcuugagaucaccagagaauuuuccguuaacgccggcgugacaaccccugugucuaccuacaugcugacaaauagcgagcuccugucccugauuaacgacaugcccaucacgaaugaucaaaagaagcucaugagcaacaauguccagauugugcggcagcagucuuauuccaucaugagcauuaucaaagaagagguucuggcguacgugguccaacuuccucuguacggcgugaucgacacccccugcuggaagcuccauacaucuccucuguguaccacaaacaccaaagaagggagcaauauuugccuuacgcgcacagauagaggaugguauugugacaacgccggcuccguuucuuucuucccgcaggcugagaccugcaaggugcagagcaaucgggucuuuugugauaccaugaacucccugacacuccccagcgaggugaaccugugcaauaucgacauuuucaacccuaaauacgauuguaagaucaugaccucuaagacagacgucuccagcucugugauuacgucccugggggccaucguuagcugcuauggaaaaaccaagugcacagcuuccaauaaaaaccgcggcaucauuaagaccuuuucuaaugggugugauuacgugagcaacaaaggagucgacacaguguccguuggcaauacccucuauuacgugaacaagcaagaaggcaagucucuguaugucaaaggggagcccaucauuaauuucuacgacccucuuguguuucccagcgaugaguucgacgccuccaucagccaggugaacgaaaagauuaaucagucucuggccuucaucagaaaauccgaugaacuccugcacaacguuaaugucggaaagagcacgaccaacauuaugaucacaaccaucauuaucgugauuaucgugauucugcuucuccugaucgcugucggccuguuucucuacugcaaagcgcggucuacaccggugacccuguccaaggaccagcuuagcgggaucaauaacauugccuucucuaacugaggacuaguacuggcugcaucucccuuuccucuguccuccauccuucucccaggauggugaagggggaccugguacccagugauccccaccccaggauccuaaaucaugacuuaccugcuaauaaaaacucauuggaaaagugagaagaucuaaaaaaaaaaaaaaaaaaaaaaaaaaaaaaaaaaaaaaaaaaaaaaaaaaaaaaaaaaaaaaaaugcaucccccccccccccccccccccccccccccccaaaggcucuuuucagagccaccagaauu

SEQ ID NO: 11981 - RNA, 2073 nt, Artificial Sequence
  mRNA product Design f-5 comprising derived and/or modified sequence from HRSV(Memphis-37)__AIY60640.1__F0 (opt6)
gggagacuuucccauucuguagcagaauuugguguugccuguggucuuggucccgcggagaagcuuaccauggaacugccuauucuaaaaacaaaugccauaacaacaauucuugcagcaguaacauuauguuuugcaucaucacaaaacauuacagaagaauuuuaccaauccacuugcucagccguaucaaaaggauaccuaucagccuuaagaacagguugguacaccucaguaauaaccauagaacuaucaaacauaaaagaaaacaaaugcaaugguacugaugcaaaagucaaacuaaucaaacaagaacuggacaaauacaaaaaugcaguaaccgaacuacaacuccuaaugcaauccacaccugcagccaacaacagagcaagacgcgaacuaccaagauuuaugaauuacacauuaaacaacaccaagaacaacaauguaacucucucaaaaaaaagaaaaagacgcuuucuagguuuccuccuaggcgucggaucugcaauagccucaggaauagcaguaucaaaaguucuacaccuagaaggagaaguaaacaaaauuaaaaacgcauuacuaucaaccaacaaagcaguuguaucccuuucaaauggagucucuguacuuacaucaaaaguacucgaccuaaaaaacuauauagacaaacaacuacucccaauagucaauaagcaaucaugcagcauaucaaacauagaaacaguuauagaauuucaacaaaaaaacaacagacuacucgaaauaaccagagaauuuagcgucaacgcaggcguaaccacaccgguauccacauacaugcuuacaaacucagaacuccucucacuaauaaacgacaugccaauaacuaaugaccaaaaaaaacuaaugucaaacaauguccaaauaguccgucaacaaucauacucaauaaugucaauaauaaaagaagaaguauuagcauauguaguccaacuaccauuauacggcguuauagacacaccuuguuggaaacuucacacauccccacucuguacaaccaacacaaaagaagguuccaauauaugccuaacuagaaccgacagaggaugguauugcgacaacgcaggaucuguaucauucuuuccccaagcagaaacauguaaaguacaaaguaaccgcguauucugcgacaccaugaacucauuaacccucccauccgaaguuaauuuaugcaauauagacauauuuaauccuaaauacgacugcaaaauaaugacaucaaaaacagacguuaguuccuccguaaucacaucuuugggcgcaauagucucaugcuauggaaaaacaaaaugcacagccucaaacaaaaauagaggaauaauaaaaacauucagcaacggcugugauuauguauccaacaaaggaguagacacaguauccguaggcaauacccuuuacuacguuaauaaacaagaaggaaaaucauuauacgucaaaggagaaccuaucauaaauuucuacgacccauuaguauucccuucagacgaauuugaugccucaauaucccaagucaaugaaaaaaucaaccaaucacuagccuuuauccgcaaaucagacgaauuacuacacaacguaaacguaggcaaaucaacaacuaauauaaugauaacaacaauaauaauaguaauuauaguaauauuauuacuacuaaucgccguagguuuauucuuauacuguaaagcacgaucaacaccaguuacacucucaaaagaucaacuaucaggaauaaacaacauagcauuuuccaauuaaggacuaguacuggcugcaucucccuuuccucuguccuccauccuucucccaggauggugaagggggaccugguacccagugauccccaccccaggauccuaaaucaugacuuaccugcuaauaaaaacucauuggaaaagugagaagaucuaaaaaaaaaaaaaaaaaaaaaaaaaaaaaaaaaaaaaaaaaaaaaaaaaaaaaaaaaaaaaaaaugcaucccccccccccccccccccccccccccccccaaaggcucuuuucagagccaccagaauu

SEQ ID NO: 11982 - RNA, 2073 nt, Artificial Sequence
  mRNA product Design f-5 comprising derived and/or modified sequence from HRSV(Memphis-37)__AIY60640.1__F0 (opt11)
gggagacuuucccauucuguagcagaauuugguguugccuguggucuuggucccgcggagaagcuuaccauggaacuccccauccucaaaacaaacgccauaaccacuauccucgccgccgucacccucugcuucgccuccucccaaaacaucacagaggaguucuaccaauccacaugcuccgccgucuccaaaggcuaccucagcgcccuacguaccggcugguacaccagcgucaucacaauagaacucuccaacaucaaggaaaacaaaugcaacggcaccgaugccaaaguaaaacucaucaaacaagaacucgauaaauacaaaaacgccgucaccgaacuacaacuccuaaugcaaagcacacccgccgccaacaacagagcacggcgcgaacugccccgcuucaugaacuacacccucaacaacaccaaaaauaacaacgucacccuauccaagaaacgcaaacgccgauuccucgguuuccuacucggcguaggaagcgccauagccucaggcaucgccgucuccaaaguccuccaucuggaaggcgaagucaacaaaaucaaaaacgcacucuuauccaccaacaaagccgucgucucccucucgaacggggucuccguccuuaccuccaaaguccucgaccuuaaaaacuacaucgacaaacaacuacuaccaauagucaauaaacaauccugcuccaucucaaacauagaaaccgucauagaguuccaacagaagaacaaucgccuccucgaaauaacucgcgaguucuccgucaacgcaggcgucacgaccccugucucaacauacaugcuaacuaacucagaacuccuaagccuaaucaacgacaugcccaucacaaacgaccaaaagaaacucaugagcaacaauguccagauagucagacagcaauccuauagcaucaugucuauaauaaaagaagaagugcucgccuacguaguccaacucccucuuuacggcgucauagacacacccugcuggaaacuccacacaucuccucucugcaccaccaacacaaaagaaggcagcaacaucugccugacccgaaccgaccgcggaugguacugcgacaacgcuggcuccgugucuuucuuuccccaagccgaaaccugcaaaguccaguccaaccgcgucuucugcgacacaaugaacucccucacccuacccuccgaaguuaaccucugcaacaucgacaucuucaauccaaaauacgacugcaaaaucaugaccucgaaaacggacguauccuccuccgucauaacaucacuuggagccaucguuagcugcuacggaaaaaccaaauguaccgccuccaacaaaaaccgcggaauaaucaaaacauucuccaacggcugcgacuacguaagcaacaaaggggucgauacugucuccguagguaacacccuauacuacgucaacaaacaagaaggaaaaucacuauacguuaaaggcgaacccauuaucaacuucuacgacccccucguuuucccauccgacgaguucgacgccuccauaagccaaguuaacgaaaagauaaaccaaucgcucgcauucauccgcaaauccgacgaacuccuacacaacgucaacgugggcaaauccacaacaaacaucaugaucaccaccaucauuaucgucauaauagucauccuccuccugcucaucgccgugggacuauuccuauacugcaaagcccgcucgacgcccgucacacuuuccaaagaccaacuaagcggaaucaacaacauagcguucagcaauuaaggacuaguacuggcugcaucucccuuuccucuguccuccauccuucucccaggauggugaagggggaccugguacccagugauccccaccccaggauccuaaaucaugacuuaccugcuaauaaaaacucauuggaaaagugagaagaucuaaaaaaaaaaaaaaaaaaaaaaaaaaaaaaaaaaaaaaaaaaaaaaaaaaaaaaaaaaaaaaaaugcaucccccccccccccccccccccccccccccccaaaggcucuuuucagagccaccagaauu

SEQ ID NO: 11983 - RNA, 2069 nt, Artificial Sequence
  mRNA product Design g-1 comprising derived and/or modified sequence from HRSV(Memphis-37)__AIY60640.1__F0 (wt)
gggagacuuucccauucuguagcagaauuugguguugccuguggucuuggucccgcggagaagcuuaccauggaguugccaauccucaaaacaaaugcaauuaccacaauccuugcugcagucacacucuguuucgcuuccagucaaaacaucacugaagaauuuuaucaaucaacaugcagugcaguuagcaaaggcuaucuuagugcuuuaagaacugguugguauacuaguguuauaacuauagaauuaaguaauaucaaggaaaauaaguguaauggaacagaugcuaagguaaaauugauaaaacaagaauuagauaaauauaaaaaugcuguaacagaauugcaguugcucaugcaaagcacaccagcagccaacaaucgagccagaagagaacuaccaagguuuaugaauuauacacucaacaauaccaaaaauaacaauguaacauuaagcaagaaaaggaaaagaagauuucuuggcuuuuuguuagguguuggaucugcaaucgccaguggcauugcuguaucuaaaguccugcaccuagaaggggaagugaacaaaaucaaaaaugcucuacuauccacaaacaaggcuguagucagcuuaucaaauggaguuagugucuuaaccagcaaaguguuagaccucaaaaacuauauagauaaacaguuguuacccauugugaacaagcaaagcugcagcauaucaaacauugaaacugugauagaauuccaacaaaagaacaacagacuacuagagauuaccagggaauuuaguguuaaugcagguguaacuacaccuguaagcacuuauauguuaacaaauagugaauuauuaucauuaaucaaugauaugccuauaacaaaugaucagaaaaaguuaauguccaacaauguucaaauaguuagacagcaaaguuacucuaucauguccauaauaaaggaggaagucuuagcauauguaguucaauuaccacuauaugguguaauagauacaccuuguuggaaacuacacacauccccucuaugcacaaccaacacaaaggaaggguccaacaucuguuuaacaagaaccgacagaggaugguacugugacaaugcaggaucagugucuuucuucccacaagcugaaacaugcaaaguucaaucgaaucgaguauuuugugacacaaugaacagucuaacauuaccaagugaaguaaaucucugcaacauugacauauucaacccuaaauaugauugcaaaauuaugacuucaaaaacagaugugagcagcuccguuaucacaucucuaggagccauugugucaugcuauggcaaaacuaaauguacagcauccaauaaaaaucguggaaucauaaagacauuuucuaacgggugugauuauguaucaaauaaggggguggacacuguaucuguagguaauacauuauauuauguaaauaagcaagaaggaaaaagccucuauguaaaaggugaaccaauaauaaauuucuaugacccauuaguguucccuucugaugaauuugaugcaucaauaucucaagucaaugagaagauuaaccagagccuagcauuuauucguaaauccgaugaauuauuacauaauguaaauguugguaaauccaccacaaauaucaugauaacuacuauaauuauagugauuauaguaauauuguuauuauuaauugcaguugggcuguuccuauacugcaaggccagaagcacaccagucacacuaagcaaggaucaacugagugguauaaauaauauugcauuuaguaacugaggacuaguggaagcauuuuccuggcugauuaaaagaaauuacucagcuauggucaucuguuccuguuagaaggcuaugcagcauauuauauacuaugcgcauguuaugaaaugcauaauaaaaaauuuuaaaaaaucuaaaagaucuaaaaaaaaaaaaaaaaaaaaaaaaaaaaaaaaaaaaaaaaaaaaaaaaaaaaaaaaaaaaaaaaugcaucccccccccccccccccccccccccccccccaaaggcucuuuucagagccaccagaauu

SEQ ID NO: 11984 - RNA, 2069 nt, Artificial Sequence
  mRNA product Design g-1 comprising derived and/or modified sequence from HRSV(Memphis-37)__AIY60640.1__F0 (opt1)
gggagacuuucccauucuguagcagaauuugguguugccuguggucuuggucccgcggagaagcuuaccauggagcugcccauccucaagaccaacgccaucaccacgauccuggccgcggugacccugugcuucgccagcucccagaacaucaccgaggaguucuaccagagcacgugcuccgccgucagcaagggcuaccucuccgcccugcgcaccgggugguacaccagcgugaucaccaucgagcuguccaacaucaaggagaacaagugcaacggcaccgacgccaaggugaagcucaucaagcaggagcuggacaaguacaagaacgcggucacggagcugcagcuccugaugcagagcaccccggccgccaacaaccgggcccgccgggagcugccccgcuucaugaacuacacccucaacaacaccaagaacaacaacgugacgcuguccaagaagcggaagcgccgguuccugggguuccuccugggcguggggagcgcgaucgccuccggcaucgccgucagcaaggugcugcaccucgagggcgaggugaacaagaucaagaacgcccugcuguccaccaacaaggccgucgugagccucuccaacggggugagcguccugaccuccaaggugcuggaccucaagaacuacaucgacaagcagcugcugcccaucgugaacaagcagagcugcuccaucagcaacaucgagaccgucaucgaguuccagcagaagaacaaccgccuccuggagaucacgcgggaguucagcgugaacgcgggcgugaccacccccgucuccaccuacaugcugacgaacagcgagcuccugucccugaucaacgacaugccgaucaccaacgaccagaagaagcucaugagcaacaacgugcagaucgugcgccagcaguccuacagcaucauguccaucaucaaggaggagguccuggccuacguggugcagcugccccucuacggggucaucgacacccccugcuggaagcugcacaccagcccccugugcacgaccaacaccaaggagggcuccaacaucugccucacccggacggaccgcgggugguacugcgacaacgccggcagcguguccuucuucccgcaggccgagaccugcaagguccagagcaaccggguguucugcgacaccaugaacucccugacccugcccagcgaggugaaccucugcaacaucgacaucuucaaccccaaguacgacugcaagaucaugacguccaagaccgacgucagcuccagcgugaucaccucccugggcgccaucgugagcugcuacgggaagaccaagugcacggcgagcaacaagaaccgcggcaucaucaagaccuucuccaacgggugcgacuacgucagcaacaagggcguggacaccguguccgucggcaacacccuguacuacgugaacaagcaggagggcaagagccucuacgugaagggggagcccaucaucaacuucuacgacccgcuggucuuccccuccgacgaguucgacgccagcaucucccaggugaacgagaagaucaaccagagccuggccuucauccggaaguccgacgagcuccugcacaacgugaacgucggcaagagcaccacgaacaucaugaucaccaccaucaucaucgugaucaucgugauccugcugcuccugaucgccgucgggcuguuccucuacugcaaggcccgcuccacccccgugacgcugagcaaggaccagcuguccgggaucaacaacaucgcguucagcaacugaggacuaguggaagcauuuuccuggcugauuaaaagaaauuacucagcuauggucaucuguuccuguuagaaggcuaugcagcauauuauauacuaugcgcauguuaugaaaugcauaauaaaaaauuuuaaaaaaucuaaaagaucuaaaaaaaaaaaaaaaaaaaaaaaaaaaaaaaaaaaaaaaaaaaaaaaaaaaaaaaaaaaaaaaaugcaucccccccccccccccccccccccccccccccaaaggcucuuuucagagccaccagaauu

SEQ ID NO: 11985 - RNA, 2069 nt, Artificial Sequence
  mRNA product Design g-1 comprising derived and/or modified sequence from HRSV(Memphis-37)__AIY60640.1__F0 (opt2)
gggagacuuucccauucuguagcagaauuugguguugccuguggucuuggucccgcggagaagcuuaccauggagcuccccauccucaagaccaacgccaucaccaccauccucgccgccgucacccucugcuucgccuccucccagaacaucaccgaggaguucuaccaguccaccugcuccgccgucuccaagggcuaccucuccgcccuccgcaccggcugguacaccuccgucaucaccaucgagcucuccaacaucaaggagaacaagugcaacggcaccgacgccaaggucaagcucaucaagcaggagcucgacaaguacaagaacgccgucaccgagcuccagcuccucaugcaguccacccccgccgccaacaaccgcgcccgccgcgagcucccccgcuucaugaacuacacccucaacaacaccaagaacaacaacgucacccucuccaagaagcgcaagcgccgcuuccucggcuuccuccucggcgucggcuccgccaucgccuccggcaucgccgucuccaagguccuccaccucgagggcgaggucaacaagaucaagaacgcccuccucuccaccaacaaggccgucgucucccucuccaacggcgucuccguccucaccuccaagguccucgaccucaagaacuacaucgacaagcagcuccuccccaucgucaacaagcaguccugcuccaucuccaacaucgagaccgucaucgaguuccagcagaagaacaaccgccuccucgagaucacccgcgaguucuccgucaacgccggcgucaccacccccgucuccaccuacaugcucaccaacuccgagcuccucucccucaucaacgacaugcccaucaccaacgaccagaagaagcucauguccaacaacguccagaucguccgccagcaguccuacuccaucauguccaucaucaaggaggagguccucgccuacgucguccagcucccccucuacggcgucaucgacacccccugcuggaagcuccacaccuccccccucugcaccaccaacaccaaggagggcuccaacaucugccucacccgcaccgaccgcggcugguacugcgacaacgccggcuccgucuccuucuucccccaggccgagaccugcaagguccaguccaaccgcgucuucugcgacaccaugaacucccucacccuccccuccgaggucaaccucugcaacaucgacaucuucaaccccaaguacgacugcaagaucaugaccuccaagaccgacgucuccuccuccgucaucaccucccucggcgccaucgucuccugcuacggcaagaccaagugcaccgccuccaacaagaaccgcggcaucaucaagaccuucuccaacggcugcgacuacgucuccaacaagggcgucgacaccgucuccgucggcaacacccucuacuacgucaacaagcaggagggcaagucccucuacgucaagggcgagcccaucaucaacuucuacgacccccucgucuuccccuccgacgaguucgacgccuccaucucccaggucaacgagaagaucaaccagucccucgccuucauccgcaaguccgacgagcuccuccacaacgucaacgucggcaaguccaccaccaacaucaugaucaccaccaucaucaucgucaucaucgucauccuccuccuccucaucgccgucggccucuuccucuacugcaaggcccgcuccacccccgucacccucuccaaggaccagcucuccggcaucaacaacaucgccuucuccaacugaggacuaguggaagcauuuuccuggcugauuaaaagaaauuacucagcuauggucaucuguuccuguuagaaggcuaugcagcauauuauauacuaugcgcauguuaugaaaugcauaauaaaaaauuuuaaaaaaucuaaaagaucuaaaaaaaaaaaaaaaaaaaaaaaaaaaaaaaaaaaaaaaaaaaaaaaaaaaaaaaaaaaaaaaaugcaucccccccccccccccccccccccccccccccaaaggcucuuuucagagccaccagaauu

SEQ ID NO: 11986 - RNA, 2069 nt, Artificial Sequence
  mRNA product Design g-1 comprising derived and/or modified sequence from HRSV(Memphis-37)__AIY60640.1__F0 (opt3)
gggagacuuucccauucuguagcagaauuugguguugccuguggucuuggucccgcggagaagcuuaccauggagcugcccauccucaagaccaacgccauuacaacuauacuugcugcagugacgcugugcuucgccagcucccagaauaucaccgaagaguuuuaccaaucuacauguucagcggucaguaaaggcuauuugagcgcuuuaagaacugggugguacaccuccguuauuacaaucgaacugucuaacauuaaggagaauaaaugcaacggaaccgacgccaaggugaaacuaaucaagcaggaacucgauaaguauaaaaaugcaguaacugagcugcagcuucugaugcagucgaccccugccgcuaacaauagggcacggcgcgaguugccacgauucaugaacuacacacucaauaacacgaagaauaacaaugugacucugagcaaaaagcguaaaagaagguuucuggguuuccucuuaggcgucgggucagccauagcuaguggaaucgccguguccaagguucugcaccuugaaggcgaggugaacaagauuaaaaaugcguugcugucuaccaacaaggcagucgugagccuauccaacgguguaucaguucucacaaguaaagugcuggaccuuaagaauuauaucgauaaacaacuguugccgauugucaacaagcagagcuguucuaucuccaauauagaaacugugauugaguuucagcagaaaaacaaucggcuccuggagaucacccgcgaguucucagugaacgccggggucacaacccccguuagcacguacauguuaacuaauagugaacugcucucucuuauuaacgacaugccuaucacaaaugaucaaaagaagcugauguccaacaaugugcagaucguaagacagcagagcuauucgauuaugucuauaaucaaagaagagguguuggcuuacgucgugcaacuaccacuguacggaguuauugacacccccugcuggaagcuccauacuuccccucuguguacaaccaacacgaaagaaggcucaaauaucugccuuaccaggacagaucggggcugguauugugacaacgccgggagugugagcuuuuucccacaggcagagacuugcaagguccaguccaaucgcguguuuugugauaccaugaacucucugacauugcccagcgagguaaaccucugcaauauagacauuuucaacccuaaauacgauuguaagaucaugacuucaaagaccgacguuaguuccagcgugaucacaucucugggagcuauugucucaugcuaugguaaaaccaagugcacugccaguaauaaaaaccgaggcaucauuaagacguuuagcaaugggugugauuacguguccaacaaaggagucgacacagugucuguuggcaauaccuuauauuacgugaacaagcaagaagguaagucgcuguauguaaaaggggagccaauaaucaauuucuacgacccgcuagucuuucccagcgaugaguucgacgcguccauuucacaggugaacgaaaagaucaaucagagucucgccuucaucagaaaaucugaugaacugcuucacaacguuaaugugggaaagagcacuaccaacauuaugauaacaaccaucauuaucgucauuaucgugauauugcugcuccugaucgcaguaggccuuuuucuguacugcaaagcuagguccacuccugugacauugucaaaggaccagcucagcggcauuaauaacaucgccuucucuaacugaggacuaguggaagcauuuuccuggcugauuaaaagaaauuacucagcuauggucaucuguuccuguuagaaggcuaugcagcauauuauauacuaugcgcauguuaugaaaugcauaauaaaaaauuuuaaaaaaucuaaaagaucuaaaaaaaaaaaaaaaaaaaaaaaaaaaaaaaaaaaaaaaaaaaaaaaaaaaaaaaaaaaaaaaaugcaucccccccccccccccccccccccccccccccaaaggcucuuuucagagccaccagaauu

SEQ ID NO: 11987 - RNA, 2069 nt, Artificial Sequence
  mRNA product Design g-1 comprising derived and/or modified sequence from HRSV(Memphis-37)__AIY60640.1__F0 (opt4)
gggagacuuucccauucuguagcagaauuugguguugccuguggucuuggucccgcggagaagcuuaccauggagcugcccauccugaagaccaacgccaucaccaccauccuggccgccgugacccugugcuucgccagcagccagaacaucaccgaggaguucuaccagagcaccugcagcgccgugagcaagggcuaccugagcgcccugagaaccggcugguacaccagcgugaucaccaucgagcugagcaacaucaaggagaacaagugcaacggcaccgacgccaaggugaagcugaucaagcaggagcuggacaaguacaagaacgccgugaccgagcugcagcugcugaugcagagcacccccgccgccaacaacagagccagaagagagcugcccagauucaugaacuacacccugaacaacaccaagaacaacaacgugacccugagcaagaagagaaagagaagauuccugggcuuccugcugggcgugggcagcgccaucgccagcggcaucgccgugagcaaggugcugcaccuggagggcgaggugaacaagaucaagaacgcccugcugagcaccaacaaggccguggugagccugagcaacggcgugagcgugcugaccagcaaggugcuggaccugaagaacuacaucgacaagcagcugcugcccaucgugaacaagcagagcugcagcaucagcaacaucgagaccgugaucgaguuccagcagaagaacaacagacugcuggagaucaccagagaguucagcgugaacgccggcgugaccacccccgugagcaccuacaugcugaccaacagcgagcugcugagccugaucaacgacaugcccaucaccaacgaccagaagaagcugaugagcaacaacgugcagaucgugagacagcagagcuacagcaucaugagcaucaucaaggaggaggugcuggccuacguggugcagcugccccuguacggcgugaucgacacccccugcuggaagcugcacaccagcccccugugcaccaccaacaccaaggagggcagcaacaucugccugaccagaaccgacagaggcugguacugcgacaacgccggcagcgugagcuucuucccccaggccgagaccugcaaggugcagagcaacagaguguucugcgacaccaugaacagccugacccugcccagcgaggugaaccugugcaacaucgacaucuucaaccccaaguacgacugcaagaucaugaccagcaagaccgacgugagcagcagcgugaucaccagccugggcgccaucgugagcugcuacggcaagaccaagugcaccgccagcaacaagaacagaggcaucaucaagaccuucagcaacggcugcgacuacgugagcaacaagggcguggacaccgugagcgugggcaacacccuguacuacgugaacaagcaggagggcaagagccuguacgugaagggcgagcccaucaucaacuucuacgacccccugguguuccccagcgacgaguucgacgccagcaucagccaggugaacgagaagaucaaccagagccuggccuucaucagaaagagcgacgagcugcugcacaacgugaacgugggcaagagcaccaccaacaucaugaucaccaccaucaucaucgugaucaucgugauccugcugcugcugaucgccgugggccuguuccuguacugcaaggccagaagcacccccgugacccugagcaaggaccagcugagcggcaucaacaacaucgccuucagcaacugaggacuaguggaagcauuuuccuggcugauuaaaagaaauuacucagcuauggucaucuguuccuguuagaaggcuaugcagcauauuauauacuaugcgcauguuaugaaaugcauaauaaaaaauuuuaaaaaaucuaaaagaucuaaaaaaaaaaaaaaaaaaaaaaaaaaaaaaaaaaaaaaaaaaaaaaaaaaaaaaaaaaaaaaaaugcaucccccccccccccccccccccccccccccccaaaggcucuuuucagagccaccagaauu

SEQ ID NO: 11988 - RNA, 2069 nt, Artificial Sequence
  mRNA product Design g-1 comprising derived and/or modified sequence from HRSV(Memphis-37)__AIY60640.1__F0 (opt5)
gggagacuuucccauucuguagcagaauuugguguugccuguggucuuggucccgcggagaagcuuaccauggagcugcccauccucaagaccaacgccauuacaacgauccuggcugccgugacccuuugcuucgcgagcucccagaauauuacagaagaguuuuaccaaucuaccuguagcgcugucuccaaaggcuaucugucugcccucagaacagggugguacaccagcguuaucacaauugaacuguccaacaucaaggagaauaaaugcaacggaaccgacgccaaggugaaacuuaucaagcaggaacuggauaaguauaaaaaugcugugacggagcuccagcugcugaugcagucuaccccugccgcuaacaaucgggcccgcagagagcucccgcgguucaugaacuacacacugaauaacaccaagaauaacaaugucacacuuagcaaaaagcgcaaaagacgguuucugggcuuccuccugggggugggauccgcgauugccagcggcaucgcuguuucuaaggugcuucaccuggaaggggaggucaacaagauuaaaaaugcccuccuguccaccaacaaggcugugguuagccugucuaacggaguguccguccucacgagcaaagugcuggaccuuaagaauuauaucgauaaacaacugcuccccauugugaacaagcagucuuguuccaucagcaauauugaaacagucaucgaguuucagcagaaaaacaaucgccugcuugagaucaccagagaauuuuccguuaacgccggcgugacaaccccugugucuaccuacaugcugacaaauagcgagcuccugucccugauuaacgacaugcccaucacgaaugaucaaaagaagcucaugagcaacaauguccagauugugcggcagcagucuuauuccaucaugagcauuaucaaagaagagguucuggcguacgugguccaacuuccucuguacggcgugaucgacacccccugcuggaagcuccauacaucuccucuguguaccacaaacaccaaagaagggagcaauauuugccuuacgcgcacagauagaggaugguauugugacaacgccggcuccguuucuuucuucccgcaggcugagaccugcaaggugcagagcaaucgggucuuuugugauaccaugaacucccugacacuccccagcgaggugaaccugugcaauaucgacauuuucaacccuaaauacgauuguaagaucaugaccucuaagacagacgucuccagcucugugauuacgucccugggggccaucguuagcugcuauggaaaaaccaagugcacagcuuccaauaaaaaccgcggcaucauuaagaccuuuucuaaugggugugauuacgugagcaacaaaggagucgacacaguguccguuggcaauacccucuauuacgugaacaagcaagaaggcaagucucuguaugucaaaggggagcccaucauuaauuucuacgacccucuuguguuucccagcgaugaguucgacgccuccaucagccaggugaacgaaaagauuaaucagucucuggccuucaucagaaaauccgaugaacuccugcacaacguuaaugucggaaagagcacgaccaacauuaugaucacaaccaucauuaucgugauuaucgugauucugcuucuccugaucgcugucggccuguuucucuacugcaaagcgcggucuacaccggugacccuguccaaggaccagcuuagcgggaucaauaacauugccuucucuaacugaggacuaguggaagcauuuuccuggcugauuaaaagaaauuacucagcuauggucaucuguuccuguuagaaggcuaugcagcauauuauauacuaugcgcauguuaugaaaugcauaauaaaaaauuuuaaaaaaucuaaaagaucuaaaaaaaaaaaaaaaaaaaaaaaaaaaaaaaaaaaaaaaaaaaaaaaaaaaaaaaaaaaaaaaaugcaucccccccccccccccccccccccccccccccaaaggcucuuuucagagccaccagaauu

SEQ ID NO: 11989 - RNA, 2069 nt, Artificial Sequence
  mRNA product Design g-1 comprising derived and/or modified sequence from HRSV(Memphis-37)__AIY60640.1__F0 (opt6)
gggagacuuucccauucuguagcagaauuugguguugccuguggucuuggucccgcggagaagcuuaccauggaacugccuauucuaaaaacaaaugccauaacaacaauucuugcagcaguaacauuauguuuugcaucaucacaaaacauuacagaagaauuuuaccaauccacuugcucagccguaucaaaaggauaccuaucagccuuaagaacagguugguacaccucaguaauaaccauagaacuaucaaacauaaaagaaaacaaaugcaaugguacugaugcaaaagucaaacuaaucaaacaagaacuggacaaauacaaaaaugcaguaaccgaacuacaacuccuaaugcaauccacaccugcagccaacaacagagcaagacgcgaacuaccaagauuuaugaauuacacauuaaacaacaccaagaacaacaauguaacucucucaaaaaaaagaaaaagacgcuuucuagguuuccuccuaggcgucggaucugcaauagccucaggaauagcaguaucaaaaguucuacaccuagaaggagaaguaaacaaaauuaaaaacgcauuacuaucaaccaacaaagcaguuguaucccuuucaaauggagucucuguacuuacaucaaaaguacucgaccuaaaaaacuauauagacaaacaacuacucccaauagucaauaagcaaucaugcagcauaucaaacauagaaacaguuauagaauuucaacaaaaaaacaacagacuacucgaaauaaccagagaauuuagcgucaacgcaggcguaaccacaccgguauccacauacaugcuuacaaacucagaacuccucucacuaauaaacgacaugccaauaacuaaugaccaaaaaaaacuaaugucaaacaauguccaaauaguccgucaacaaucauacucaauaaugucaauaauaaaagaagaaguauuagcauauguaguccaacuaccauuauacggcguuauagacacaccuuguuggaaacuucacacauccccacucuguacaaccaacacaaaagaagguuccaauauaugccuaacuagaaccgacagaggaugguauugcgacaacgcaggaucuguaucauucuuuccccaagcagaaacauguaaaguacaaaguaaccgcguauucugcgacaccaugaacucauuaacccucccauccgaaguuaauuuaugcaauauagacauauuuaauccuaaauacgacugcaaaauaaugacaucaaaaacagacguuaguuccuccguaaucacaucuuugggcgcaauagucucaugcuauggaaaaacaaaaugcacagccucaaacaaaaauagaggaauaauaaaaacauucagcaacggcugugauuauguauccaacaaaggaguagacacaguauccguaggcaauacccuuuacuacguuaauaaacaagaaggaaaaucauuauacgucaaaggagaaccuaucauaaauuucuacgacccauuaguauucccuucagacgaauuugaugccucaauaucccaagucaaugaaaaaaucaaccaaucacuagccuuuauccgcaaaucagacgaauuacuacacaacguaaacguaggcaaaucaacaacuaauauaaugauaacaacaauaauaauaguaauuauaguaauauuauuacuacuaaucgccguagguuuauucuuauacuguaaagcacgaucaacaccaguuacacucucaaaagaucaacuaucaggaauaaacaacauagcauuuuccaauuaaggacuaguggaagcauuuuccuggcugauuaaaagaaauuacucagcuauggucaucuguuccuguuagaaggcuaugcagcauauuauauacuaugcgcauguuaugaaaugcauaauaaaaaauuuuaaaaaaucuaaaagaucuaaaaaaaaaaaaaaaaaaaaaaaaaaaaaaaaaaaaaaaaaaaaaaaaaaaaaaaaaaaaaaaaugcaucccccccccccccccccccccccccccccccaaaggcucuuuucagagccaccagaauu

SEQ ID NO: 11990 - RNA, 2069 nt, Artificial Sequence
  mRNA product Design g-1 comprising derived and/or modified sequence from HRSV(Memphis-37)__AIY60640.1__F0 (opt11)
gggagacuuucccauucuguagcagaauuugguguugccuguggucuuggucccgcggagaagcuuaccauggaacuccccauccucaaaacaaacgccauaaccacuauccucgccgccgucacccucugcuucgccuccucccaaaacaucacagaggaguucuaccaauccacaugcuccgccgucuccaaaggcuaccucagcgcccuacguaccggcugguacaccagcgucaucacaauagaacucuccaacaucaaggaaaacaaaugcaacggcaccgaugccaaaguaaaacucaucaaacaagaacucgauaaauacaaaaacgccgucaccgaacuacaacuccuaaugcaaagcacacccgccgccaacaacagagcacggcgcgaacugccccgcuucaugaacuacacccucaacaacaccaaaaauaacaacgucacccuauccaagaaacgcaaacgccgauuccucgguuuccuacucggcguaggaagcgccauagccucaggcaucgccgucuccaaaguccuccaucuggaaggcgaagucaacaaaaucaaaaacgcacucuuauccaccaacaaagccgucgucucccucucgaacggggucuccguccuuaccuccaaaguccucgaccuuaaaaacuacaucgacaaacaacuacuaccaauagucaauaaacaauccugcuccaucucaaacauagaaaccgucauagaguuccaacagaagaacaaucgccuccucgaaauaacucgcgaguucuccgucaacgcaggcgucacgaccccugucucaacauacaugcuaacuaacucagaacuccuaagccuaaucaacgacaugcccaucacaaacgaccaaaagaaacucaugagcaacaauguccagauagucagacagcaauccuauagcaucaugucuauaauaaaagaagaagugcucgccuacguaguccaacucccucuuuacggcgucauagacacacccugcuggaaacuccacacaucuccucucugcaccaccaacacaaaagaaggcagcaacaucugccugacccgaaccgaccgcggaugguacugcgacaacgcuggcuccgugucuuucuuuccccaagccgaaaccugcaaaguccaguccaaccgcgucuucugcgacacaaugaacucccucacccuacccuccgaaguuaaccucugcaacaucgacaucuucaauccaaaauacgacugcaaaaucaugaccucgaaaacggacguauccuccuccgucauaacaucacuuggagccaucguuagcugcuacggaaaaaccaaauguaccgccuccaacaaaaaccgcggaauaaucaaaacauucuccaacggcugcgacuacguaagcaacaaaggggucgauacugucuccguagguaacacccuauacuacgucaacaaacaagaaggaaaaucacuauacguuaaaggcgaacccauuaucaacuucuacgacccccucguuuucccauccgacgaguucgacgccuccauaagccaaguuaacgaaaagauaaaccaaucgcucgcauucauccgcaaauccgacgaacuccuacacaacgucaacgugggcaaauccacaacaaacaucaugaucaccaccaucauuaucgucauaauagucauccuccuccugcucaucgccgugggacuauuccuauacugcaaagcccgcucgacgcccgucacacuuuccaaagaccaacuaagcggaaucaacaacauagcguucagcaauuaaggacuaguggaagcauuuuccuggcugauuaaaagaaauuacucagcuauggucaucuguuccuguuagaaggcuaugcagcauauuauauacuaugcgcauguuaugaaaugcauaauaaaaaauuuuaaaaaaucuaaaagaucuaaaaaaaaaaaaaaaaaaaaaaaaaaaaaaaaaaaaaaaaaaaaaaaaaaaaaaaaaaaaaaaaugcaucccccccccccccccccccccccccccccccaaaggcucuuuucagagccaccagaauu

SEQ ID NO: 11991 - RNA, 2084 nt, Artificial Sequence
  mRNA product Design g-2 comprising derived and/or modified sequence from HRSV(Memphis-37)__AIY60640.1__F0 (wt)
gggagaguccgcucagccagguugcagaagcggcuuagcguguguccuaaucuucucucugcguguagguaggccugugccgcaaacaagcuuaccauggaguugccaauccucaaaacaaaugcaauuaccacaauccuugcugcagucacacucuguuucgcuuccagucaaaacaucacugaagaauuuuaucaaucaacaugcagugcaguuagcaaaggcuaucuuagugcuuuaagaacugguugguauacuaguguuauaacuauagaauuaaguaauaucaaggaaaauaaguguaauggaacagaugcuaagguaaaauugauaaaacaagaauuagauaaauauaaaaaugcuguaacagaauugcaguugcucaugcaaagcacaccagcagccaacaaucgagccagaagagaacuaccaagguuuaugaauuauacacucaacaauaccaaaaauaacaauguaacauuaagcaagaaaaggaaaagaagauuucuuggcuuuuuguuagguguuggaucugcaaucgccaguggcauugcuguaucuaaaguccugcaccuagaaggggaagugaacaaaaucaaaaaugcucuacuauccacaaacaaggcuguagucagcuuaucaaauggaguuagugucuuaaccagcaaaguguuagaccucaaaaacuauauagauaaacaguuguuacccauugugaacaagcaaagcugcagcauaucaaacauugaaacugugauagaauuccaacaaaagaacaacagacuacuagagauuaccagggaauuuaguguuaaugcagguguaacuacaccuguaagcacuuauauguuaacaaauagugaauuauuaucauuaaucaaugauaugccuauaacaaaugaucagaaaaaguuaauguccaacaauguucaaauaguuagacagcaaaguuacucuaucauguccauaauaaaggaggaagucuuagcauauguaguucaauuaccacuauaugguguaauagauacaccuuguuggaaacuacacacauccccucuaugcacaaccaacacaaaggaaggguccaacaucuguuuaacaagaaccgacagaggaugguacugugacaaugcaggaucagugucuuucuucccacaagcugaaacaugcaaaguucaaucgaaucgaguauuuugugacacaaugaacagucuaacauuaccaagugaaguaaaucucugcaacauugacauauucaacccuaaauaugauugcaaaauuaugacuucaaaaacagaugugagcagcuccguuaucacaucucuaggagccauugugucaugcuauggcaaaacuaaauguacagcauccaauaaaaaucguggaaucauaaagacauuuucuaacgggugugauuauguaucaaauaaggggguggacacuguaucuguagguaauacauuauauuauguaaauaagcaagaaggaaaaagccucuauguaaaaggugaaccaauaauaaauuucuaugacccauuaguguucccuucugaugaauuugaugcaucaauaucucaagucaaugagaagauuaaccagagccuagcauuuauucguaaauccgaugaauuauuacauaauguaaauguugguaaauccaccacaaauaucaugauaacuacuauaauuauagugauuauaguaauauuguuauuauuaauugcaguugggcuguuccuauacugcaaggccagaagcacaccagucacacuaagcaaggaucaacugagugguauaaauaauauugcauuuaguaacugaggacuaguaauaaggaaacuguaugaaugucugugggcaggaagugaagagauccuucuguaaagguuuuuggaauuaugucugcugaauaauaaacuuuuuugaaauaauaaaucugguagaaaaaugagaucuaaaaaaaaaaaaaaaaaaaaaaaaaaaaaaaaaaaaaaaaaaaaaaaaaaaaaaaaaaaaaaaaugcaucccccccccccccccccccccccccccccccaaaggcucuuuucagagccaccagaauu

SEQ ID NO: 11992 - RNA, 2084 nt, Artificial Sequence
  mRNA product Design g-2 comprising derived and/or modified sequence from HRSV(Memphis-37)__AIY60640.1__F0 (opt1)
gggagaguccgcucagccagguugcagaagcggcuuagcguguguccuaaucuucucucugcguguagguaggccugugccgcaaacaagcuuaccauggagcugcccauccucaagaccaacgccaucaccacgauccuggccgcggugacccugugcuucgccagcucccagaacaucaccgaggaguucuaccagagcacgugcuccgccgucagcaagggcuaccucuccgcccugcgcaccgggugguacaccagcgugaucaccaucgagcuguccaacaucaaggagaacaagugcaacggcaccgacgccaaggugaagcucaucaagcaggagcuggacaaguacaagaacgcggucacggagcugcagcuccugaugcagagcaccccggccgccaacaaccgggcccgccgggagcugccccgcuucaugaacuacacccucaacaacaccaagaacaacaacgugacgcuguccaagaagcggaagcgccgguuccugggguuccuccugggcguggggagcgcgaucgccuccggcaucgccgucagcaaggugcugcaccucgagggcgaggugaacaagaucaagaacgcccugcuguccaccaacaaggccgucgugagccucuccaacggggugagcguccugaccuccaaggugcuggaccucaagaacuacaucgacaagcagcugcugcccaucgugaacaagcagagcugcuccaucagcaacaucgagaccgucaucgaguuccagcagaagaacaaccgccuccuggagaucacgcgggaguucagcgugaacgcgggcgugaccacccccgucuccaccuacaugcugacgaacagcgagcuccugucccugaucaacgacaugccgaucaccaacgaccagaagaagcucaugagcaacaacgugcagaucgugcgccagcaguccuacagcaucauguccaucaucaaggaggagguccuggccuacguggugcagcugccccucuacggggucaucgacacccccugcuggaagcugcacaccagcccccugugcacgaccaacaccaaggagggcuccaacaucugccucacccggacggaccgcgggugguacugcgacaacgccggcagcguguccuucuucccgcaggccgagaccugcaagguccagagcaaccggguguucugcgacaccaugaacucccugacccugcccagcgaggugaaccucugcaacaucgacaucuucaaccccaaguacgacugcaagaucaugacguccaagaccgacgucagcuccagcgugaucaccucccugggcgccaucgugagcugcuacgggaagaccaagugcacggcgagcaacaagaaccgcggcaucaucaagaccuucuccaacgggugcgacuacgucagcaacaagggcguggacaccguguccgucggcaacacccuguacuacgugaacaagcaggagggcaagagccucuacgugaagggggagcccaucaucaacuucuacgacccgcuggucuuccccuccgacgaguucgacgccagcaucucccaggugaacgagaagaucaaccagagccuggccuucauccggaaguccgacgagcuccugcacaacgugaacgucggcaagagcaccacgaacaucaugaucaccaccaucaucaucgugaucaucgugauccugcugcuccugaucgccgucgggcuguuccucuacugcaaggcccgcuccacccccgugacgcugagcaaggaccagcuguccgggaucaacaacaucgcguucagcaacugaggacuaguaauaaggaaacuguaugaaugucugugggcaggaagugaagagauccuucuguaaagguuuuuggaauuaugucugcugaauaauaaacuuuuuugaaauaauaaaucugguagaaaaaugagaucuaaaaaaaaaaaaaaaaaaaaaaaaaaaaaaaaaaaaaaaaaaaaaaaaaaaaaaaaaaaaaaaaugcaucccccccccccccccccccccccccccccccaaaggcucuuuucagagccaccagaauu

SEQ ID NO: 11993 - RNA, 2084 nt, Artificial Sequence
  mRNA product Design g-2 comprising derived and/or modified sequence from HRSV(Memphis-37)__AIY60640.1__F0 (opt2)
gggagaguccgcucagccagguugcagaagcggcuuagcguguguccuaaucuucucucugcguguagguaggccugugccgcaaacaagcuuaccauggagcuccccauccucaagaccaacgccaucaccaccauccucgccgccgucacccucugcuucgccuccucccagaacaucaccgaggaguucuaccaguccaccugcuccgccgucuccaagggcuaccucuccgcccuccgcaccggcugguacaccuccgucaucaccaucgagcucuccaacaucaaggagaacaagugcaacggcaccgacgccaaggucaagcucaucaagcaggagcucgacaaguacaagaacgccgucaccgagcuccagcuccucaugcaguccacccccgccgccaacaaccgcgcccgccgcgagcucccccgcuucaugaacuacacccucaacaacaccaagaacaacaacgucacccucuccaagaagcgcaagcgccgcuuccucggcuuccuccucggcgucggcuccgccaucgccuccggcaucgccgucuccaagguccuccaccucgagggcgaggucaacaagaucaagaacgcccuccucuccaccaacaaggccgucgucucccucuccaacggcgucuccguccucaccuccaagguccucgaccucaagaacuacaucgacaagcagcuccuccccaucgucaacaagcaguccugcuccaucuccaacaucgagaccgucaucgaguuccagcagaagaacaaccgccuccucgagaucacccgcgaguucuccgucaacgccggcgucaccacccccgucuccaccuacaugcucaccaacuccgagcuccucucccucaucaacgacaugcccaucaccaacgaccagaagaagcucauguccaacaacguccagaucguccgccagcaguccuacuccaucauguccaucaucaaggaggagguccucgccuacgucguccagcucccccucuacggcgucaucgacacccccugcuggaagcuccacaccuccccccucugcaccaccaacaccaaggagggcuccaacaucugccucacccgcaccgaccgcggcugguacugcgacaacgccggcuccgucuccuucuucccccaggccgagaccugcaagguccaguccaaccgcgucuucugcgacaccaugaacucccucacccuccccuccgaggucaaccucugcaacaucgacaucuucaaccccaaguacgacugcaagaucaugaccuccaagaccgacgucuccuccuccgucaucaccucccucggcgccaucgucuccugcuacggcaagaccaagugcaccgccuccaacaagaaccgcggcaucaucaagaccuucuccaacggcugcgacuacgucuccaacaagggcgucgacaccgucuccgucggcaacacccucuacuacgucaacaagcaggagggcaagucccucuacgucaagggcgagcccaucaucaacuucuacgacccccucgucuuccccuccgacgaguucgacgccuccaucucccaggucaacgagaagaucaaccagucccucgccuucauccgcaaguccgacgagcuccuccacaacgucaacgucggcaaguccaccaccaacaucaugaucaccaccaucaucaucgucaucaucgucauccuccuccuccucaucgccgucggccucuuccucuacugcaaggcccgcuccacccccgucacccucuccaaggaccagcucuccggcaucaacaacaucgccuucuccaacugaggacuaguaauaaggaaacuguaugaaugucugugggcaggaagugaagagauccuucuguaaagguuuuuggaauuaugucugcugaauaauaaacuuuuuugaaauaauaaaucugguagaaaaaugagaucuaaaaaaaaaaaaaaaaaaaaaaaaaaaaaaaaaaaaaaaaaaaaaaaaaaaaaaaaaaaaaaaaugcaucccccccccccccccccccccccccccccccaaaggcucuuuucagagccaccagaauu

SEQ ID NO: 11994 - RNA, 2084 nt, Artificial Sequence
  mRNA product Design g-2 comprising derived and/or modified sequence from HRSV(Memphis-37)__AIY60640.1__F0 (opt3)
gggagaguccgcucagccagguugcagaagcggcuuagcguguguccuaaucuucucucugcguguagguaggccugugccgcaaacaagcuuaccauggagcugcccauccucaagaccaacgccauuacaacuauacuugcugcagugacgcugugcuucgccagcucccagaauaucaccgaagaguuuuaccaaucuacauguucagcggucaguaaaggcuauuugagcgcuuuaagaacugggugguacaccuccguuauuacaaucgaacugucuaacauuaaggagaauaaaugcaacggaaccgacgccaaggugaaacuaaucaagcaggaacucgauaaguauaaaaaugcaguaacugagcugcagcuucugaugcagucgaccccugccgcuaacaauagggcacggcgcgaguugccacgauucaugaacuacacacucaauaacacgaagaauaacaaugugacucugagcaaaaagcguaaaagaagguuucuggguuuccucuuaggcgucgggucagccauagcuaguggaaucgccguguccaagguucugcaccuugaaggcgaggugaacaagauuaaaaaugcguugcugucuaccaacaaggcagucgugagccuauccaacgguguaucaguucucacaaguaaagugcuggaccuuaagaauuauaucgauaaacaacuguugccgauugucaacaagcagagcuguucuaucuccaauauagaaacugugauugaguuucagcagaaaaacaaucggcuccuggagaucacccgcgaguucucagugaacgccggggucacaacccccguuagcacguacauguuaacuaauagugaacugcucucucuuauuaacgacaugccuaucacaaaugaucaaaagaagcugauguccaacaaugugcagaucguaagacagcagagcuauucgauuaugucuauaaucaaagaagagguguuggcuuacgucgugcaacuaccacuguacggaguuauugacacccccugcuggaagcuccauacuuccccucuguguacaaccaacacgaaagaaggcucaaauaucugccuuaccaggacagaucggggcugguauugugacaacgccgggagugugagcuuuuucccacaggcagagacuugcaagguccaguccaaucgcguguuuugugauaccaugaacucucugacauugcccagcgagguaaaccucugcaauauagacauuuucaacccuaaauacgauuguaagaucaugacuucaaagaccgacguuaguuccagcgugaucacaucucugggagcuauugucucaugcuaugguaaaaccaagugcacugccaguaauaaaaaccgaggcaucauuaagacguuuagcaaugggugugauuacguguccaacaaaggagucgacacagugucuguuggcaauaccuuauauuacgugaacaagcaagaagguaagucgcuguauguaaaaggggagccaauaaucaauuucuacgacccgcuagucuuucccagcgaugaguucgacgcguccauuucacaggugaacgaaaagaucaaucagagucucgccuucaucagaaaaucugaugaacugcuucacaacguuaaugugggaaagagcacuaccaacauuaugauaacaaccaucauuaucgucauuaucgugauauugcugcuccugaucgcaguaggccuuuuucuguacugcaaagcuagguccacuccugugacauugucaaaggaccagcucagcggcauuaauaacaucgccuucucuaacugaggacuaguaauaaggaaacuguaugaaugucugugggcaggaagugaagagauccuucuguaaagguuuuuggaauuaugucugcugaauaauaaacuuuuuugaaauaauaaaucugguagaaaaaugagaucuaaaaaaaaaaaaaaaaaaaaaaaaaaaaaaaaaaaaaaaaaaaaaaaaaaaaaaaaaaaaaaaaugcaucccccccccccccccccccccccccccccccaaaggcucuuuucagagccaccagaauu

SEQ ID NO: 11995 - RNA, 2084 nt, Artificial Sequence
  mRNA product Design g-2 comprising derived and/or modified sequence from HRSV(Memphis-37)__AIY60640.1__F0 (opt4)
gggagaguccgcucagccagguugcagaagcggcuuagcguguguccuaaucuucucucugcguguagguaggccugugccgcaaacaagcuuaccauggagcugcccauccugaagaccaacgccaucaccaccauccuggccgccgugacccugugcuucgccagcagccagaacaucaccgaggaguucuaccagagcaccugcagcgccgugagcaagggcuaccugagcgcccugagaaccggcugguacaccagcgugaucaccaucgagcugagcaacaucaaggagaacaagugcaacggcaccgacgccaaggugaagcugaucaagcaggagcuggacaaguacaagaacgccgugaccgagcugcagcugcugaugcagagcacccccgccgccaacaacagagccagaagagagcugcccagauucaugaacuacacccugaacaacaccaagaacaacaacgugacccugagcaagaagagaaagagaagauuccugggcuuccugcugggcgugggcagcgccaucgccagcggcaucgccgugagcaaggugcugcaccuggagggcgaggugaacaagaucaagaacgcccugcugagcaccaacaaggccguggugagccugagcaacggcgugagcgugcugaccagcaaggugcuggaccugaagaacuacaucgacaagcagcugcugcccaucgugaacaagcagagcugcagcaucagcaacaucgagaccgugaucgaguuccagcagaagaacaacagacugcuggagaucaccagagaguucagcgugaacgccggcgugaccacccccgugagcaccuacaugcugaccaacagcgagcugcugagccugaucaacgacaugcccaucaccaacgaccagaagaagcugaugagcaacaacgugcagaucgugagacagcagagcuacagcaucaugagcaucaucaaggaggaggugcuggccuacguggugcagcugccccuguacggcgugaucgacacccccugcuggaagcugcacaccagcccccugugcaccaccaacaccaaggagggcagcaacaucugccugaccagaaccgacagaggcugguacugcgacaacgccggcagcgugagcuucuucccccaggccgagaccugcaaggugcagagcaacagaguguucugcgacaccaugaacagccugacccugcccagcgaggugaaccugugcaacaucgacaucuucaaccccaaguacgacugcaagaucaugaccagcaagaccgacgugagcagcagcgugaucaccagccugggcgccaucgugagcugcuacggcaagaccaagugcaccgccagcaacaagaacagaggcaucaucaagaccuucagcaacggcugcgacuacgugagcaacaagggcguggacaccgugagcgugggcaacacccuguacuacgugaacaagcaggagggcaagagccuguacgugaagggcgagcccaucaucaacuucuacgacccccugguguuccccagcgacgaguucgacgccagcaucagccaggugaacgagaagaucaaccagagccuggccuucaucagaaagagcgacgagcugcugcacaacgugaacgugggcaagagcaccaccaacaucaugaucaccaccaucaucaucgugaucaucgugauccugcugcugcugaucgccgugggccuguuccuguacugcaaggccagaagcacccccgugacccugagcaaggaccagcugagcggcaucaacaacaucgccuucagcaacugaggacuaguaauaaggaaacuguaugaaugucugugggcaggaagugaagagauccuucuguaaagguuuuuggaauuaugucugcugaauaauaaacuuuuuugaaauaauaaaucugguagaaaaaugagaucuaaaaaaaaaaaaaaaaaaaaaaaaaaaaaaaaaaaaaaaaaaaaaaaaaaaaaaaaaaaaaaaaugcaucccccccccccccccccccccccccccccccaaaggcucuuuucagagccaccagaauu

SEQ ID NO: 11996 - RNA, 2084 nt, Artificial Sequence
  mRNA product Design g-2 comprising derived and/or modified sequence from HRSV(Memphis-37)__AIY60640.1__F0 (opt5)
gggagaguccgcucagccagguugcagaagcggcuuagcguguguccuaaucuucucucugcguguagguaggccugugccgcaaacaagcuuaccauggagcugcccauccucaagaccaacgccauuacaacgauccuggcugccgugacccuuugcuucgcgagcucccagaauauuacagaagaguuuuaccaaucuaccuguagcgcugucuccaaaggcuaucugucugcccucagaacagggugguacaccagcguuaucacaauugaacuguccaacaucaaggagaauaaaugcaacggaaccgacgccaaggugaaacuuaucaagcaggaacuggauaaguauaaaaaugcugugacggagcuccagcugcugaugcagucuaccccugccgcuaacaaucgggcccgcagagagcucccgcgguucaugaacuacacacugaauaacaccaagaauaacaaugucacacuuagcaaaaagcgcaaaagacgguuucugggcuuccuccugggggugggauccgcgauugccagcggcaucgcuguuucuaaggugcuucaccuggaaggggaggucaacaagauuaaaaaugcccuccuguccaccaacaaggcugugguuagccugucuaacggaguguccguccucacgagcaaagugcuggaccuuaagaauuauaucgauaaacaacugcuccccauugugaacaagcagucuuguuccaucagcaauauugaaacagucaucgaguuucagcagaaaaacaaucgccugcuugagaucaccagagaauuuuccguuaacgccggcgugacaaccccugugucuaccuacaugcugacaaauagcgagcuccugucccugauuaacgacaugcccaucacgaaugaucaaaagaagcucaugagcaacaauguccagauugugcggcagcagucuuauuccaucaugagcauuaucaaagaagagguucuggcguacgugguccaacuuccucuguacggcgugaucgacacccccugcuggaagcuccauacaucuccucuguguaccacaaacaccaaagaagggagcaauauuugccuuacgcgcacagauagaggaugguauugugacaacgccggcuccguuucuuucuucccgcaggcugagaccugcaaggugcagagcaaucgggucuuuugugauaccaugaacucccugacacuccccagcgaggugaaccugugcaauaucgacauuuucaacccuaaauacgauuguaagaucaugaccucuaagacagacgucuccagcucugugauuacgucccugggggccaucguuagcugcuauggaaaaaccaagugcacagcuuccaauaaaaaccgcggcaucauuaagaccuuuucuaaugggugugauuacgugagcaacaaaggagucgacacaguguccguuggcaauacccucuauuacgugaacaagcaagaaggcaagucucuguaugucaaaggggagcccaucauuaauuucuacgacccucuuguguuucccagcgaugaguucgacgccuccaucagccaggugaacgaaaagauuaaucagucucuggccuucaucagaaaauccgaugaacuccugcacaacguuaaugucggaaagagcacgaccaacauuaugaucacaaccaucauuaucgugauuaucgugauucugcuucuccugaucgcugucggccuguuucucuacugcaaagcgcggucuacaccggugacccuguccaaggaccagcuuagcgggaucaauaacauugccuucucuaacugaggacuaguaauaaggaaacuguaugaaugucugugggcaggaagugaagagauccuucuguaaagguuuuuggaauuaugucugcugaauaauaaacuuuuuugaaauaauaaaucugguagaaaaaugagaucuaaaaaaaaaaaaaaaaaaaaaaaaaaaaaaaaaaaaaaaaaaaaaaaaaaaaaaaaaaaaaaaaugcaucccccccccccccccccccccccccccccccaaaggcucuuuucagagccaccagaauu

SEQ ID NO: 11997 - RNA, 2084 nt, Artificial Sequence
  mRNA product Design g-2 comprising derived and/or modified sequence from HRSV(Memphis-37)__AIY60640.1__F0 (opt6)
gggagaguccgcucagccagguugcagaagcggcuuagcguguguccuaaucuucucucugcguguagguaggccugugccgcaaacaagcuuaccauggaacugccuauucuaaaaacaaaugccauaacaacaauucuugcagcaguaacauuauguuuugcaucaucacaaaacauuacagaagaauuuuaccaauccacuugcucagccguaucaaaaggauaccuaucagccuuaagaacagguugguacaccucaguaauaaccauagaacuaucaaacauaaaagaaaacaaaugcaaugguacugaugcaaaagucaaacuaaucaaacaagaacuggacaaauacaaaaaugcaguaaccgaacuacaacuccuaaugcaauccacaccugcagccaacaacagagcaagacgcgaacuaccaagauuuaugaauuacacauuaaacaacaccaagaacaacaauguaacucucucaaaaaaaagaaaaagacgcuuucuagguuuccuccuaggcgucggaucugcaauagccucaggaauagcaguaucaaaaguucuacaccuagaaggagaaguaaacaaaauuaaaaacgcauuacuaucaaccaacaaagcaguuguaucccuuucaaauggagucucuguacuuacaucaaaaguacucgaccuaaaaaacuauauagacaaacaacuacucccaauagucaauaagcaaucaugcagcauaucaaacauagaaacaguuauagaauuucaacaaaaaaacaacagacuacucgaaauaaccagagaauuuagcgucaacgcaggcguaaccacaccgguauccacauacaugcuuacaaacucagaacuccucucacuaauaaacgacaugccaauaacuaaugaccaaaaaaaacuaaugucaaacaauguccaaauaguccgucaacaaucauacucaauaaugucaauaauaaaagaagaaguauuagcauauguaguccaacuaccauuauacggcguuauagacacaccuuguuggaaacuucacacauccccacucuguacaaccaacacaaaagaagguuccaauauaugccuaacuagaaccgacagaggaugguauugcgacaacgcaggaucuguaucauucuuuccccaagcagaaacauguaaaguacaaaguaaccgcguauucugcgacaccaugaacucauuaacccucccauccgaaguuaauuuaugcaauauagacauauuuaauccuaaauacgacugcaaaauaaugacaucaaaaacagacguuaguuccuccguaaucacaucuuugggcgcaauagucucaugcuauggaaaaacaaaaugcacagccucaaacaaaaauagaggaauaauaaaaacauucagcaacggcugugauuauguauccaacaaaggaguagacacaguauccguaggcaauacccuuuacuacguuaauaaacaagaaggaaaaucauuauacgucaaaggagaaccuaucauaaauuucuacgacccauuaguauucccuucagacgaauuugaugccucaauaucccaagucaaugaaaaaaucaaccaaucacuagccuuuauccgcaaaucagacgaauuacuacacaacguaaacguaggcaaaucaacaacuaauauaaugauaacaacaauaauaauaguaauuauaguaauauuauuacuacuaaucgccguagguuuauucuuauacuguaaagcacgaucaacaccaguuacacucucaaaagaucaacuaucaggaauaaacaacauagcauuuuccaauuaaggacuaguaauaaggaaacuguaugaaugucugugggcaggaagugaagagauccuucuguaaagguuuuuggaauuaugucugcugaauaauaaacuuuuuugaaauaauaaaucugguagaaaaaugagaucuaaaaaaaaaaaaaaaaaaaaaaaaaaaaaaaaaaaaaaaaaaaaaaaaaaaaaaaaaaaaaaaaugcaucccccccccccccccccccccccccccccccaaaggcucuuuucagagccaccagaauu

SEQ ID NO: 11998 - RNA, 2084 nt, Artificial Sequence
  mRNA product Design g-2 comprising derived and/or modified sequence from HRSV(Memphis-37)__AIY60640.1__F0 (opt11)
gggagaguccgcucagccagguugcagaagcggcuuagcguguguccuaaucuucucucugcguguagguaggccugugccgcaaacaagcuuaccauggaacuccccauccucaaaacaaacgccauaaccacuauccucgccgccgucacccucugcuucgccuccucccaaaacaucacagaggaguucuaccaauccacaugcuccgccgucuccaaaggcuaccucagcgcccuacguaccggcugguacaccagcgucaucacaauagaacucuccaacaucaaggaaaacaaaugcaacggcaccgaugccaaaguaaaacucaucaaacaagaacucgauaaauacaaaaacgccgucaccgaacuacaacuccuaaugcaaagcacacccgccgccaacaacagagcacggcgcgaacugccccgcuucaugaacuacacccucaacaacaccaaaaauaacaacgucacccuauccaagaaacgcaaacgccgauuccucgguuuccuacucggcguaggaagcgccauagccucaggcaucgccgucuccaaaguccuccaucuggaaggcgaagucaacaaaaucaaaaacgcacucuuauccaccaacaaagccgucgucucccucucgaacggggucuccguccuuaccuccaaaguccucgaccuuaaaaacuacaucgacaaacaacuacuaccaauagucaauaaacaauccugcuccaucucaaacauagaaaccgucauagaguuccaacagaagaacaaucgccuccucgaaauaacucgcgaguucuccgucaacgcaggcgucacgaccccugucucaacauacaugcuaacuaacucagaacuccuaagccuaaucaacgacaugcccaucacaaacgaccaaaagaaacucaugagcaacaauguccagauagucagacagcaauccuauagcaucaugucuauaauaaaagaagaagugcucgccuacguaguccaacucccucuuuacggcgucauagacacacccugcuggaaacuccacacaucuccucucugcaccaccaacacaaaagaaggcagcaacaucugccugacccgaaccgaccgcggaugguacugcgacaacgcuggcuccgugucuuucuuuccccaagccgaaaccugcaaaguccaguccaaccgcgucuucugcgacacaaugaacucccucacccuacccuccgaaguuaaccucugcaacaucgacaucuucaauccaaaauacgacugcaaaaucaugaccucgaaaacggacguauccuccuccgucauaacaucacuuggagccaucguuagcugcuacggaaaaaccaaauguaccgccuccaacaaaaaccgcggaauaaucaaaacauucuccaacggcugcgacuacguaagcaacaaaggggucgauacugucuccguagguaacacccuauacuacgucaacaaacaagaaggaaaaucacuauacguuaaaggcgaacccauuaucaacuucuacgacccccucguuuucccauccgacgaguucgacgccuccauaagccaaguuaacgaaaagauaaaccaaucgcucgcauucauccgcaaauccgacgaacuccuacacaacgucaacgugggcaaauccacaacaaacaucaugaucaccaccaucauuaucgucauaauagucauccuccuccugcucaucgccgugggacuauuccuauacugcaaagcccgcucgacgcccgucacacuuuccaaagaccaacuaagcggaaucaacaacauagcguucagcaauuaaggacuaguaauaaggaaacuguaugaaugucugugggcaggaagugaagagauccuucuguaaagguuuuuggaauuaugucugcugaauaauaaacuuuuuugaaauaauaaaucugguagaaaaaugagaucuaaaaaaaaaaaaaaaaaaaaaaaaaaaaaaaaaaaaaaaaaaaaaaaaaaaaaaaaaaaaaaaaugcaucccccccccccccccccccccccccccccccaaaggcucuuuucagagccaccagaauu

SEQ ID NO: 11999 - RNA, 2316 nt, Artificial Sequence
  mRNA product Design g-3 comprising derived and/or modified sequence from HRSV(Memphis-37)__AIY60640.1__F0 (wt)
gggagaguccgcucagccagguugcagaagcggcuuagcguguguccuaaucuucucucugcguguagguaggccugugccgcaaacaagcuuaccauggaguugccaauccucaaaacaaaugcaauuaccacaauccuugcugcagucacacucuguuucgcuuccagucaaaacaucacugaagaauuuuaucaaucaacaugcagugcaguuagcaaaggcuaucuuagugcuuuaagaacugguugguauacuaguguuauaacuauagaauuaaguaauaucaaggaaaauaaguguaauggaacagaugcuaagguaaaauugauaaaacaagaauuagauaaauauaaaaaugcuguaacagaauugcaguugcucaugcaaagcacaccagcagccaacaaucgagccagaagagaacuaccaagguuuaugaauuauacacucaacaauaccaaaaauaacaauguaacauuaagcaagaaaaggaaaagaagauuucuuggcuuuuuguuagguguuggaucugcaaucgccaguggcauugcuguaucuaaaguccugcaccuagaaggggaagugaacaaaaucaaaaaugcucuacuauccacaaacaaggcuguagucagcuuaucaaauggaguuagugucuuaaccagcaaaguguuagaccucaaaaacuauauagauaaacaguuguuacccauugugaacaagcaaagcugcagcauaucaaacauugaaacugugauagaauuccaacaaaagaacaacagacuacuagagauuaccagggaauuuaguguuaaugcagguguaacuacaccuguaagcacuuauauguuaacaaauagugaauuauuaucauuaaucaaugauaugccuauaacaaaugaucagaaaaaguuaauguccaacaauguucaaauaguuagacagcaaaguuacucuaucauguccauaauaaaggaggaagucuuagcauauguaguucaauuaccacuauaugguguaauagauacaccuuguuggaaacuacacacauccccucuaugcacaaccaacacaaaggaaggguccaacaucuguuuaacaagaaccgacagaggaugguacugugacaaugcaggaucagugucuuucuucccacaagcugaaacaugcaaaguucaaucgaaucgaguauuuugugacacaaugaacagucuaacauuaccaagugaaguaaaucucugcaacauugacauauucaacccuaaauaugauugcaaaauuaugacuucaaaaacagaugugagcagcuccguuaucacaucucuaggagccauugugucaugcuauggcaaaacuaaauguacagcauccaauaaaaaucguggaaucauaaagacauuuucuaacgggugugauuauguaucaaauaaggggguggacacuguaucuguagguaauacauuauauuauguaaauaagcaagaaggaaaaagccucuauguaaaaggugaaccaauaauaaauuucuaugacccauuaguguucccuucugaugaauuugaugcaucaauaucucaagucaaugagaagauuaaccagagccuagcauuuauucguaaauccgaugaauuauuacauaauguaaauguugguaaauccaccacaaauaucaugauaacuacuauaauuauagugauuauaguaauauuguuauuauuaauugcaguugggcuguuccuauacugcaaggccagaagcacaccagucacacuaagcaaggaucaacugagugguauaaauaauauugcauuuaguaacugaggacuagugaagggaacacccaaauuuaauucagccuuaagcacaauuaauuaagagugaaacguaauuguacaagcaguuggucacccaccauagggcaugaucaacaccgcaaccuuuccuuuuucccccagugauucugaaaaaccccucuucccuucagcuugcuuagauguuccaaauuuaguaagcuuaaggcggccuacagaagaaaaagaaaaaaaaggccacaaaaguucccucucacuuucaguaaauaaaauaaaagcagcaacagaaauaaagaaauaaaugaaauucaaaaugaaauaaauauuguguugugcagcauuaaaaaaucaauaaaaauuaaaaaugagcaagaucuaaaaaaaaaaaaaaaaaaaaaaaaaaaaaaaaaaaaaaaaaaaaaaaaaaaaaaaaaaaaaaaaugcaucccccccccccccccccccccccccccccccaaaggcucuuuucagagccaccagaauu

SEQ ID NO: 12000 - RNA, 2316 nt, Artificial Sequence
  mRNA product Design g-3 comprising derived and/or modified sequence from HRSV(Memphis-37)__AIY60640.1__F0 (opt1)
gggagaguccgcucagccagguugcagaagcggcuuagcguguguccuaaucuucucucugcguguagguaggccugugccgcaaacaagcuuaccauggagcugcccauccucaagaccaacgccaucaccacgauccuggccgcggugacccugugcuucgccagcucccagaacaucaccgaggaguucuaccagagcacgugcuccgccgucagcaagggcuaccucuccgcccugcgcaccgggugguacaccagcgugaucaccaucgagcuguccaacaucaaggagaacaagugcaacggcaccgacgccaaggugaagcucaucaagcaggagcuggacaaguacaagaacgcggucacggagcugcagcuccugaugcagagcaccccggccgccaacaaccgggcccgccgggagcugccccgcuucaugaacuacacccucaacaacaccaagaacaacaacgugacgcuguccaagaagcggaagcgccgguuccugggguuccuccugggcguggggagcgcgaucgccuccggcaucgccgucagcaaggugcugcaccucgagggcgaggugaacaagaucaagaacgcccugcuguccaccaacaaggccgucgugagccucuccaacggggugagcguccugaccuccaaggugcuggaccucaagaacuacaucgacaagcagcugcugcccaucgugaacaagcagagcugcuccaucagcaacaucgagaccgucaucgaguuccagcagaagaacaaccgccuccuggagaucacgcgggaguucagcgugaacgcgggcgugaccacccccgucuccaccuacaugcugacgaacagcgagcuccugucccugaucaacgacaugccgaucaccaacgaccagaagaagcucaugagcaacaacgugcagaucgugcgccagcaguccuacagcaucauguccaucaucaaggaggagguccuggccuacguggugcagcugccccucuacggggucaucgacacccccugcuggaagcugcacaccagcccccugugcacgaccaacaccaaggagggcuccaacaucugccucacccggacggaccgcgggugguacugcgacaacgccggcagcguguccuucuucccgcaggccgagaccugcaagguccagagcaaccggguguucugcgacaccaugaacucccugacccugcccagcgaggugaaccucugcaacaucgacaucuucaaccccaaguacgacugcaagaucaugacguccaagaccgacgucagcuccagcgugaucaccucccugggcgccaucgugagcugcuacgggaagaccaagugcacggcgagcaacaagaaccgcggcaucaucaagaccuucuccaacgggugcgacuacgucagcaacaagggcguggacaccguguccgucggcaacacccuguacuacgugaacaagcaggagggcaagagccucuacgugaagggggagcccaucaucaacuucuacgacccgcuggucuuccccuccgacgaguucgacgccagcaucucccaggugaacgagaagaucaaccagagccuggccuucauccggaaguccgacgagcuccugcacaacgugaacgucggcaagagcaccacgaacaucaugaucaccaccaucaucaucgugaucaucgugauccugcugcuccugaucgccgucgggcuguuccucuacugcaaggcccgcuccacccccgugacgcugagcaaggaccagcuguccgggaucaacaacaucgcguucagcaacugaggacuagugaagggaacacccaaauuuaauucagccuuaagcacaauuaauuaagagugaaacguaauuguacaagcaguuggucacccaccauagggcaugaucaacaccgcaaccuuuccuuuuucccccagugauucugaaaaaccccucuucccuucagcuugcuuagauguuccaaauuuaguaagcuuaaggcggccuacagaagaaaaagaaaaaaaaggccacaaaaguucccucucacuuucaguaaauaaaauaaaagcagcaacagaaauaaagaaauaaaugaaauucaaaaugaaauaaauauuguguugugcagcauuaaaaaaucaauaaaaauuaaaaaugagcaagaucuaaaaaaaaaaaaaaaaaaaaaaaaaaaaaaaaaaaaaaaaaaaaaaaaaaaaaaaaaaaaaaaaugcaucccccccccccccccccccccccccccccccaaaggcucuuuucagagccaccagaauu

SEQ ID NO: 12001 - RNA, 2316 nt, Artificial Sequence
  mRNA product Design g-3 comprising derived and/or modified sequence from HRSV(Memphis-37)__AIY60640.1__F0 (opt2)
gggagaguccgcucagccagguugcagaagcggcuuagcguguguccuaaucuucucucugcguguagguaggccugugccgcaaacaagcuuaccauggagcuccccauccucaagaccaacgccaucaccaccauccucgccgccgucacccucugcuucgccuccucccagaacaucaccgaggaguucuaccaguccaccugcuccgccgucuccaagggcuaccucuccgcccuccgcaccggcugguacaccuccgucaucaccaucgagcucuccaacaucaaggagaacaagugcaacggcaccgacgccaaggucaagcucaucaagcaggagcucgacaaguacaagaacgccgucaccgagcuccagcuccucaugcaguccacccccgccgccaacaaccgcgcccgccgcgagcucccccgcuucaugaacuacacccucaacaacaccaagaacaacaacgucacccucuccaagaagcgcaagcgccgcuuccucggcuuccuccucggcgucggcuccgccaucgccuccggcaucgccgucuccaagguccuccaccucgagggcgaggucaacaagaucaagaacgcccuccucuccaccaacaaggccgucgucucccucuccaacggcgucuccguccucaccuccaagguccucgaccucaagaacuacaucgacaagcagcuccuccccaucgucaacaagcaguccugcuccaucuccaacaucgagaccgucaucgaguuccagcagaagaacaaccgccuccucgagaucacccgcgaguucuccgucaacgccggcgucaccacccccgucuccaccuacaugcucaccaacuccgagcuccucucccucaucaacgacaugcccaucaccaacgaccagaagaagcucauguccaacaacguccagaucguccgccagcaguccuacuccaucauguccaucaucaaggaggagguccucgccuacgucguccagcucccccucuacggcgucaucgacacccccugcuggaagcuccacaccuccccccucugcaccaccaacaccaaggagggcuccaacaucugccucacccgcaccgaccgcggcugguacugcgacaacgccggcuccgucuccuucuucccccaggccgagaccugcaagguccaguccaaccgcgucuucugcgacaccaugaacucccucacccuccccuccgaggucaaccucugcaacaucgacaucuucaaccccaaguacgacugcaagaucaugaccuccaagaccgacgucuccuccuccgucaucaccucccucggcgccaucgucuccugcuacggcaagaccaagugcaccgccuccaacaagaaccgcggcaucaucaagaccuucuccaacggcugcgacuacgucuccaacaagggcgucgacaccgucuccgucggcaacacccucuacuacgucaacaagcaggagggcaagucccucuacgucaagggcgagcccaucaucaacuucuacgacccccucgucuuccccuccgacgaguucgacgccuccaucucccaggucaacgagaagaucaaccagucccucgccuucauccgcaaguccgacgagcuccuccacaacgucaacgucggcaaguccaccaccaacaucaugaucaccaccaucaucaucgucaucaucgucauccuccuccuccucaucgccgucggccucuuccucuacugcaaggcccgcuccacccccgucacccucuccaaggaccagcucuccggcaucaacaacaucgccuucuccaacugaggacuagugaagggaacacccaaauuuaauucagccuuaagcacaauuaauuaagagugaaacguaauuguacaagcaguuggucacccaccauagggcaugaucaacaccgcaaccuuuccuuuuucccccagugauucugaaaaaccccucuucccuucagcuugcuuagauguuccaaauuuaguaagcuuaaggcggccuacagaagaaaaagaaaaaaaaggccacaaaaguucccucucacuuucaguaaauaaaauaaaagcagcaacagaaauaaagaaauaaaugaaauucaaaaugaaauaaauauuguguugugcagcauuaaaaaaucaauaaaaauuaaaaaugagcaagaucuaaaaaaaaaaaaaaaaaaaaaaaaaaaaaaaaaaaaaaaaaaaaaaaaaaaaaaaaaaaaaaaaugcaucccccccccccccccccccccccccccccccaaaggcucuuuucagagccaccagaauu

SEQ ID NO: 12002 - RNA, 2316 nt, Artificial Sequence
  mRNA product Design g-3 comprising derived and/or modified sequence from HRSV(Memphis-37)__AIY60640.1__F0 (opt3)
gggagaguccgcucagccagguugcagaagcggcuuagcguguguccuaaucuucucucugcguguagguaggccugugccgcaaacaagcuuaccauggagcugcccauccucaagaccaacgccauuacaacuauacuugcugcagugacgcugugcuucgccagcucccagaauaucaccgaagaguuuuaccaaucuacauguucagcggucaguaaaggcuauuugagcgcuuuaagaacugggugguacaccuccguuauuacaaucgaacugucuaacauuaaggagaauaaaugcaacggaaccgacgccaaggugaaacuaaucaagcaggaacucgauaaguauaaaaaugcaguaacugagcugcagcuucugaugcagucgaccccugccgcuaacaauagggcacggcgcgaguugccacgauucaugaacuacacacucaauaacacgaagaauaacaaugugacucugagcaaaaagcguaaaagaagguuucuggguuuccucuuaggcgucgggucagccauagcuaguggaaucgccguguccaagguucugcaccuugaaggcgaggugaacaagauuaaaaaugcguugcugucuaccaacaaggcagucgugagccuauccaacgguguaucaguucucacaaguaaagugcuggaccuuaagaauuauaucgauaaacaacuguugccgauugucaacaagcagagcuguucuaucuccaauauagaaacugugauugaguuucagcagaaaaacaaucggcuccuggagaucacccgcgaguucucagugaacgccggggucacaacccccguuagcacguacauguuaacuaauagugaacugcucucucuuauuaacgacaugccuaucacaaaugaucaaaagaagcugauguccaacaaugugcagaucguaagacagcagagcuauucgauuaugucuauaaucaaagaagagguguuggcuuacgucgugcaacuaccacuguacggaguuauugacacccccugcuggaagcuccauacuuccccucuguguacaaccaacacgaaagaaggcucaaauaucugccuuaccaggacagaucggggcugguauugugacaacgccgggagugugagcuuuuucccacaggcagagacuugcaagguccaguccaaucgcguguuuugugauaccaugaacucucugacauugcccagcgagguaaaccucugcaauauagacauuuucaacccuaaauacgauuguaagaucaugacuucaaagaccgacguuaguuccagcgugaucacaucucugggagcuauugucucaugcuaugguaaaaccaagugcacugccaguaauaaaaaccgaggcaucauuaagacguuuagcaaugggugugauuacguguccaacaaaggagucgacacagugucuguuggcaauaccuuauauuacgugaacaagcaagaagguaagucgcuguauguaaaaggggagccaauaaucaauuucuacgacccgcuagucuuucccagcgaugaguucgacgcguccauuucacaggugaacgaaaagaucaaucagagucucgccuucaucagaaaaucugaugaacugcuucacaacguuaaugugggaaagagcacuaccaacauuaugauaacaaccaucauuaucgucauuaucgugauauugcugcuccugaucgcaguaggccuuuuucuguacugcaaagcuagguccacuccugugacauugucaaaggaccagcucagcggcauuaauaacaucgccuucucuaacugaggacuagugaagggaacacccaaauuuaauucagccuuaagcacaauuaauuaagagugaaacguaauuguacaagcaguuggucacccaccauagggcaugaucaacaccgcaaccuuuccuuuuucccccagugauucugaaaaaccccucuucccuucagcuugcuuagauguuccaaauuuaguaagcuuaaggcggccuacagaagaaaaagaaaaaaaaggccacaaaaguucccucucacuuucaguaaauaaaauaaaagcagcaacagaaauaaagaaauaaaugaaauucaaaaugaaauaaauauuguguugugcagcauuaaaaaaucaauaaaaauuaaaaaugagcaagaucuaaaaaaaaaaaaaaaaaaaaaaaaaaaaaaaaaaaaaaaaaaaaaaaaaaaaaaaaaaaaaaaaugcaucccccccccccccccccccccccccccccccaaaggcucuuuucagagccaccagaauu

SEQ ID NO: 12003 - RNA, 2316 nt, Artificial Sequence
  mRNA product Design g-3 comprising derived and/or modified sequence from HRSV(Memphis-37)__AIY60640.1__F0 (opt4)
gggagaguccgcucagccagguugcagaagcggcuuagcguguguccuaaucuucucucugcguguagguaggccugugccgcaaacaagcuuaccauggagcugcccauccugaagaccaacgccaucaccaccauccuggccgccgugacccugugcuucgccagcagccagaacaucaccgaggaguucuaccagagcaccugcagcgccgugagcaagggcuaccugagcgcccugagaaccggcugguacaccagcgugaucaccaucgagcugagcaacaucaaggagaacaagugcaacggcaccgacgccaaggugaagcugaucaagcaggagcuggacaaguacaagaacgccgugaccgagcugcagcugcugaugcagagcacccccgccgccaacaacagagccagaagagagcugcccagauucaugaacuacacccugaacaacaccaagaacaacaacgugacccugagcaagaagagaaagagaagauuccugggcuuccugcugggcgugggcagcgccaucgccagcggcaucgccgugagcaaggugcugcaccuggagggcgaggugaacaagaucaagaacgcccugcugagcaccaacaaggccguggugagccugagcaacggcgugagcgugcugaccagcaaggugcuggaccugaagaacuacaucgacaagcagcugcugcccaucgugaacaagcagagcugcagcaucagcaacaucgagaccgugaucgaguuccagcagaagaacaacagacugcuggagaucaccagagaguucagcgugaacgccggcgugaccacccccgugagcaccuacaugcugaccaacagcgagcugcugagccugaucaacgacaugcccaucaccaacgaccagaagaagcugaugagcaacaacgugcagaucgugagacagcagagcuacagcaucaugagcaucaucaaggaggaggugcuggccuacguggugcagcugccccuguacggcgugaucgacacccccugcuggaagcugcacaccagcccccugugcaccaccaacaccaaggagggcagcaacaucugccugaccagaaccgacagaggcugguacugcgacaacgccggcagcgugagcuucuucccccaggccgagaccugcaaggugcagagcaacagaguguucugcgacaccaugaacagccugacccugcccagcgaggugaaccugugcaacaucgacaucuucaaccccaaguacgacugcaagaucaugaccagcaagaccgacgugagcagcagcgugaucaccagccugggcgccaucgugagcugcuacggcaagaccaagugcaccgccagcaacaagaacagaggcaucaucaagaccuucagcaacggcugcgacuacgugagcaacaagggcguggacaccgugagcgugggcaacacccuguacuacgugaacaagcaggagggcaagagccuguacgugaagggcgagcccaucaucaacuucuacgacccccugguguuccccagcgacgaguucgacgccagcaucagccaggugaacgagaagaucaaccagagccuggccuucaucagaaagagcgacgagcugcugcacaacgugaacgugggcaagagcaccaccaacaucaugaucaccaccaucaucaucgugaucaucgugauccugcugcugcugaucgccgugggccuguuccuguacugcaaggccagaagcacccccgugacccugagcaaggaccagcugagcggcaucaacaacaucgccuucagcaacugaggacuagugaagggaacacccaaauuuaauucagccuuaagcacaauuaauuaagagugaaacguaauuguacaagcaguuggucacccaccauagggcaugaucaacaccgcaaccuuuccuuuuucccccagugauucugaaaaaccccucuucccuucagcuugcuuagauguuccaaauuuaguaagcuuaaggcggccuacagaagaaaaagaaaaaaaaggccacaaaaguucccucucacuuucaguaaauaaaauaaaagcagcaacagaaauaaagaaauaaaugaaauucaaaaugaaauaaauauuguguugugcagcauuaaaaaaucaauaaaaauuaaaaaugagcaagaucuaaaaaaaaaaaaaaaaaaaaaaaaaaaaaaaaaaaaaaaaaaaaaaaaaaaaaaaaaaaaaaaaugcaucccccccccccccccccccccccccccccccaaaggcucuuuucagagccaccagaauu

SEQ ID NO: 12004 - RNA, 2316 nt, Artificial Sequence
  mRNA product Design g-3 comprising derived and/or modified sequence from HRSV(Memphis-37)__AIY60640.1__F0 (opt5)
gggagaguccgcucagccagguugcagaagcggcuuagcguguguccuaaucuucucucugcguguagguaggccugugccgcaaacaagcuuaccauggagcugcccauccucaagaccaacgccauuacaacgauccuggcugccgugacccuuugcuucgcgagcucccagaauauuacagaagaguuuuaccaaucuaccuguagcgcugucuccaaaggcuaucugucugcccucagaacagggugguacaccagcguuaucacaauugaacuguccaacaucaaggagaauaaaugcaacggaaccgacgccaaggugaaacuuaucaagcaggaacuggauaaguauaaaaaugcugugacggagcuccagcugcugaugcagucuaccccugccgcuaacaaucgggcccgcagagagcucccgcgguucaugaacuacacacugaauaacaccaagaauaacaaugucacacuuagcaaaaagcgcaaaagacgguuucugggcuuccuccugggggugggauccgcgauugccagcggcaucgcuguuucuaaggugcuucaccuggaaggggaggucaacaagauuaaaaaugcccuccuguccaccaacaaggcugugguuagccugucuaacggaguguccguccucacgagcaaagugcuggaccuuaagaauuauaucgauaaacaacugcuccccauugugaacaagcagucuuguuccaucagcaauauugaaacagucaucgaguuucagcagaaaaacaaucgccugcuugagaucaccagagaauuuuccguuaacgccggcgugacaaccccugugucuaccuacaugcugacaaauagcgagcuccugucccugauuaacgacaugcccaucacgaaugaucaaaagaagcucaugagcaacaauguccagauugugcggcagcagucuuauuccaucaugagcauuaucaaagaagagguucuggcguacgugguccaacuuccucuguacggcgugaucgacacccccugcuggaagcuccauacaucuccucuguguaccacaaacaccaaagaagggagcaauauuugccuuacgcgcacagauagaggaugguauugugacaacgccggcuccguuucuuucuucccgcaggcugagaccugcaaggugcagagcaaucgggucuuuugugauaccaugaacucccugacacuccccagcgaggugaaccugugcaauaucgacauuuucaacccuaaauacgauuguaagaucaugaccucuaagacagacgucuccagcucugugauuacgucccugggggccaucguuagcugcuauggaaaaaccaagugcacagcuuccaauaaaaaccgcggcaucauuaagaccuuuucuaaugggugugauuacgugagcaacaaaggagucgacacaguguccguuggcaauacccucuauuacgugaacaagcaagaaggcaagucucuguaugucaaaggggagcccaucauuaauuucuacgacccucuuguguuucccagcgaugaguucgacgccuccaucagccaggugaacgaaaagauuaaucagucucuggccuucaucagaaaauccgaugaacuccugcacaacguuaaugucggaaagagcacgaccaacauuaugaucacaaccaucauuaucgugauuaucgugauucugcuucuccugaucgcugucggccuguuucucuacugcaaagcgcggucuacaccggugacccuguccaaggaccagcuuagcgggaucaauaacauugccuucucuaacugaggacuagugaagggaacacccaaauuuaauucagccuuaagcacaauuaauuaagagugaaacguaauuguacaagcaguuggucacccaccauagggcaugaucaacaccgcaaccuuuccuuuuucccccagugauucugaaaaaccccucuucccuucagcuugcuuagauguuccaaauuuaguaagcuuaaggcggccuacagaagaaaaagaaaaaaaaggccacaaaaguucccucucacuuucaguaaauaaaauaaaagcagcaacagaaauaaagaaauaaaugaaauucaaaaugaaauaaauauuguguugugcagcauuaaaaaaucaauaaaaauuaaaaaugagcaagaucuaaaaaaaaaaaaaaaaaaaaaaaaaaaaaaaaaaaaaaaaaaaaaaaaaaaaaaaaaaaaaaaaugcaucccccccccccccccccccccccccccccccaaaggcucuuuucagagccaccagaauu

SEQ ID NO: 12005 - RNA, 2316 nt, Artificial Sequence
  mRNA product Design g-3 comprising derived and/or modified sequence from HRSV(Memphis-37)__AIY60640.1__F0 (opt6)
gggagaguccgcucagccagguugcagaagcggcuuagcguguguccuaaucuucucucugcguguagguaggccugugccgcaaacaagcuuaccauggaacugccuauucuaaaaacaaaugccauaacaacaauucuugcagcaguaacauuauguuuugcaucaucacaaaacauuacagaagaauuuuaccaauccacuugcucagccguaucaaaaggauaccuaucagccuuaagaacagguugguacaccucaguaauaaccauagaacuaucaaacauaaaagaaaacaaaugcaaugguacugaugcaaaagucaaacuaaucaaacaagaacuggacaaauacaaaaaugcaguaaccgaacuacaacuccuaaugcaauccacaccugcagccaacaacagagcaagacgcgaacuaccaagauuuaugaauuacacauuaaacaacaccaagaacaacaauguaacucucucaaaaaaaagaaaaagacgcuuucuagguuuccuccuaggcgucggaucugcaauagccucaggaauagcaguaucaaaaguucuacaccuagaaggagaaguaaacaaaauuaaaaacgcauuacuaucaaccaacaaagcaguuguaucccuuucaaauggagucucuguacuuacaucaaaaguacucgaccuaaaaaacuauauagacaaacaacuacucccaauagucaauaagcaaucaugcagcauaucaaacauagaaacaguuauagaauuucaacaaaaaaacaacagacuacucgaaauaaccagagaauuuagcgucaacgcaggcguaaccacaccgguauccacauacaugcuuacaaacucagaacuccucucacuaauaaacgacaugccaauaacuaaugaccaaaaaaaacuaaugucaaacaauguccaaauaguccgucaacaaucauacucaauaaugucaauaauaaaagaagaaguauuagcauauguaguccaacuaccauuauacggcguuauagacacaccuuguuggaaacuucacacauccccacucuguacaaccaacacaaaagaagguuccaauauaugccuaacuagaaccgacagaggaugguauugcgacaacgcaggaucuguaucauucuuuccccaagcagaaacauguaaaguacaaaguaaccgcguauucugcgacaccaugaacucauuaacccucccauccgaaguuaauuuaugcaauauagacauauuuaauccuaaauacgacugcaaaauaaugacaucaaaaacagacguuaguuccuccguaaucacaucuuugggcgcaauagucucaugcuauggaaaaacaaaaugcacagccucaaacaaaaauagaggaauaauaaaaacauucagcaacggcugugauuauguauccaacaaaggaguagacacaguauccguaggcaauacccuuuacuacguuaauaaacaagaaggaaaaucauuauacgucaaaggagaaccuaucauaaauuucuacgacccauuaguauucccuucagacgaauuugaugccucaauaucccaagucaaugaaaaaaucaaccaaucacuagccuuuauccgcaaaucagacgaauuacuacacaacguaaacguaggcaaaucaacaacuaauauaaugauaacaacaauaauaauaguaauuauaguaauauuauuacuacuaaucgccguagguuuauucuuauacuguaaagcacgaucaacaccaguuacacucucaaaagaucaacuaucaggaauaaacaacauagcauuuuccaauuaaggacuagugaagggaacacccaaauuuaauucagccuuaagcacaauuaauuaagagugaaacguaauuguacaagcaguuggucacccaccauagggcaugaucaacaccgcaaccuuuccuuuuucccccagugauucugaaaaaccccucuucccuucagcuugcuuagauguuccaaauuuaguaagcuuaaggcggccuacagaagaaaaagaaaaaaaaggccacaaaaguucccucucacuuucaguaaauaaaauaaaagcagcaacagaaauaaagaaauaaaugaaauucaaaaugaaauaaauauuguguugugcagcauuaaaaaaucaauaaaaauuaaaaaugagcaagaucuaaaaaaaaaaaaaaaaaaaaaaaaaaaaaaaaaaaaaaaaaaaaaaaaaaaaaaaaaaaaaaaaugcaucccccccccccccccccccccccccccccccaaaggcucuuuucagagccaccagaauu

SEQ ID NO: 12006 - RNA, 2316 nt, Artificial Sequence
  mRNA product Design g-3 comprising derived and/or modified sequence from HRSV(Memphis-37)__AIY60640.1__F0 (opt11)
gggagaguccgcucagccagguugcagaagcggcuuagcguguguccuaaucuucucucugcguguagguaggccugugccgcaaacaagcuuaccauggaacuccccauccucaaaacaaacgccauaaccacuauccucgccgccgucacccucugcuucgccuccucccaaaacaucacagaggaguucuaccaauccacaugcuccgccgucuccaaaggcuaccucagcgcccuacguaccggcugguacaccagcgucaucacaauagaacucuccaacaucaaggaaaacaaaugcaacggcaccgaugccaaaguaaaacucaucaaacaagaacucgauaaauacaaaaacgccgucaccgaacuacaacuccuaaugcaaagcacacccgccgccaacaacagagcacggcgcgaacugccccgcuucaugaacuacacccucaacaacaccaaaaauaacaacgucacccuauccaagaaacgcaaacgccgauuccucgguuuccuacucggcguaggaagcgccauagccucaggcaucgccgucuccaaaguccuccaucuggaaggcgaagucaacaaaaucaaaaacgcacucuuauccaccaacaaagccgucgucucccucucgaacggggucuccguccuuaccuccaaaguccucgaccuuaaaaacuacaucgacaaacaacuacuaccaauagucaauaaacaauccugcuccaucucaaacauagaaaccgucauagaguuccaacagaagaacaaucgccuccucgaaauaacucgcgaguucuccgucaacgcaggcgucacgaccccugucucaacauacaugcuaacuaacucagaacuccuaagccuaaucaacgacaugcccaucacaaacgaccaaaagaaacucaugagcaacaauguccagauagucagacagcaauccuauagcaucaugucuauaauaaaagaagaagugcucgccuacguaguccaacucccucuuuacggcgucauagacacacccugcuggaaacuccacacaucuccucucugcaccaccaacacaaaagaaggcagcaacaucugccugacccgaaccgaccgcggaugguacugcgacaacgcuggcuccgugucuuucuuuccccaagccgaaaccugcaaaguccaguccaaccgcgucuucugcgacacaaugaacucccucacccuacccuccgaaguuaaccucugcaacaucgacaucuucaauccaaaauacgacugcaaaaucaugaccucgaaaacggacguauccuccuccgucauaacaucacuuggagccaucguuagcugcuacggaaaaaccaaauguaccgccuccaacaaaaaccgcggaauaaucaaaacauucuccaacggcugcgacuacguaagcaacaaaggggucgauacugucuccguagguaacacccuauacuacgucaacaaacaagaaggaaaaucacuauacguuaaaggcgaacccauuaucaacuucuacgacccccucguuuucccauccgacgaguucgacgccuccauaagccaaguuaacgaaaagauaaaccaaucgcucgcauucauccgcaaauccgacgaacuccuacacaacgucaacgugggcaaauccacaacaaacaucaugaucaccaccaucauuaucgucauaauagucauccuccuccugcucaucgccgugggacuauuccuauacugcaaagcccgcucgacgcccgucacacuuuccaaagaccaacuaagcggaaucaacaacauagcguucagcaauuaaggacuagugaagggaacacccaaauuuaauucagccuuaagcacaauuaauuaagagugaaacguaauuguacaagcaguuggucacccaccauagggcaugaucaacaccgcaaccuuuccuuuuucccccagugauucugaaaaaccccucuucccuucagcuugcuuagauguuccaaauuuaguaagcuuaaggcggccuacagaagaaaaagaaaaaaaaggccacaaaaguucccucucacuuucaguaaauaaaauaaaagcagcaacagaaauaaagaaauaaaugaaauucaaaaugaaauaaauauuguguugugcagcauuaaaaaaucaauaaaaauuaaaaaugagcaagaucuaaaaaaaaaaaaaaaaaaaaaaaaaaaaaaaaaaaaaaaaaaaaaaaaaaaaaaaaaaaaaaaaugcaucccccccccccccccccccccccccccccccaaaggcucuuuucagagccaccagaauu

SEQ ID NO: 12007 - RNA, 2111 nt, Artificial Sequence
  mRNA product Design g-4 comprising derived and/or modified sequence from HRSV(Memphis-37)__AIY60640.1__F0 (wt)
gggagacuccugucgggcggaaguaggaggaguagaguuuaaaaacaguacucuuuuuccgguucgggacguaguugaagcaacgacaagccggauaaccgcucuugagacaggaagcuuaccauggaguugccaauccucaaaacaaaugcaauuaccacaauccuugcugcagucacacucuguuucgcuuccagucaaaacaucacugaagaauuuuaucaaucaacaugcagugcaguuagcaaaggcuaucuuagugcuuuaagaacugguugguauacuaguguuauaacuauagaauuaaguaauaucaaggaaaauaaguguaauggaacagaugcuaagguaaaauugauaaaacaagaauuagauaaauauaaaaaugcuguaacagaauugcaguugcucaugcaaagcacaccagcagccaacaaucgagccagaagagaacuaccaagguuuaugaauuauacacucaacaauaccaaaaauaacaauguaacauuaagcaagaaaaggaaaagaagauuucuuggcuuuuuguuagguguuggaucugcaaucgccaguggcauugcuguaucuaaaguccugcaccuagaaggggaagugaacaaaaucaaaaaugcucuacuauccacaaacaaggcuguagucagcuuaucaaauggaguuagugucuuaaccagcaaaguguuagaccucaaaaacuauauagauaaacaguuguuacccauugugaacaagcaaagcugcagcauaucaaacauugaaacugugauagaauuccaacaaaagaacaacagacuacuagagauuaccagggaauuuaguguuaaugcagguguaacuacaccuguaagcacuuauauguuaacaaauagugaauuauuaucauuaaucaaugauaugccuauaacaaaugaucagaaaaaguuaauguccaacaauguucaaauaguuagacagcaaaguuacucuaucauguccauaauaaaggaggaagucuuagcauauguaguucaauuaccacuauaugguguaauagauacaccuuguuggaaacuacacacauccccucuaugcacaaccaacacaaaggaaggguccaacaucuguuuaacaagaaccgacagaggaugguacugugacaaugcaggaucagugucuuucuucccacaagcugaaacaugcaaaguucaaucgaaucgaguauuuugugacacaaugaacagucuaacauuaccaagugaaguaaaucucugcaacauugacauauucaacccuaaauaugauugcaaaauuaugacuucaaaaacagaugugagcagcuccguuaucacaucucuaggagccauugugucaugcuauggcaaaacuaaauguacagcauccaauaaaaaucguggaaucauaaagacauuuucuaacgggugugauuauguaucaaauaaggggguggacacuguaucuguagguaauacauuauauuauguaaauaagcaagaaggaaaaagccucuauguaaaaggugaaccaauaauaaauuucuaugacccauuaguguucccuucugaugaauuugaugcaucaauaucucaagucaaugagaagauuaaccagagccuagcauuuauucguaaauccgaugaauuauuacauaauguaaauguugguaaauccaccacaaauaucaugauaacuacuauaauuauagugauuauaguaauauuguuauuauuaauugcaguugggcuguuccuauacugcaaggccagaagcacaccagucacacuaagcaaggaucaacugagugguauaaauaauauugcauuuaguaacugaggacuaguaauaaggaaacuguaugaaugucugugggcaggaagugaagagauccuucuguaaagguuuuuggaauuaugucugcugaauaauaaacuuuuuugaaauaauaaaucugguagaaaaaugagaucuaaaaaaaaaaaaaaaaaaaaaaaaaaaaaaaaaaaaaaaaaaaaaaaaaaaaaaaaaaaaaaaaugcaucccccccccccccccccccccccccccccccaaaggcucuuuucagagccaccagaauu

SEQ ID NO: 12008 - RNA, 2111 nt, Artificial Sequence
  mRNA product Design g-4 comprising derived and/or modified sequence from HRSV(Memphis-37)__AIY60640.1__F0 (opt1)
gggagacuccugucgggcggaaguaggaggaguagaguuuaaaaacaguacucuuuuuccgguucgggacguaguugaagcaacgacaagccggauaaccgcucuugagacaggaagcuuaccauggagcugcccauccucaagaccaacgccaucaccacgauccuggccgcggugacccugugcuucgccagcucccagaacaucaccgaggaguucuaccagagcacgugcuccgccgucagcaagggcuaccucuccgcccugcgcaccgggugguacaccagcgugaucaccaucgagcuguccaacaucaaggagaacaagugcaacggcaccgacgccaaggugaagcucaucaagcaggagcuggacaaguacaagaacgcggucacggagcugcagcuccugaugcagagcaccccggccgccaacaaccgggcccgccgggagcugccccgcuucaugaacuacacccucaacaacaccaagaacaacaacgugacgcuguccaagaagcggaagcgccgguuccugggguuccuccugggcguggggagcgcgaucgccuccggcaucgccgucagcaaggugcugcaccucgagggcgaggugaacaagaucaagaacgcccugcuguccaccaacaaggccgucgugagccucuccaacggggugagcguccugaccuccaaggugcuggaccucaagaacuacaucgacaagcagcugcugcccaucgugaacaagcagagcugcuccaucagcaacaucgagaccgucaucgaguuccagcagaagaacaaccgccuccuggagaucacgcgggaguucagcgugaacgcgggcgugaccacccccgucuccaccuacaugcugacgaacagcgagcuccugucccugaucaacgacaugccgaucaccaacgaccagaagaagcucaugagcaacaacgugcagaucgugcgccagcaguccuacagcaucauguccaucaucaaggaggagguccuggccuacguggugcagcugccccucuacggggucaucgacacccccugcuggaagcugcacaccagcccccugugcacgaccaacaccaaggagggcuccaacaucugccucacccggacggaccgcgggugguacugcgacaacgccggcagcguguccuucuucccgcaggccgagaccugcaagguccagagcaaccggguguucugcgacaccaugaacucccugacccugcccagcgaggugaaccucugcaacaucgacaucuucaaccccaaguacgacugcaagaucaugacguccaagaccgacgucagcuccagcgugaucaccucccugggcgccaucgugagcugcuacgggaagaccaagugcacggcgagcaacaagaaccgcggcaucaucaagaccuucuccaacgggugcgacuacgucagcaacaagggcguggacaccguguccgucggcaacacccuguacuacgugaacaagcaggagggcaagagccucuacgugaagggggagcccaucaucaacuucuacgacccgcuggucuuccccuccgacgaguucgacgccagcaucucccaggugaacgagaagaucaaccagagccuggccuucauccggaaguccgacgagcuccugcacaacgugaacgucggcaagagcaccacgaacaucaugaucaccaccaucaucaucgugaucaucgugauccugcugcuccugaucgccgucgggcuguuccucuacugcaaggcccgcuccacccccgugacgcugagcaaggaccagcuguccgggaucaacaacaucgcguucagcaacugaggacuaguaauaaggaaacuguaugaaugucugugggcaggaagugaagagauccuucuguaaagguuuuuggaauuaugucugcugaauaauaaacuuuuuugaaauaauaaaucugguagaaaaaugagaucuaaaaaaaaaaaaaaaaaaaaaaaaaaaaaaaaaaaaaaaaaaaaaaaaaaaaaaaaaaaaaaaaugcaucccccccccccccccccccccccccccccccaaaggcucuuuucagagccaccagaauu

SEQ ID NO: 12009 - RNA, 2111 nt, Artificial Sequence
  mRNA product Design g-4 comprising derived and/or modified sequence from HRSV(Memphis-37)__AIY60640.1__F0 (opt2)
gggagacuccugucgggcggaaguaggaggaguagaguuuaaaaacaguacucuuuuuccgguucgggacguaguugaagcaacgacaagccggauaaccgcucuugagacaggaagcuuaccauggagcuccccauccucaagaccaacgccaucaccaccauccucgccgccgucacccucugcuucgccuccucccagaacaucaccgaggaguucuaccaguccaccugcuccgccgucuccaagggcuaccucuccgcccuccgcaccggcugguacaccuccgucaucaccaucgagcucuccaacaucaaggagaacaagugcaacggcaccgacgccaaggucaagcucaucaagcaggagcucgacaaguacaagaacgccgucaccgagcuccagcuccucaugcaguccacccccgccgccaacaaccgcgcccgccgcgagcucccccgcuucaugaacuacacccucaacaacaccaagaacaacaacgucacccucuccaagaagcgcaagcgccgcuuccucggcuuccuccucggcgucggcuccgccaucgccuccggcaucgccgucuccaagguccuccaccucgagggcgaggucaacaagaucaagaacgcccuccucuccaccaacaaggccgucgucucccucuccaacggcgucuccguccucaccuccaagguccucgaccucaagaacuacaucgacaagcagcuccuccccaucgucaacaagcaguccugcuccaucuccaacaucgagaccgucaucgaguuccagcagaagaacaaccgccuccucgagaucacccgcgaguucuccgucaacgccggcgucaccacccccgucuccaccuacaugcucaccaacuccgagcuccucucccucaucaacgacaugcccaucaccaacgaccagaagaagcucauguccaacaacguccagaucguccgccagcaguccuacuccaucauguccaucaucaaggaggagguccucgccuacgucguccagcucccccucuacggcgucaucgacacccccugcuggaagcuccacaccuccccccucugcaccaccaacaccaaggagggcuccaacaucugccucacccgcaccgaccgcggcugguacugcgacaacgccggcuccgucuccuucuucccccaggccgagaccugcaagguccaguccaaccgcgucuucugcgacaccaugaacucccucacccuccccuccgaggucaaccucugcaacaucgacaucuucaaccccaaguacgacugcaagaucaugaccuccaagaccgacgucuccuccuccgucaucaccucccucggcgccaucgucuccugcuacggcaagaccaagugcaccgccuccaacaagaaccgcggcaucaucaagaccuucuccaacggcugcgacuacgucuccaacaagggcgucgacaccgucuccgucggcaacacccucuacuacgucaacaagcaggagggcaagucccucuacgucaagggcgagcccaucaucaacuucuacgacccccucgucuuccccuccgacgaguucgacgccuccaucucccaggucaacgagaagaucaaccagucccucgccuucauccgcaaguccgacgagcuccuccacaacgucaacgucggcaaguccaccaccaacaucaugaucaccaccaucaucaucgucaucaucgucauccuccuccuccucaucgccgucggccucuuccucuacugcaaggcccgcuccacccccgucacccucuccaaggaccagcucuccggcaucaacaacaucgccuucuccaacugaggacuaguaauaaggaaacuguaugaaugucugugggcaggaagugaagagauccuucuguaaagguuuuuggaauuaugucugcugaauaauaaacuuuuuugaaauaauaaaucugguagaaaaaugagaucuaaaaaaaaaaaaaaaaaaaaaaaaaaaaaaaaaaaaaaaaaaaaaaaaaaaaaaaaaaaaaaaaugcaucccccccccccccccccccccccccccccccaaaggcucuuuucagagccaccagaauu

SEQ ID NO: 12010 - RNA, 2111 nt, Artificial Sequence
  mRNA product Design g-4 comprising derived and/or modified sequence from HRSV(Memphis-37)__AIY60640.1__F0 (opt3)
gggagacuccugucgggcggaaguaggaggaguagaguuuaaaaacaguacucuuuuuccgguucgggacguaguugaagcaacgacaagccggauaaccgcucuugagacaggaagcuuaccauggagcugcccauccucaagaccaacgccauuacaacuauacuugcugcagugacgcugugcuucgccagcucccagaauaucaccgaagaguuuuaccaaucuacauguucagcggucaguaaaggcuauuugagcgcuuuaagaacugggugguacaccuccguuauuacaaucgaacugucuaacauuaaggagaauaaaugcaacggaaccgacgccaaggugaaacuaaucaagcaggaacucgauaaguauaaaaaugcaguaacugagcugcagcuucugaugcagucgaccccugccgcuaacaauagggcacggcgcgaguugccacgauucaugaacuacacacucaauaacacgaagaauaacaaugugacucugagcaaaaagcguaaaagaagguuucuggguuuccucuuaggcgucgggucagccauagcuaguggaaucgccguguccaagguucugcaccuugaaggcgaggugaacaagauuaaaaaugcguugcugucuaccaacaaggcagucgugagccuauccaacgguguaucaguucucacaaguaaagugcuggaccuuaagaauuauaucgauaaacaacuguugccgauugucaacaagcagagcuguucuaucuccaauauagaaacugugauugaguuucagcagaaaaacaaucggcuccuggagaucacccgcgaguucucagugaacgccggggucacaacccccguuagcacguacauguuaacuaauagugaacugcucucucuuauuaacgacaugccuaucacaaaugaucaaaagaagcugauguccaacaaugugcagaucguaagacagcagagcuauucgauuaugucuauaaucaaagaagagguguuggcuuacgucgugcaacuaccacuguacggaguuauugacacccccugcuggaagcuccauacuuccccucuguguacaaccaacacgaaagaaggcucaaauaucugccuuaccaggacagaucggggcugguauugugacaacgccgggagugugagcuuuuucccacaggcagagacuugcaagguccaguccaaucgcguguuuugugauaccaugaacucucugacauugcccagcgagguaaaccucugcaauauagacauuuucaacccuaaauacgauuguaagaucaugacuucaaagaccgacguuaguuccagcgugaucacaucucugggagcuauugucucaugcuaugguaaaaccaagugcacugccaguaauaaaaaccgaggcaucauuaagacguuuagcaaugggugugauuacguguccaacaaaggagucgacacagugucuguuggcaauaccuuauauuacgugaacaagcaagaagguaagucgcuguauguaaaaggggagccaauaaucaauuucuacgacccgcuagucuuucccagcgaugaguucgacgcguccauuucacaggugaacgaaaagaucaaucagagucucgccuucaucagaaaaucugaugaacugcuucacaacguuaaugugggaaagagcacuaccaacauuaugauaacaaccaucauuaucgucauuaucgugauauugcugcuccugaucgcaguaggccuuuuucuguacugcaaagcuagguccacuccugugacauugucaaaggaccagcucagcggcauuaauaacaucgccuucucuaacugaggacuaguaauaaggaaacuguaugaaugucugugggcaggaagugaagagauccuucuguaaagguuuuuggaauuaugucugcugaauaauaaacuuuuuugaaauaauaaaucugguagaaaaaugagaucuaaaaaaaaaaaaaaaaaaaaaaaaaaaaaaaaaaaaaaaaaaaaaaaaaaaaaaaaaaaaaaaaugcaucccccccccccccccccccccccccccccccaaaggcucuuuucagagccaccagaauu

SEQ ID NO: 12011 - RNA, 2111 nt, Artificial Sequence
  mRNA product Design g-4 comprising derived and/or modified sequence from HRSV(Memphis-37)__AIY60640.1__F0 (opt4)
gggagacuccugucgggcggaaguaggaggaguagaguuuaaaaacaguacucuuuuuccgguucgggacguaguugaagcaacgacaagccggauaaccgcucuugagacaggaagcuuaccauggagcugcccauccugaagaccaacgccaucaccaccauccuggccgccgugacccugugcuucgccagcagccagaacaucaccgaggaguucuaccagagcaccugcagcgccgugagcaagggcuaccugagcgcccugagaaccggcugguacaccagcgugaucaccaucgagcugagcaacaucaaggagaacaagugcaacggcaccgacgccaaggugaagcugaucaagcaggagcuggacaaguacaagaacgccgugaccgagcugcagcugcugaugcagagcacccccgccgccaacaacagagccagaagagagcugcccagauucaugaacuacacccugaacaacaccaagaacaacaacgugacccugagcaagaagagaaagagaagauuccugggcuuccugcugggcgugggcagcgccaucgccagcggcaucgccgugagcaaggugcugcaccuggagggcgaggugaacaagaucaagaacgcccugcugagcaccaacaaggccguggugagccugagcaacggcgugagcgugcugaccagcaaggugcuggaccugaagaacuacaucgacaagcagcugcugcccaucgugaacaagcagagcugcagcaucagcaacaucgagaccgugaucgaguuccagcagaagaacaacagacugcuggagaucaccagagaguucagcgugaacgccggcgugaccacccccgugagcaccuacaugcugaccaacagcgagcugcugagccugaucaacgacaugcccaucaccaacgaccagaagaagcugaugagcaacaacgugcagaucgugagacagcagagcuacagcaucaugagcaucaucaaggaggaggugcuggccuacguggugcagcugccccuguacggcgugaucgacacccccugcuggaagcugcacaccagcccccugugcaccaccaacaccaaggagggcagcaacaucugccugaccagaaccgacagaggcugguacugcgacaacgccggcagcgugagcuucuucccccaggccgagaccugcaaggugcagagcaacagaguguucugcgacaccaugaacagccugacccugcccagcgaggugaaccugugcaacaucgacaucuucaaccccaaguacgacugcaagaucaugaccagcaagaccgacgugagcagcagcgugaucaccagccugggcgccaucgugagcugcuacggcaagaccaagugcaccgccagcaacaagaacagaggcaucaucaagaccuucagcaacggcugcgacuacgugagcaacaagggcguggacaccgugagcgugggcaacacccuguacuacgugaacaagcaggagggcaagagccuguacgugaagggcgagcccaucaucaacuucuacgacccccugguguuccccagcgacgaguucgacgccagcaucagccaggugaacgagaagaucaaccagagccuggccuucaucagaaagagcgacgagcugcugcacaacgugaacgugggcaagagcaccaccaacaucaugaucaccaccaucaucaucgugaucaucgugauccugcugcugcugaucgccgugggccuguuccuguacugcaaggccagaagcacccccgugacccugagcaaggaccagcugagcggcaucaacaacaucgccuucagcaacugaggacuaguaauaaggaaacuguaugaaugucugugggcaggaagugaagagauccuucuguaaagguuuuuggaauuaugucugcugaauaauaaacuuuuuugaaauaauaaaucugguagaaaaaugagaucuaaaaaaaaaaaaaaaaaaaaaaaaaaaaaaaaaaaaaaaaaaaaaaaaaaaaaaaaaaaaaaaaugcaucccccccccccccccccccccccccccccccaaaggcucuuuucagagccaccagaauu

SEQ ID NO: 12012 - RNA, 2111 nt, Artificial Sequence
  mRNA product Design g-4 comprising derived and/or modified sequence from HRSV(Memphis-37)__AIY60640.1__F0 (opt5)
gggagacuccugucgggcggaaguaggaggaguagaguuuaaaaacaguacucuuuuuccgguucgggacguaguugaagcaacgacaagccggauaaccgcucuugagacaggaagcuuaccauggagcugcccauccucaagaccaacgccauuacaacgauccuggcugccgugacccuuugcuucgcgagcucccagaauauuacagaagaguuuuaccaaucuaccuguagcgcugucuccaaaggcuaucugucugcccucagaacagggugguacaccagcguuaucacaauugaacuguccaacaucaaggagaauaaaugcaacggaaccgacgccaaggugaaacuuaucaagcaggaacuggauaaguauaaaaaugcugugacggagcuccagcugcugaugcagucuaccccugccgcuaacaaucgggcccgcagagagcucccgcgguucaugaacuacacacugaauaacaccaagaauaacaaugucacacuuagcaaaaagcgcaaaagacgguuucugggcuuccuccugggggugggauccgcgauugccagcggcaucgcuguuucuaaggugcuucaccuggaaggggaggucaacaagauuaaaaaugcccuccuguccaccaacaaggcugugguuagccugucuaacggaguguccguccucacgagcaaagugcuggaccuuaagaauuauaucgauaaacaacugcuccccauugugaacaagcagucuuguuccaucagcaauauugaaacagucaucgaguuucagcagaaaaacaaucgccugcuugagaucaccagagaauuuuccguuaacgccggcgugacaaccccugugucuaccuacaugcugacaaauagcgagcuccugucccugauuaacgacaugcccaucacgaaugaucaaaagaagcucaugagcaacaauguccagauugugcggcagcagucuuauuccaucaugagcauuaucaaagaagagguucuggcguacgugguccaacuuccucuguacggcgugaucgacacccccugcuggaagcuccauacaucuccucuguguaccacaaacaccaaagaagggagcaauauuugccuuacgcgcacagauagaggaugguauugugacaacgccggcuccguuucuuucuucccgcaggcugagaccugcaaggugcagagcaaucgggucuuuugugauaccaugaacucccugacacuccccagcgaggugaaccugugcaauaucgacauuuucaacccuaaauacgauuguaagaucaugaccucuaagacagacgucuccagcucugugauuacgucccugggggccaucguuagcugcuauggaaaaaccaagugcacagcuuccaauaaaaaccgcggcaucauuaagaccuuuucuaaugggugugauuacgugagcaacaaaggagucgacacaguguccguuggcaauacccucuauuacgugaacaagcaagaaggcaagucucuguaugucaaaggggagcccaucauuaauuucuacgacccucuuguguuucccagcgaugaguucgacgccuccaucagccaggugaacgaaaagauuaaucagucucuggccuucaucagaaaauccgaugaacuccugcacaacguuaaugucggaaagagcacgaccaacauuaugaucacaaccaucauuaucgugauuaucgugauucugcuucuccugaucgcugucggccuguuucucuacugcaaagcgcggucuacaccggugacccuguccaaggaccagcuuagcgggaucaauaacauugccuucucuaacugaggacuaguaauaaggaaacuguaugaaugucugugggcaggaagugaagagauccuucuguaaagguuuuuggaauuaugucugcugaauaauaaacuuuuuugaaauaauaaaucugguagaaaaaugagaucuaaaaaaaaaaaaaaaaaaaaaaaaaaaaaaaaaaaaaaaaaaaaaaaaaaaaaaaaaaaaaaaaugcaucccccccccccccccccccccccccccccccaaaggcucuuuucagagccaccagaauu

SEQ ID NO: 12013 - RNA, 2111 nt, Artificial Sequence
  mRNA product Design g-4 comprising derived and/or modified sequence from HRSV(Memphis-37)__AIY60640.1__F0 (opt6)
gggagacuccugucgggcggaaguaggaggaguagaguuuaaaaacaguacucuuuuuccgguucgggacguaguugaagcaacgacaagccggauaaccgcucuugagacaggaagcuuaccauggaacugccuauucuaaaaacaaaugccauaacaacaauucuugcagcaguaacauuauguuuugcaucaucacaaaacauuacagaagaauuuuaccaauccacuugcucagccguaucaaaaggauaccuaucagccuuaagaacagguugguacaccucaguaauaaccauagaacuaucaaacauaaaagaaaacaaaugcaaugguacugaugcaaaagucaaacuaaucaaacaagaacuggacaaauacaaaaaugcaguaaccgaacuacaacuccuaaugcaauccacaccugcagccaacaacagagcaagacgcgaacuaccaagauuuaugaauuacacauuaaacaacaccaagaacaacaauguaacucucucaaaaaaaagaaaaagacgcuuucuagguuuccuccuaggcgucggaucugcaauagccucaggaauagcaguaucaaaaguucuacaccuagaaggagaaguaaacaaaauuaaaaacgcauuacuaucaaccaacaaagcaguuguaucccuuucaaauggagucucuguacuuacaucaaaaguacucgaccuaaaaaacuauauagacaaacaacuacucccaauagucaauaagcaaucaugcagcauaucaaacauagaaacaguuauagaauuucaacaaaaaaacaacagacuacucgaaauaaccagagaauuuagcgucaacgcaggcguaaccacaccgguauccacauacaugcuuacaaacucagaacuccucucacuaauaaacgacaugccaauaacuaaugaccaaaaaaaacuaaugucaaacaauguccaaauaguccgucaacaaucauacucaauaaugucaauaauaaaagaagaaguauuagcauauguaguccaacuaccauuauacggcguuauagacacaccuuguuggaaacuucacacauccccacucuguacaaccaacacaaaagaagguuccaauauaugccuaacuagaaccgacagaggaugguauugcgacaacgcaggaucuguaucauucuuuccccaagcagaaacauguaaaguacaaaguaaccgcguauucugcgacaccaugaacucauuaacccucccauccgaaguuaauuuaugcaauauagacauauuuaauccuaaauacgacugcaaaauaaugacaucaaaaacagacguuaguuccuccguaaucacaucuuugggcgcaauagucucaugcuauggaaaaacaaaaugcacagccucaaacaaaaauagaggaauaauaaaaacauucagcaacggcugugauuauguauccaacaaaggaguagacacaguauccguaggcaauacccuuuacuacguuaauaaacaagaaggaaaaucauuauacgucaaaggagaaccuaucauaaauuucuacgacccauuaguauucccuucagacgaauuugaugccucaauaucccaagucaaugaaaaaaucaaccaaucacuagccuuuauccgcaaaucagacgaauuacuacacaacguaaacguaggcaaaucaacaacuaauauaaugauaacaacaauaauaauaguaauuauaguaauauuauuacuacuaaucgccguagguuuauucuuauacuguaaagcacgaucaacaccaguuacacucucaaaagaucaacuaucaggaauaaacaacauagcauuuuccaauuaaggacuaguaauaaggaaacuguaugaaugucugugggcaggaagugaagagauccuucuguaaagguuuuuggaauuaugucugcugaauaauaaacuuuuuugaaauaauaaaucugguagaaaaaugagaucuaaaaaaaaaaaaaaaaaaaaaaaaaaaaaaaaaaaaaaaaaaaaaaaaaaaaaaaaaaaaaaaaugcaucccccccccccccccccccccccccccccccaaaggcucuuuucagagccaccagaauu

SEQ ID NO: 12014 - RNA, 2111 nt, Artificial Sequence
  mRNA product Design g-4 comprising derived and/or modified sequence from HRSV(Memphis-37)__AIY60640.1__F0 (opt11)
gggagacuccugucgggcggaaguaggaggaguagaguuuaaaaacaguacucuuuuuccgguucgggacguaguugaagcaacgacaagccggauaaccgcucuugagacaggaagcuuaccauggaacuccccauccucaaaacaaacgccauaaccacuauccucgccgccgucacccucugcuucgccuccucccaaaacaucacagaggaguucuaccaauccacaugcuccgccgucuccaaaggcuaccucagcgcccuacguaccggcugguacaccagcgucaucacaauagaacucuccaacaucaaggaaaacaaaugcaacggcaccgaugccaaaguaaaacucaucaaacaagaacucgauaaauacaaaaacgccgucaccgaacuacaacuccuaaugcaaagcacacccgccgccaacaacagagcacggcgcgaacugccccgcuucaugaacuacacccucaacaacaccaaaaauaacaacgucacccuauccaagaaacgcaaacgccgauuccucgguuuccuacucggcguaggaagcgccauagccucaggcaucgccgucuccaaaguccuccaucuggaaggcgaagucaacaaaaucaaaaacgcacucuuauccaccaacaaagccgucgucucccucucgaacggggucuccguccuuaccuccaaaguccucgaccuuaaaaacuacaucgacaaacaacuacuaccaauagucaauaaacaauccugcuccaucucaaacauagaaaccgucauagaguuccaacagaagaacaaucgccuccucgaaauaacucgcgaguucuccgucaacgcaggcgucacgaccccugucucaacauacaugcuaacuaacucagaacuccuaagccuaaucaacgacaugcccaucacaaacgaccaaaagaaacucaugagcaacaauguccagauagucagacagcaauccuauagcaucaugucuauaauaaaagaagaagugcucgccuacguaguccaacucccucuuuacggcgucauagacacacccugcuggaaacuccacacaucuccucucugcaccaccaacacaaaagaaggcagcaacaucugccugacccgaaccgaccgcggaugguacugcgacaacgcuggcuccgugucuuucuuuccccaagccgaaaccugcaaaguccaguccaaccgcgucuucugcgacacaaugaacucccucacccuacccuccgaaguuaaccucugcaacaucgacaucuucaauccaaaauacgacugcaaaaucaugaccucgaaaacggacguauccuccuccgucauaacaucacuuggagccaucguuagcugcuacggaaaaaccaaauguaccgccuccaacaaaaaccgcggaauaaucaaaacauucuccaacggcugcgacuacguaagcaacaaaggggucgauacugucuccguagguaacacccuauacuacgucaacaaacaagaaggaaaaucacuauacguuaaaggcgaacccauuaucaacuucuacgacccccucguuuucccauccgacgaguucgacgccuccauaagccaaguuaacgaaaagauaaaccaaucgcucgcauucauccgcaaauccgacgaacuccuacacaacgucaacgugggcaaauccacaacaaacaucaugaucaccaccaucauuaucgucauaauagucauccuccuccugcucaucgccgugggacuauuccuauacugcaaagcccgcucgacgcccgucacacuuuccaaagaccaacuaagcggaaucaacaacauagcguucagcaauuaaggacuaguaauaaggaaacuguaugaaugucugugggcaggaagugaagagauccuucuguaaagguuuuuggaauuaugucugcugaauaauaaacuuuuuugaaauaauaaaucugguagaaaaaugagaucuaaaaaaaaaaaaaaaaaaaaaaaaaaaaaaaaaaaaaaaaaaaaaaaaaaaaaaaaaaaaaaaaugcaucccccccccccccccccccccccccccccccaaaggcucuuuucagagccaccagaauu

SEQ ID NO: 12015 - RNA, 2087 nt, Artificial Sequence
  mRNA product Design g-5 comprising derived and/or modified sequence from HRSV(Memphis-37)__AIY60640.1__F0 (wt)
gggagacccgugacccggaaguuguacggcuacgcgacuuucccucccacaaacccucgcgcccuuccuuuccuacuugggcccggcagaaagcuuaccauggaguugccaauccucaaaacaaaugcaauuaccacaauccuugcugcagucacacucuguuucgcuuccagucaaaacaucacugaagaauuuuaucaaucaacaugcagugcaguuagcaaaggcuaucuuagugcuuuaagaacugguugguauacuaguguuauaacuauagaauuaaguaauaucaaggaaaauaaguguaauggaacagaugcuaagguaaaauugauaaaacaagaauuagauaaauauaaaaaugcuguaacagaauugcaguugcucaugcaaagcacaccagcagccaacaaucgagccagaagagaacuaccaagguuuaugaauuauacacucaacaauaccaaaaauaacaauguaacauuaagcaagaaaaggaaaagaagauuucuuggcuuuuuguuagguguuggaucugcaaucgccaguggcauugcuguaucuaaaguccugcaccuagaaggggaagugaacaaaaucaaaaaugcucuacuauccacaaacaaggcuguagucagcuuaucaaauggaguuagugucuuaaccagcaaaguguuagaccucaaaaacuauauagauaaacaguuguuacccauugugaacaagcaaagcugcagcauaucaaacauugaaacugugauagaauuccaacaaaagaacaacagacuacuagagauuaccagggaauuuaguguuaaugcagguguaacuacaccuguaagcacuuauauguuaacaaauagugaauuauuaucauuaaucaaugauaugccuauaacaaaugaucagaaaaaguuaauguccaacaauguucaaauaguuagacagcaaaguuacucuaucauguccauaauaaaggaggaagucuuagcauauguaguucaauuaccacuauaugguguaauagauacaccuuguuggaaacuacacacauccccucuaugcacaaccaacacaaaggaaggguccaacaucuguuuaacaagaaccgacagaggaugguacugugacaaugcaggaucagugucuuucuucccacaagcugaaacaugcaaaguucaaucgaaucgaguauuuugugacacaaugaacagucuaacauuaccaagugaaguaaaucucugcaacauugacauauucaacccuaaauaugauugcaaaauuaugacuucaaaaacagaugugagcagcuccguuaucacaucucuaggagccauugugucaugcuauggcaaaacuaaauguacagcauccaauaaaaaucguggaaucauaaagacauuuucuaacgggugugauuauguaucaaauaaggggguggacacuguaucuguagguaauacauuauauuauguaaauaagcaagaaggaaaaagccucuauguaaaaggugaaccaauaauaaauuucuaugacccauuaguguucccuucugaugaauuugaugcaucaauaucucaagucaaugagaagauuaaccagagccuagcauuuauucguaaauccgaugaauuauuacauaauguaaauguugguaaauccaccacaaauaucaugauaacuacuauaauuauagugauuauaguaauauuguuauuauuaauugcaguugggcuguuccuauacugcaaggccagaagcacaccagucacacuaagcaaggaucaacugagugguauaaauaauauugcauuuaguaacugaggacuaguaauaaggaaacuguaugaaugucugugggcaggaagugaagagauccuucuguaaagguuuuuggaauuaugucugcugaauaauaaacuuuuuugaaauaauaaaucugguagaaaaaugagaucuaaaaaaaaaaaaaaaaaaaaaaaaaaaaaaaaaaaaaaaaaaaaaaaaaaaaaaaaaaaaaaaaugcaucccccccccccccccccccccccccccccccaaaggcucuuuucagagccaccagaauu

SEQ ID NO: 12016 - RNA, 2087 nt, Artificial Sequence
  mRNA product Design g-5 comprising derived and/or modified sequence from HRSV(Memphis-37)__AIY60640.1__F0 (opt1)
gggagacccgugacccggaaguuguacggcuacgcgacuuucccucccacaaacccucgcgcccuuccuuuccuacuugggcccggcagaaagcuuaccauggagcugcccauccucaagaccaacgccaucaccacgauccuggccgcggugacccugugcuucgccagcucccagaacaucaccgaggaguucuaccagagcacgugcuccgccgucagcaagggcuaccucuccgcccugcgcaccgggugguacaccagcgugaucaccaucgagcuguccaacaucaaggagaacaagugcaacggcaccgacgccaaggugaagcucaucaagcaggagcuggacaaguacaagaacgcggucacggagcugcagcuccugaugcagagcaccccggccgccaacaaccgggcccgccgggagcugccccgcuucaugaacuacacccucaacaacaccaagaacaacaacgugacgcuguccaagaagcggaagcgccgguuccugggguuccuccugggcguggggagcgcgaucgccuccggcaucgccgucagcaaggugcugcaccucgagggcgaggugaacaagaucaagaacgcccugcuguccaccaacaaggccgucgugagccucuccaacggggugagcguccugaccuccaaggugcuggaccucaagaacuacaucgacaagcagcugcugcccaucgugaacaagcagagcugcuccaucagcaacaucgagaccgucaucgaguuccagcagaagaacaaccgccuccuggagaucacgcgggaguucagcgugaacgcgggcgugaccacccccgucuccaccuacaugcugacgaacagcgagcuccugucccugaucaacgacaugccgaucaccaacgaccagaagaagcucaugagcaacaacgugcagaucgugcgccagcaguccuacagcaucauguccaucaucaaggaggagguccuggccuacguggugcagcugccccucuacggggucaucgacacccccugcuggaagcugcacaccagcccccugugcacgaccaacaccaaggagggcuccaacaucugccucacccggacggaccgcgggugguacugcgacaacgccggcagcguguccuucuucccgcaggccgagaccugcaagguccagagcaaccggguguucugcgacaccaugaacucccugacccugcccagcgaggugaaccucugcaacaucgacaucuucaaccccaaguacgacugcaagaucaugacguccaagaccgacgucagcuccagcgugaucaccucccugggcgccaucgugagcugcuacgggaagaccaagugcacggcgagcaacaagaaccgcggcaucaucaagaccuucuccaacgggugcgacuacgucagcaacaagggcguggacaccguguccgucggcaacacccuguacuacgugaacaagcaggagggcaagagccucuacgugaagggggagcccaucaucaacuucuacgacccgcuggucuuccccuccgacgaguucgacgccagcaucucccaggugaacgagaagaucaaccagagccuggccuucauccggaaguccgacgagcuccugcacaacgugaacgucggcaagagcaccacgaacaucaugaucaccaccaucaucaucgugaucaucgugauccugcugcuccugaucgccgucgggcuguuccucuacugcaaggcccgcuccacccccgugacgcugagcaaggaccagcuguccgggaucaacaacaucgcguucagcaacugaggacuaguaauaaggaaacuguaugaaugucugugggcaggaagugaagagauccuucuguaaagguuuuuggaauuaugucugcugaauaauaaacuuuuuugaaauaauaaaucugguagaaaaaugagaucuaaaaaaaaaaaaaaaaaaaaaaaaaaaaaaaaaaaaaaaaaaaaaaaaaaaaaaaaaaaaaaaaugcaucccccccccccccccccccccccccccccccaaaggcucuuuucagagccaccagaauu

SEQ ID NO: 12017 - RNA, 2087 nt, Artificial Sequence
  mRNA product Design g-5 comprising derived and/or modified sequence from HRSV(Memphis-37)__AIY60640.1__F0 (opt2)
gggagacccgugacccggaaguuguacggcuacgcgacuuucccucccacaaacccucgcgcccuuccuuuccuacuugggcccggcagaaagcuuaccauggagcuccccauccucaagaccaacgccaucaccaccauccucgccgccgucacccucugcuucgccuccucccagaacaucaccgaggaguucuaccaguccaccugcuccgccgucuccaagggcuaccucuccgcccuccgcaccggcugguacaccuccgucaucaccaucgagcucuccaacaucaaggagaacaagugcaacggcaccgacgccaaggucaagcucaucaagcaggagcucgacaaguacaagaacgccgucaccgagcuccagcuccucaugcaguccacccccgccgccaacaaccgcgcccgccgcgagcucccccgcuucaugaacuacacccucaacaacaccaagaacaacaacgucacccucuccaagaagcgcaagcgccgcuuccucggcuuccuccucggcgucggcuccgccaucgccuccggcaucgccgucuccaagguccuccaccucgagggcgaggucaacaagaucaagaacgcccuccucuccaccaacaaggccgucgucucccucuccaacggcgucuccguccucaccuccaagguccucgaccucaagaacuacaucgacaagcagcuccuccccaucgucaacaagcaguccugcuccaucuccaacaucgagaccgucaucgaguuccagcagaagaacaaccgccuccucgagaucacccgcgaguucuccgucaacgccggcgucaccacccccgucuccaccuacaugcucaccaacuccgagcuccucucccucaucaacgacaugcccaucaccaacgaccagaagaagcucauguccaacaacguccagaucguccgccagcaguccuacuccaucauguccaucaucaaggaggagguccucgccuacgucguccagcucccccucuacggcgucaucgacacccccugcuggaagcuccacaccuccccccucugcaccaccaacaccaaggagggcuccaacaucugccucacccgcaccgaccgcggcugguacugcgacaacgccggcuccgucuccuucuucccccaggccgagaccugcaagguccaguccaaccgcgucuucugcgacaccaugaacucccucacccuccccuccgaggucaaccucugcaacaucgacaucuucaaccccaaguacgacugcaagaucaugaccuccaagaccgacgucuccuccuccgucaucaccucccucggcgccaucgucuccugcuacggcaagaccaagugcaccgccuccaacaagaaccgcggcaucaucaagaccuucuccaacggcugcgacuacgucuccaacaagggcgucgacaccgucuccgucggcaacacccucuacuacgucaacaagcaggagggcaagucccucuacgucaagggcgagcccaucaucaacuucuacgacccccucgucuuccccuccgacgaguucgacgccuccaucucccaggucaacgagaagaucaaccagucccucgccuucauccgcaaguccgacgagcuccuccacaacgucaacgucggcaaguccaccaccaacaucaugaucaccaccaucaucaucgucaucaucgucauccuccuccuccucaucgccgucggccucuuccucuacugcaaggcccgcuccacccccgucacccucuccaaggaccagcucuccggcaucaacaacaucgccuucuccaacugaggacuaguaauaaggaaacuguaugaaugucugugggcaggaagugaagagauccuucuguaaagguuuuuggaauuaugucugcugaauaauaaacuuuuuugaaauaauaaaucugguagaaaaaugagaucuaaaaaaaaaaaaaaaaaaaaaaaaaaaaaaaaaaaaaaaaaaaaaaaaaaaaaaaaaaaaaaaaugcaucccccccccccccccccccccccccccccccaaaggcucuuuucagagccaccagaauu

SEQ ID NO: 12018 - RNA, 2087 nt, Artificial Sequence
  mRNA product Design g-5 comprising derived and/or modified sequence from HRSV(Memphis-37)__AIY60640.1__F0 (opt3)
gggagacccgugacccggaaguuguacggcuacgcgacuuucccucccacaaacccucgcgcccuuccuuuccuacuugggcccggcagaaagcuuaccauggagcugcccauccucaagaccaacgccauuacaacuauacuugcugcagugacgcugugcuucgccagcucccagaauaucaccgaagaguuuuaccaaucuacauguucagcggucaguaaaggcuauuugagcgcuuuaagaacugggugguacaccuccguuauuacaaucgaacugucuaacauuaaggagaauaaaugcaacggaaccgacgccaaggugaaacuaaucaagcaggaacucgauaaguauaaaaaugcaguaacugagcugcagcuucugaugcagucgaccccugccgcuaacaauagggcacggcgcgaguugccacgauucaugaacuacacacucaauaacacgaagaauaacaaugugacucugagcaaaaagcguaaaagaagguuucuggguuuccucuuaggcgucgggucagccauagcuaguggaaucgccguguccaagguucugcaccuugaaggcgaggugaacaagauuaaaaaugcguugcugucuaccaacaaggcagucgugagccuauccaacgguguaucaguucucacaaguaaagugcuggaccuuaagaauuauaucgauaaacaacuguugccgauugucaacaagcagagcuguucuaucuccaauauagaaacugugauugaguuucagcagaaaaacaaucggcuccuggagaucacccgcgaguucucagugaacgccggggucacaacccccguuagcacguacauguuaacuaauagugaacugcucucucuuauuaacgacaugccuaucacaaaugaucaaaagaagcugauguccaacaaugugcagaucguaagacagcagagcuauucgauuaugucuauaaucaaagaagagguguuggcuuacgucgugcaacuaccacuguacggaguuauugacacccccugcuggaagcuccauacuuccccucuguguacaaccaacacgaaagaaggcucaaauaucugccuuaccaggacagaucggggcugguauugugacaacgccgggagugugagcuuuuucccacaggcagagacuugcaagguccaguccaaucgcguguuuugugauaccaugaacucucugacauugcccagcgagguaaaccucugcaauauagacauuuucaacccuaaauacgauuguaagaucaugacuucaaagaccgacguuaguuccagcgugaucacaucucugggagcuauugucucaugcuaugguaaaaccaagugcacugccaguaauaaaaaccgaggcaucauuaagacguuuagcaaugggugugauuacguguccaacaaaggagucgacacagugucuguuggcaauaccuuauauuacgugaacaagcaagaagguaagucgcuguauguaaaaggggagccaauaaucaauuucuacgacccgcuagucuuucccagcgaugaguucgacgcguccauuucacaggugaacgaaaagaucaaucagagucucgccuucaucagaaaaucugaugaacugcuucacaacguuaaugugggaaagagcacuaccaacauuaugauaacaaccaucauuaucgucauuaucgugauauugcugcuccugaucgcaguaggccuuuuucuguacugcaaagcuagguccacuccugugacauugucaaaggaccagcucagcggcauuaauaacaucgccuucucuaacugaggacuaguaauaaggaaacuguaugaaugucugugggcaggaagugaagagauccuucuguaaagguuuuuggaauuaugucugcugaauaauaaacuuuuuugaaauaauaaaucugguagaaaaaugagaucuaaaaaaaaaaaaaaaaaaaaaaaaaaaaaaaaaaaaaaaaaaaaaaaaaaaaaaaaaaaaaaaaugcaucccccccccccccccccccccccccccccccaaaggcucuuuucagagccaccagaauu

SEQ ID NO: 12019 - RNA, 2087 nt, Artificial Sequence
  mRNA product Design g-5 comprising derived and/or modified sequence from HRSV(Memphis-37)__AIY60640.1__F0 (opt4)
gggagacccgugacccggaaguuguacggcuacgcgacuuucccucccacaaacccucgcgcccuuccuuuccuacuugggcccggcagaaagcuuaccauggagcugcccauccugaagaccaacgccaucaccaccauccuggccgccgugacccugugcuucgccagcagccagaacaucaccgaggaguucuaccagagcaccugcagcgccgugagcaagggcuaccugagcgcccugagaaccggcugguacaccagcgugaucaccaucgagcugagcaacaucaaggagaacaagugcaacggcaccgacgccaaggugaagcugaucaagcaggagcuggacaaguacaagaacgccgugaccgagcugcagcugcugaugcagagcacccccgccgccaacaacagagccagaagagagcugcccagauucaugaacuacacccugaacaacaccaagaacaacaacgugacccugagcaagaagagaaagagaagauuccugggcuuccugcugggcgugggcagcgccaucgccagcggcaucgccgugagcaaggugcugcaccuggagggcgaggugaacaagaucaagaacgcccugcugagcaccaacaaggccguggugagccugagcaacggcgugagcgugcugaccagcaaggugcuggaccugaagaacuacaucgacaagcagcugcugcccaucgugaacaagcagagcugcagcaucagcaacaucgagaccgugaucgaguuccagcagaagaacaacagacugcuggagaucaccagagaguucagcgugaacgccggcgugaccacccccgugagcaccuacaugcugaccaacagcgagcugcugagccugaucaacgacaugcccaucaccaacgaccagaagaagcugaugagcaacaacgugcagaucgugagacagcagagcuacagcaucaugagcaucaucaaggaggaggugcuggccuacguggugcagcugccccuguacggcgugaucgacacccccugcuggaagcugcacaccagcccccugugcaccaccaacaccaaggagggcagcaacaucugccugaccagaaccgacagaggcugguacugcgacaacgccggcagcgugagcuucuucccccaggccgagaccugcaaggugcagagcaacagaguguucugcgacaccaugaacagccugacccugcccagcgaggugaaccugugcaacaucgacaucuucaaccccaaguacgacugcaagaucaugaccagcaagaccgacgugagcagcagcgugaucaccagccugggcgccaucgugagcugcuacggcaagaccaagugcaccgccagcaacaagaacagaggcaucaucaagaccuucagcaacggcugcgacuacgugagcaacaagggcguggacaccgugagcgugggcaacacccuguacuacgugaacaagcaggagggcaagagccuguacgugaagggcgagcccaucaucaacuucuacgacccccugguguuccccagcgacgaguucgacgccagcaucagccaggugaacgagaagaucaaccagagccuggccuucaucagaaagagcgacgagcugcugcacaacgugaacgugggcaagagcaccaccaacaucaugaucaccaccaucaucaucgugaucaucgugauccugcugcugcugaucgccgugggccuguuccuguacugcaaggccagaagcacccccgugacccugagcaaggaccagcugagcggcaucaacaacaucgccuucagcaacugaggacuaguaauaaggaaacuguaugaaugucugugggcaggaagugaagagauccuucuguaaagguuuuuggaauuaugucugcugaauaauaaacuuuuuugaaauaauaaaucugguagaaaaaugagaucuaaaaaaaaaaaaaaaaaaaaaaaaaaaaaaaaaaaaaaaaaaaaaaaaaaaaaaaaaaaaaaaaugcaucccccccccccccccccccccccccccccccaaaggcucuuuucagagccaccagaauu

SEQ ID NO: 12020 - RNA, 2087 nt, Artificial Sequence
  mRNA product Design g-5 comprising derived and/or modified sequence from HRSV(Memphis-37)__AIY60640.1__F0 (opt5)
gggagacccgugacccggaaguuguacggcuacgcgacuuucccucccacaaacccucgcgcccuuccuuuccuacuugggcccggcagaaagcuuaccauggagcugcccauccucaagaccaacgccauuacaacgauccuggcugccgugacccuuugcuucgcgagcucccagaauauuacagaagaguuuuaccaaucuaccuguagcgcugucuccaaaggcuaucugucugcccucagaacagggugguacaccagcguuaucacaauugaacuguccaacaucaaggagaauaaaugcaacggaaccgacgccaaggugaaacuuaucaagcaggaacuggauaaguauaaaaaugcugugacggagcuccagcugcugaugcagucuaccccugccgcuaacaaucgggcccgcagagagcucccgcgguucaugaacuacacacugaauaacaccaagaauaacaaugucacacuuagcaaaaagcgcaaaagacgguuucugggcuuccuccugggggugggauccgcgauugccagcggcaucgcuguuucuaaggugcuucaccuggaaggggaggucaacaagauuaaaaaugcccuccuguccaccaacaaggcugugguuagccugucuaacggaguguccguccucacgagcaaagugcuggaccuuaagaauuauaucgauaaacaacugcuccccauugugaacaagcagucuuguuccaucagcaauauugaaacagucaucgaguuucagcagaaaaacaaucgccugcuugagaucaccagagaauuuuccguuaacgccggcgugacaaccccugugucuaccuacaugcugacaaauagcgagcuccugucccugauuaacgacaugcccaucacgaaugaucaaaagaagcucaugagcaacaauguccagauugugcggcagcagucuuauuccaucaugagcauuaucaaagaagagguucuggcguacgugguccaacuuccucuguacggcgugaucgacacccccugcuggaagcuccauacaucuccucuguguaccacaaacaccaaagaagggagcaauauuugccuuacgcgcacagauagaggaugguauugugacaacgccggcuccguuucuuucuucccgcaggcugagaccugcaaggugcagagcaaucgggucuuuugugauaccaugaacucccugacacuccccagcgaggugaaccugugcaauaucgacauuuucaacccuaaauacgauuguaagaucaugaccucuaagacagacgucuccagcucugugauuacgucccugggggccaucguuagcugcuauggaaaaaccaagugcacagcuuccaauaaaaaccgcggcaucauuaagaccuuuucuaaugggugugauuacgugagcaacaaaggagucgacacaguguccguuggcaauacccucuauuacgugaacaagcaagaaggcaagucucuguaugucaaaggggagcccaucauuaauuucuacgacccucuuguguuucccagcgaugaguucgacgccuccaucagccaggugaacgaaaagauuaaucagucucuggccuucaucagaaaauccgaugaacuccugcacaacguuaaugucggaaagagcacgaccaacauuaugaucacaaccaucauuaucgugauuaucgugauucugcuucuccugaucgcugucggccuguuucucuacugcaaagcgcggucuacaccggugacccuguccaaggaccagcuuagcgggaucaauaacauugccuucucuaacugaggacuaguaauaaggaaacuguaugaaugucugugggcaggaagugaagagauccuucuguaaagguuuuuggaauuaugucugcugaauaauaaacuuuuuugaaauaauaaaucugguagaaaaaugagaucuaaaaaaaaaaaaaaaaaaaaaaaaaaaaaaaaaaaaaaaaaaaaaaaaaaaaaaaaaaaaaaaaugcaucccccccccccccccccccccccccccccccaaaggcucuuuucagagccaccagaauu

SEQ ID NO: 12021 - RNA, 2087 nt, Artificial Sequence
  mRNA product Design g-5 comprising derived and/or modified sequence from HRSV(Memphis-37)__AIY60640.1__F0 (opt6)
gggagacccgugacccggaaguuguacggcuacgcgacuuucccucccacaaacccucgcgcccuuccuuuccuacuugggcccggcagaaagcuuaccauggaacugccuauucuaaaaacaaaugccauaacaacaauucuugcagcaguaacauuauguuuugcaucaucacaaaacauuacagaagaauuuuaccaauccacuugcucagccguaucaaaaggauaccuaucagccuuaagaacagguugguacaccucaguaauaaccauagaacuaucaaacauaaaagaaaacaaaugcaaugguacugaugcaaaagucaaacuaaucaaacaagaacuggacaaauacaaaaaugcaguaaccgaacuacaacuccuaaugcaauccacaccugcagccaacaacagagcaagacgcgaacuaccaagauuuaugaauuacacauuaaacaacaccaagaacaacaauguaacucucucaaaaaaaagaaaaagacgcuuucuagguuuccuccuaggcgucggaucugcaauagccucaggaauagcaguaucaaaaguucuacaccuagaaggagaaguaaacaaaauuaaaaacgcauuacuaucaaccaacaaagcaguuguaucccuuucaaauggagucucuguacuuacaucaaaaguacucgaccuaaaaaacuauauagacaaacaacuacucccaauagucaauaagcaaucaugcagcauaucaaacauagaaacaguuauagaauuucaacaaaaaaacaacagacuacucgaaauaaccagagaauuuagcgucaacgcaggcguaaccacaccgguauccacauacaugcuuacaaacucagaacuccucucacuaauaaacgacaugccaauaacuaaugaccaaaaaaaacuaaugucaaacaauguccaaauaguccgucaacaaucauacucaauaaugucaauaauaaaagaagaaguauuagcauauguaguccaacuaccauuauacggcguuauagacacaccuuguuggaaacuucacacauccccacucuguacaaccaacacaaaagaagguuccaauauaugccuaacuagaaccgacagaggaugguauugcgacaacgcaggaucuguaucauucuuuccccaagcagaaacauguaaaguacaaaguaaccgcguauucugcgacaccaugaacucauuaacccucccauccgaaguuaauuuaugcaauauagacauauuuaauccuaaauacgacugcaaaauaaugacaucaaaaacagacguuaguuccuccguaaucacaucuuugggcgcaauagucucaugcuauggaaaaacaaaaugcacagccucaaacaaaaauagaggaauaauaaaaacauucagcaacggcugugauuauguauccaacaaaggaguagacacaguauccguaggcaauacccuuuacuacguuaauaaacaagaaggaaaaucauuauacgucaaaggagaaccuaucauaaauuucuacgacccauuaguauucccuucagacgaauuugaugccucaauaucccaagucaaugaaaaaaucaaccaaucacuagccuuuauccgcaaaucagacgaauuacuacacaacguaaacguaggcaaaucaacaacuaauauaaugauaacaacaauaauaauaguaauuauaguaauauuauuacuacuaaucgccguagguuuauucuuauacuguaaagcacgaucaacaccaguuacacucucaaaagaucaacuaucaggaauaaacaacauagcauuuuccaauuaaggacuaguaauaaggaaacuguaugaaugucugugggcaggaagugaagagauccuucuguaaagguuuuuggaauuaugucugcugaauaauaaacuuuuuugaaauaauaaaucugguagaaaaaugagaucuaaaaaaaaaaaaaaaaaaaaaaaaaaaaaaaaaaaaaaaaaaaaaaaaaaaaaaaaaaaaaaaaugcaucccccccccccccccccccccccccccccccaaaggcucuuuucagagccaccagaauu

SEQ ID NO: 12022 - RNA, 2087 nt, Artificial Sequence
  mRNA product Design g-5 comprising derived and/or modified sequence from HRSV(Memphis-37)__AIY60640.1__F0 (opt11)
gggagacccgugacccggaaguuguacggcuacgcgacuuucccucccacaaacccucgcgcccuuccuuuccuacuugggcccggcagaaagcuuaccauggaacuccccauccucaaaacaaacgccauaaccacuauccucgccgccgucacccucugcuucgccuccucccaaaacaucacagaggaguucuaccaauccacaugcuccgccgucuccaaaggcuaccucagcgcccuacguaccggcugguacaccagcgucaucacaauagaacucuccaacaucaaggaaaacaaaugcaacggcaccgaugccaaaguaaaacucaucaaacaagaacucgauaaauacaaaaacgccgucaccgaacuacaacuccuaaugcaaagcacacccgccgccaacaacagagcacggcgcgaacugccccgcuucaugaacuacacccucaacaacaccaaaaauaacaacgucacccuauccaagaaacgcaaacgccgauuccucgguuuccuacucggcguaggaagcgccauagccucaggcaucgccgucuccaaaguccuccaucuggaaggcgaagucaacaaaaucaaaaacgcacucuuauccaccaacaaagccgucgucucccucucgaacggggucuccguccuuaccuccaaaguccucgaccuuaaaaacuacaucgacaaacaacuacuaccaauagucaauaaacaauccugcuccaucucaaacauagaaaccgucauagaguuccaacagaagaacaaucgccuccucgaaauaacucgcgaguucuccgucaacgcaggcgucacgaccccugucucaacauacaugcuaacuaacucagaacuccuaagccuaaucaacgacaugcccaucacaaacgaccaaaagaaacucaugagcaacaauguccagauagucagacagcaauccuauagcaucaugucuauaauaaaagaagaagugcucgccuacguaguccaacucccucuuuacggcgucauagacacacccugcuggaaacuccacacaucuccucucugcaccaccaacacaaaagaaggcagcaacaucugccugacccgaaccgaccgcggaugguacugcgacaacgcuggcuccgugucuuucuuuccccaagccgaaaccugcaaaguccaguccaaccgcgucuucugcgacacaaugaacucccucacccuacccuccgaaguuaaccucugcaacaucgacaucuucaauccaaaauacgacugcaaaaucaugaccucgaaaacggacguauccuccuccgucauaacaucacuuggagccaucguuagcugcuacggaaaaaccaaauguaccgccuccaacaaaaaccgcggaauaaucaaaacauucuccaacggcugcgacuacguaagcaacaaaggggucgauacugucuccguagguaacacccuauacuacgucaacaaacaagaaggaaaaucacuauacguuaaaggcgaacccauuaucaacuucuacgacccccucguuuucccauccgacgaguucgacgccuccauaagccaaguuaacgaaaagauaaaccaaucgcucgcauucauccgcaaauccgacgaacuccuacacaacgucaacgugggcaaauccacaacaaacaucaugaucaccaccaucauuaucgucauaauagucauccuccuccugcucaucgccgugggacuauuccuauacugcaaagcccgcucgacgcccgucacacuuuccaaagaccaacuaagcggaaucaacaacauagcguucagcaauuaaggacuaguaauaaggaaacuguaugaaugucugugggcaggaagugaagagauccuucuguaaagguuuuuggaauuaugucugcugaauaauaaacuuuuuugaaauaauaaaucugguagaaaaaugagaucuaaaaaaaaaaaaaaaaaaaaaaaaaaaaaaaaaaaaaaaaaaaaaaaaaaaaaaaaaaaaaaaaugcaucccccccccccccccccccccccccccccccaaaggcucuuuucagagccaccagaauu

SEQ ID NO: 12023 - RNA, 2103 nt, Artificial Sequence
  mRNA product Design h-1 comprising derived and/or modified sequence from HRSV(Memphis-37)__AIY60640.1__F0 (wt)
gggagacccgugacccggaaguuguacggcuacgcgacuuucccucccacaaacccucgcgcccuuccuuuccuacuugggcccggcagaaagcuuaccauggaguugccaauccucaaaacaaaugcaauuaccacaauccuugcugcagucacacucuguuucgcuuccagucaaaacaucacugaagaauuuuaucaaucaacaugcagugcaguuagcaaaggcuaucuuagugcuuuaagaacugguugguauacuaguguuauaacuauagaauuaaguaauaucaaggaaaauaaguguaauggaacagaugcuaagguaaaauugauaaaacaagaauuagauaaauauaaaaaugcuguaacagaauugcaguugcucaugcaaagcacaccagcagccaacaaucgagccagaagagaacuaccaagguuuaugaauuauacacucaacaauaccaaaaauaacaauguaacauuaagcaagaaaaggaaaagaagauuucuuggcuuuuuguuagguguuggaucugcaaucgccaguggcauugcuguaucuaaaguccugcaccuagaaggggaagugaacaaaaucaaaaaugcucuacuauccacaaacaaggcuguagucagcuuaucaaauggaguuagugucuuaaccagcaaaguguuagaccucaaaaacuauauagauaaacaguuguuacccauugugaacaagcaaagcugcagcauaucaaacauugaaacugugauagaauuccaacaaaagaacaacagacuacuagagauuaccagggaauuuaguguuaaugcagguguaacuacaccuguaagcacuuauauguuaacaaauagugaauuauuaucauuaaucaaugauaugccuauaacaaaugaucagaaaaaguuaauguccaacaauguucaaauaguuagacagcaaaguuacucuaucauguccauaauaaaggaggaagucuuagcauauguaguucaauuaccacuauaugguguaauagauacaccuuguuggaaacuacacacauccccucuaugcacaaccaacacaaaggaaggguccaacaucuguuuaacaagaaccgacagaggaugguacugugacaaugcaggaucagugucuuucuucccacaagcugaaacaugcaaaguucaaucgaaucgaguauuuugugacacaaugaacagucuaacauuaccaagugaaguaaaucucugcaacauugacauauucaacccuaaauaugauugcaaaauuaugacuucaaaaacagaugugagcagcuccguuaucacaucucuaggagccauugugucaugcuauggcaaaacuaaauguacagcauccaauaaaaaucguggaaucauaaagacauuuucuaacgggugugauuauguaucaaauaaggggguggacacuguaucuguagguaauacauuauauuauguaaauaagcaagaaggaaaaagccucuauguaaaaggugaaccaauaauaaauuucuaugacccauuaguguucccuucugaugaauuugaugcaucaauaucucaagucaaugagaagauuaaccagagccuagcauuuauucguaaauccgaugaauuauuacauaauguaaauguugguaaauccaccacaaauaucaugauaacuacuauaauuauagugauuauaguaauauuguuauuauuaauugcaguugggcuguuccuauacugcaaggccagaagcacaccagucacacuaagcaaggaucaacugagugguauaaauaauauugcauuuaguaacugaggacuaguacuggcugcaucucccuuuccucuguccuccauccuucucccaggauggugaagggggaccugguacccagugauccccaccccaggauccuaaaucaugacuuaccugcuaauaaaaacucauuggaaaagugagaagaucuaaaaaaaaaaaaaaaaaaaaaaaaaaaaaaaaaaaaaaaaaaaaaaaaaaaaaaaaaaaaaaaaugcaucccccccccccccccccccccccccccccccaaaggcucuuuucagagccaccagaauu

SEQ ID NO: 12024 - RNA, 2103 nt, Artificial Sequence
  mRNA product Design h-1 comprising derived and/or modified sequence from HRSV(Memphis-37)__AIY60640.1__F0 (opt1)
gggagacccgugacccggaaguuguacggcuacgcgacuuucccucccacaaacccucgcgcccuuccuuuccuacuugggcccggcagaaagcuuaccauggagcugcccauccucaagaccaacgccaucaccacgauccuggccgcggugacccugugcuucgccagcucccagaacaucaccgaggaguucuaccagagcacgugcuccgccgucagcaagggcuaccucuccgcccugcgcaccgggugguacaccagcgugaucaccaucgagcuguccaacaucaaggagaacaagugcaacggcaccgacgccaaggugaagcucaucaagcaggagcuggacaaguacaagaacgcggucacggagcugcagcuccugaugcagagcaccccggccgccaacaaccgggcccgccgggagcugccccgcuucaugaacuacacccucaacaacaccaagaacaacaacgugacgcuguccaagaagcggaagcgccgguuccugggguuccuccugggcguggggagcgcgaucgccuccggcaucgccgucagcaaggugcugcaccucgagggcgaggugaacaagaucaagaacgcccugcuguccaccaacaaggccgucgugagccucuccaacggggugagcguccugaccuccaaggugcuggaccucaagaacuacaucgacaagcagcugcugcccaucgugaacaagcagagcugcuccaucagcaacaucgagaccgucaucgaguuccagcagaagaacaaccgccuccuggagaucacgcgggaguucagcgugaacgcgggcgugaccacccccgucuccaccuacaugcugacgaacagcgagcuccugucccugaucaacgacaugccgaucaccaacgaccagaagaagcucaugagcaacaacgugcagaucgugcgccagcaguccuacagcaucauguccaucaucaaggaggagguccuggccuacguggugcagcugccccucuacggggucaucgacacccccugcuggaagcugcacaccagcccccugugcacgaccaacaccaaggagggcuccaacaucugccucacccggacggaccgcgggugguacugcgacaacgccggcagcguguccuucuucccgcaggccgagaccugcaagguccagagcaaccggguguucugcgacaccaugaacucccugacccugcccagcgaggugaaccucugcaacaucgacaucuucaaccccaaguacgacugcaagaucaugacguccaagaccgacgucagcuccagcgugaucaccucccugggcgccaucgugagcugcuacgggaagaccaagugcacggcgagcaacaagaaccgcggcaucaucaagaccuucuccaacgggugcgacuacgucagcaacaagggcguggacaccguguccgucggcaacacccuguacuacgugaacaagcaggagggcaagagccucuacgugaagggggagcccaucaucaacuucuacgacccgcuggucuuccccuccgacgaguucgacgccagcaucucccaggugaacgagaagaucaaccagagccuggccuucauccggaaguccgacgagcuccugcacaacgugaacgucggcaagagcaccacgaacaucaugaucaccaccaucaucaucgugaucaucgugauccugcugcuccugaucgccgucgggcuguuccucuacugcaaggcccgcuccacccccgugacgcugagcaaggaccagcuguccgggaucaacaacaucgcguucagcaacugaggacuaguacuggcugcaucucccuuuccucuguccuccauccuucucccaggauggugaagggggaccugguacccagugauccccaccccaggauccuaaaucaugacuuaccugcuaauaaaaacucauuggaaaagugagaagaucuaaaaaaaaaaaaaaaaaaaaaaaaaaaaaaaaaaaaaaaaaaaaaaaaaaaaaaaaaaaaaaaaugcaucccccccccccccccccccccccccccccccaaaggcucuuuucagagccaccagaauu

SEQ ID NO: 12025 - RNA, 2103 nt, Artificial Sequence
  mRNA product Design h-1 comprising derived and/or modified sequence from HRSV(Memphis-37)__AIY60640.1__F0 (opt2)
gggagacccgugacccggaaguuguacggcuacgcgacuuucccucccacaaacccucgcgcccuuccuuuccuacuugggcccggcagaaagcuuaccauggagcuccccauccucaagaccaacgccaucaccaccauccucgccgccgucacccucugcuucgccuccucccagaacaucaccgaggaguucuaccaguccaccugcuccgccgucuccaagggcuaccucuccgcccuccgcaccggcugguacaccuccgucaucaccaucgagcucuccaacaucaaggagaacaagugcaacggcaccgacgccaaggucaagcucaucaagcaggagcucgacaaguacaagaacgccgucaccgagcuccagcuccucaugcaguccacccccgccgccaacaaccgcgcccgccgcgagcucccccgcuucaugaacuacacccucaacaacaccaagaacaacaacgucacccucuccaagaagcgcaagcgccgcuuccucggcuuccuccucggcgucggcuccgccaucgccuccggcaucgccgucuccaagguccuccaccucgagggcgaggucaacaagaucaagaacgcccuccucuccaccaacaaggccgucgucucccucuccaacggcgucuccguccucaccuccaagguccucgaccucaagaacuacaucgacaagcagcuccuccccaucgucaacaagcaguccugcuccaucuccaacaucgagaccgucaucgaguuccagcagaagaacaaccgccuccucgagaucacccgcgaguucuccgucaacgccggcgucaccacccccgucuccaccuacaugcucaccaacuccgagcuccucucccucaucaacgacaugcccaucaccaacgaccagaagaagcucauguccaacaacguccagaucguccgccagcaguccuacuccaucauguccaucaucaaggaggagguccucgccuacgucguccagcucccccucuacggcgucaucgacacccccugcuggaagcuccacaccuccccccucugcaccaccaacaccaaggagggcuccaacaucugccucacccgcaccgaccgcggcugguacugcgacaacgccggcuccgucuccuucuucccccaggccgagaccugcaagguccaguccaaccgcgucuucugcgacaccaugaacucccucacccuccccuccgaggucaaccucugcaacaucgacaucuucaaccccaaguacgacugcaagaucaugaccuccaagaccgacgucuccuccuccgucaucaccucccucggcgccaucgucuccugcuacggcaagaccaagugcaccgccuccaacaagaaccgcggcaucaucaagaccuucuccaacggcugcgacuacgucuccaacaagggcgucgacaccgucuccgucggcaacacccucuacuacgucaacaagcaggagggcaagucccucuacgucaagggcgagcccaucaucaacuucuacgacccccucgucuuccccuccgacgaguucgacgccuccaucucccaggucaacgagaagaucaaccagucccucgccuucauccgcaaguccgacgagcuccuccacaacgucaacgucggcaaguccaccaccaacaucaugaucaccaccaucaucaucgucaucaucgucauccuccuccuccucaucgccgucggccucuuccucuacugcaaggcccgcuccacccccgucacccucuccaaggaccagcucuccggcaucaacaacaucgccuucuccaacugaggacuaguacuggcugcaucucccuuuccucuguccuccauccuucucccaggauggugaagggggaccugguacccagugauccccaccccaggauccuaaaucaugacuuaccugcuaauaaaaacucauuggaaaagugagaagaucuaaaaaaaaaaaaaaaaaaaaaaaaaaaaaaaaaaaaaaaaaaaaaaaaaaaaaaaaaaaaaaaaugcaucccccccccccccccccccccccccccccccaaaggcucuuuucagagccaccagaauu

SEQ ID NO: 12026 - RNA, 2103 nt, Artificial Sequence
  mRNA product Design h-1 comprising derived and/or modified sequence from HRSV(Memphis-37)__AIY60640.1__F0 (opt3)
gggagacccgugacccggaaguuguacggcuacgcgacuuucccucccacaaacccucgcgcccuuccuuuccuacuugggcccggcagaaagcuuaccauggagcugcccauccucaagaccaacgccauuacaacuauacuugcugcagugacgcugugcuucgccagcucccagaauaucaccgaagaguuuuaccaaucuacauguucagcggucaguaaaggcuauuugagcgcuuuaagaacugggugguacaccuccguuauuacaaucgaacugucuaacauuaaggagaauaaaugcaacggaaccgacgccaaggugaaacuaaucaagcaggaacucgauaaguauaaaaaugcaguaacugagcugcagcuucugaugcagucgaccccugccgcuaacaauagggcacggcgcgaguugccacgauucaugaacuacacacucaauaacacgaagaauaacaaugugacucugagcaaaaagcguaaaagaagguuucuggguuuccucuuaggcgucgggucagccauagcuaguggaaucgccguguccaagguucugcaccuugaaggcgaggugaacaagauuaaaaaugcguugcugucuaccaacaaggcagucgugagccuauccaacgguguaucaguucucacaaguaaagugcuggaccuuaagaauuauaucgauaaacaacuguugccgauugucaacaagcagagcuguucuaucuccaauauagaaacugugauugaguuucagcagaaaaacaaucggcuccuggagaucacccgcgaguucucagugaacgccggggucacaacccccguuagcacguacauguuaacuaauagugaacugcucucucuuauuaacgacaugccuaucacaaaugaucaaaagaagcugauguccaacaaugugcagaucguaagacagcagagcuauucgauuaugucuauaaucaaagaagagguguuggcuuacgucgugcaacuaccacuguacggaguuauugacacccccugcuggaagcuccauacuuccccucuguguacaaccaacacgaaagaaggcucaaauaucugccuuaccaggacagaucggggcugguauugugacaacgccgggagugugagcuuuuucccacaggcagagacuugcaagguccaguccaaucgcguguuuugugauaccaugaacucucugacauugcccagcgagguaaaccucugcaauauagacauuuucaacccuaaauacgauuguaagaucaugacuucaaagaccgacguuaguuccagcgugaucacaucucugggagcuauugucucaugcuaugguaaaaccaagugcacugccaguaauaaaaaccgaggcaucauuaagacguuuagcaaugggugugauuacguguccaacaaaggagucgacacagugucuguuggcaauaccuuauauuacgugaacaagcaagaagguaagucgcuguauguaaaaggggagccaauaaucaauuucuacgacccgcuagucuuucccagcgaugaguucgacgcguccauuucacaggugaacgaaaagaucaaucagagucucgccuucaucagaaaaucugaugaacugcuucacaacguuaaugugggaaagagcacuaccaacauuaugauaacaaccaucauuaucgucauuaucgugauauugcugcuccugaucgcaguaggccuuuuucuguacugcaaagcuagguccacuccugugacauugucaaaggaccagcucagcggcauuaauaacaucgccuucucuaacugaggacuaguacuggcugcaucucccuuuccucuguccuccauccuucucccaggauggugaagggggaccugguacccagugauccccaccccaggauccuaaaucaugacuuaccugcuaauaaaaacucauuggaaaagugagaagaucuaaaaaaaaaaaaaaaaaaaaaaaaaaaaaaaaaaaaaaaaaaaaaaaaaaaaaaaaaaaaaaaaugcaucccccccccccccccccccccccccccccccaaaggcucuuuucagagccaccagaauu

SEQ ID NO: 12027 - RNA, 2103 nt, Artificial Sequence
  mRNA product Design h-1 comprising derived and/or modified sequence from HRSV(Memphis-37)__AIY60640.1__F0 (opt4)
gggagacccgugacccggaaguuguacggcuacgcgacuuucccucccacaaacccucgcgcccuuccuuuccuacuugggcccggcagaaagcuuaccauggagcugcccauccugaagaccaacgccaucaccaccauccuggccgccgugacccugugcuucgccagcagccagaacaucaccgaggaguucuaccagagcaccugcagcgccgugagcaagggcuaccugagcgcccugagaaccggcugguacaccagcgugaucaccaucgagcugagcaacaucaaggagaacaagugcaacggcaccgacgccaaggugaagcugaucaagcaggagcuggacaaguacaagaacgccgugaccgagcugcagcugcugaugcagagcacccccgccgccaacaacagagccagaagagagcugcccagauucaugaacuacacccugaacaacaccaagaacaacaacgugacccugagcaagaagagaaagagaagauuccugggcuuccugcugggcgugggcagcgccaucgccagcggcaucgccgugagcaaggugcugcaccuggagggcgaggugaacaagaucaagaacgcccugcugagcaccaacaaggccguggugagccugagcaacggcgugagcgugcugaccagcaaggugcuggaccugaagaacuacaucgacaagcagcugcugcccaucgugaacaagcagagcugcagcaucagcaacaucgagaccgugaucgaguuccagcagaagaacaacagacugcuggagaucaccagagaguucagcgugaacgccggcgugaccacccccgugagcaccuacaugcugaccaacagcgagcugcugagccugaucaacgacaugcccaucaccaacgaccagaagaagcugaugagcaacaacgugcagaucgugagacagcagagcuacagcaucaugagcaucaucaaggaggaggugcuggccuacguggugcagcugccccuguacggcgugaucgacacccccugcuggaagcugcacaccagcccccugugcaccaccaacaccaaggagggcagcaacaucugccugaccagaaccgacagaggcugguacugcgacaacgccggcagcgugagcuucuucccccaggccgagaccugcaaggugcagagcaacagaguguucugcgacaccaugaacagccugacccugcccagcgaggugaaccugugcaacaucgacaucuucaaccccaaguacgacugcaagaucaugaccagcaagaccgacgugagcagcagcgugaucaccagccugggcgccaucgugagcugcuacggcaagaccaagugcaccgccagcaacaagaacagaggcaucaucaagaccuucagcaacggcugcgacuacgugagcaacaagggcguggacaccgugagcgugggcaacacccuguacuacgugaacaagcaggagggcaagagccuguacgugaagggcgagcccaucaucaacuucuacgacccccugguguuccccagcgacgaguucgacgccagcaucagccaggugaacgagaagaucaaccagagccuggccuucaucagaaagagcgacgagcugcugcacaacgugaacgugggcaagagcaccaccaacaucaugaucaccaccaucaucaucgugaucaucgugauccugcugcugcugaucgccgugggccuguuccuguacugcaaggccagaagcacccccgugacccugagcaaggaccagcugagcggcaucaacaacaucgccuucagcaacugaggacuaguacuggcugcaucucccuuuccucuguccuccauccuucucccaggauggugaagggggaccugguacccagugauccccaccccaggauccuaaaucaugacuuaccugcuaauaaaaacucauuggaaaagugagaagaucuaaaaaaaaaaaaaaaaaaaaaaaaaaaaaaaaaaaaaaaaaaaaaaaaaaaaaaaaaaaaaaaaugcaucccccccccccccccccccccccccccccccaaaggcucuuuucagagccaccagaauu

SEQ ID NO: 12028 - RNA, 2103 nt, Artificial Sequence
  mRNA product Design h-1 comprising derived and/or modified sequence from HRSV(Memphis-37)__AIY60640.1__F0 (opt5)
gggagacccgugacccggaaguuguacggcuacgcgacuuucccucccacaaacccucgcgcccuuccuuuccuacuugggcccggcagaaagcuuaccauggagcugcccauccucaagaccaacgccauuacaacgauccuggcugccgugacccuuugcuucgcgagcucccagaauauuacagaagaguuuuaccaaucuaccuguagcgcugucuccaaaggcuaucugucugcccucagaacagggugguacaccagcguuaucacaauugaacuguccaacaucaaggagaauaaaugcaacggaaccgacgccaaggugaaacuuaucaagcaggaacuggauaaguauaaaaaugcugugacggagcuccagcugcugaugcagucuaccccugccgcuaacaaucgggcccgcagagagcucccgcgguucaugaacuacacacugaauaacaccaagaauaacaaugucacacuuagcaaaaagcgcaaaagacgguuucugggcuuccuccugggggugggauccgcgauugccagcggcaucgcuguuucuaaggugcuucaccuggaaggggaggucaacaagauuaaaaaugcccuccuguccaccaacaaggcugugguuagccugucuaacggaguguccguccucacgagcaaagugcuggaccuuaagaauuauaucgauaaacaacugcuccccauugugaacaagcagucuuguuccaucagcaauauugaaacagucaucgaguuucagcagaaaaacaaucgccugcuugagaucaccagagaauuuuccguuaacgccggcgugacaaccccugugucuaccuacaugcugacaaauagcgagcuccugucccugauuaacgacaugcccaucacgaaugaucaaaagaagcucaugagcaacaauguccagauugugcggcagcagucuuauuccaucaugagcauuaucaaagaagagguucuggcguacgugguccaacuuccucuguacggcgugaucgacacccccugcuggaagcuccauacaucuccucuguguaccacaaacaccaaagaagggagcaauauuugccuuacgcgcacagauagaggaugguauugugacaacgccggcuccguuucuuucuucccgcaggcugagaccugcaaggugcagagcaaucgggucuuuugugauaccaugaacucccugacacuccccagcgaggugaaccugugcaauaucgacauuuucaacccuaaauacgauuguaagaucaugaccucuaagacagacgucuccagcucugugauuacgucccugggggccaucguuagcugcuauggaaaaaccaagugcacagcuuccaauaaaaaccgcggcaucauuaagaccuuuucuaaugggugugauuacgugagcaacaaaggagucgacacaguguccguuggcaauacccucuauuacgugaacaagcaagaaggcaagucucuguaugucaaaggggagcccaucauuaauuucuacgacccucuuguguuucccagcgaugaguucgacgccuccaucagccaggugaacgaaaagauuaaucagucucuggccuucaucagaaaauccgaugaacuccugcacaacguuaaugucggaaagagcacgaccaacauuaugaucacaaccaucauuaucgugauuaucgugauucugcuucuccugaucgcugucggccuguuucucuacugcaaagcgcggucuacaccggugacccuguccaaggaccagcuuagcgggaucaauaacauugccuucucuaacugaggacuaguacuggcugcaucucccuuuccucuguccuccauccuucucccaggauggugaagggggaccugguacccagugauccccaccccaggauccuaaaucaugacuuaccugcuaauaaaaacucauuggaaaagugagaagaucuaaaaaaaaaaaaaaaaaaaaaaaaaaaaaaaaaaaaaaaaaaaaaaaaaaaaaaaaaaaaaaaaugcaucccccccccccccccccccccccccccccccaaaggcucuuuucagagccaccagaauu

SEQ ID NO: 12029 - RNA, 2103 nt, Artificial Sequence
  mRNA product Design h-1 comprising derived and/or modified sequence from HRSV(Memphis-37)__AIY60640.1__F0 (opt6)
gggagacccgugacccggaaguuguacggcuacgcgacuuucccucccacaaacccucgcgcccuuccuuuccuacuugggcccggcagaaagcuuaccauggaacugccuauucuaaaaacaaaugccauaacaacaauucuugcagcaguaacauuauguuuugcaucaucacaaaacauuacagaagaauuuuaccaauccacuugcucagccguaucaaaaggauaccuaucagccuuaagaacagguugguacaccucaguaauaaccauagaacuaucaaacauaaaagaaaacaaaugcaaugguacugaugcaaaagucaaacuaaucaaacaagaacuggacaaauacaaaaaugcaguaaccgaacuacaacuccuaaugcaauccacaccugcagccaacaacagagcaagacgcgaacuaccaagauuuaugaauuacacauuaaacaacaccaagaacaacaauguaacucucucaaaaaaaagaaaaagacgcuuucuagguuuccuccuaggcgucggaucugcaauagccucaggaauagcaguaucaaaaguucuacaccuagaaggagaaguaaacaaaauuaaaaacgcauuacuaucaaccaacaaagcaguuguaucccuuucaaauggagucucuguacuuacaucaaaaguacucgaccuaaaaaacuauauagacaaacaacuacucccaauagucaauaagcaaucaugcagcauaucaaacauagaaacaguuauagaauuucaacaaaaaaacaacagacuacucgaaauaaccagagaauuuagcgucaacgcaggcguaaccacaccgguauccacauacaugcuuacaaacucagaacuccucucacuaauaaacgacaugccaauaacuaaugaccaaaaaaaacuaaugucaaacaauguccaaauaguccgucaacaaucauacucaauaaugucaauaauaaaagaagaaguauuagcauauguaguccaacuaccauuauacggcguuauagacacaccuuguuggaaacuucacacauccccacucuguacaaccaacacaaaagaagguuccaauauaugccuaacuagaaccgacagaggaugguauugcgacaacgcaggaucuguaucauucuuuccccaagcagaaacauguaaaguacaaaguaaccgcguauucugcgacaccaugaacucauuaacccucccauccgaaguuaauuuaugcaauauagacauauuuaauccuaaauacgacugcaaaauaaugacaucaaaaacagacguuaguuccuccguaaucacaucuuugggcgcaauagucucaugcuauggaaaaacaaaaugcacagccucaaacaaaaauagaggaauaauaaaaacauucagcaacggcugugauuauguauccaacaaaggaguagacacaguauccguaggcaauacccuuuacuacguuaauaaacaagaaggaaaaucauuauacgucaaaggagaaccuaucauaaauuucuacgacccauuaguauucccuucagacgaauuugaugccucaauaucccaagucaaugaaaaaaucaaccaaucacuagccuuuauccgcaaaucagacgaauuacuacacaacguaaacguaggcaaaucaacaacuaauauaaugauaacaacaauaauaauaguaauuauaguaauauuauuacuacuaaucgccguagguuuauucuuauacuguaaagcacgaucaacaccaguuacacucucaaaagaucaacuaucaggaauaaacaacauagcauuuuccaauuaaggacuaguacuggcugcaucucccuuuccucuguccuccauccuucucccaggauggugaagggggaccugguacccagugauccccaccccaggauccuaaaucaugacuuaccugcuaauaaaaacucauuggaaaagugagaagaucuaaaaaaaaaaaaaaaaaaaaaaaaaaaaaaaaaaaaaaaaaaaaaaaaaaaaaaaaaaaaaaaaugcaucccccccccccccccccccccccccccccccaaaggcucuuuucagagccaccagaauu

SEQ ID NO: 12030 - RNA, 2103 nt, Artificial Sequence
  mRNA product Design h-1 comprising derived and/or modified sequence from HRSV(Memphis-37)__AIY60640.1__F0 (opt11)
gggagacccgugacccggaaguuguacggcuacgcgacuuucccucccacaaacccucgcgcccuuccuuuccuacuugggcccggcagaaagcuuaccauggaacuccccauccucaaaacaaacgccauaaccacuauccucgccgccgucacccucugcuucgccuccucccaaaacaucacagaggaguucuaccaauccacaugcuccgccgucuccaaaggcuaccucagcgcccuacguaccggcugguacaccagcgucaucacaauagaacucuccaacaucaaggaaaacaaaugcaacggcaccgaugccaaaguaaaacucaucaaacaagaacucgauaaauacaaaaacgccgucaccgaacuacaacuccuaaugcaaagcacacccgccgccaacaacagagcacggcgcgaacugccccgcuucaugaacuacacccucaacaacaccaaaaauaacaacgucacccuauccaagaaacgcaaacgccgauuccucgguuuccuacucggcguaggaagcgccauagccucaggcaucgccgucuccaaaguccuccaucuggaaggcgaagucaacaaaaucaaaaacgcacucuuauccaccaacaaagccgucgucucccucucgaacggggucuccguccuuaccuccaaaguccucgaccuuaaaaacuacaucgacaaacaacuacuaccaauagucaauaaacaauccugcuccaucucaaacauagaaaccgucauagaguuccaacagaagaacaaucgccuccucgaaauaacucgcgaguucuccgucaacgcaggcgucacgaccccugucucaacauacaugcuaacuaacucagaacuccuaagccuaaucaacgacaugcccaucacaaacgaccaaaagaaacucaugagcaacaauguccagauagucagacagcaauccuauagcaucaugucuauaauaaaagaagaagugcucgccuacguaguccaacucccucuuuacggcgucauagacacacccugcuggaaacuccacacaucuccucucugcaccaccaacacaaaagaaggcagcaacaucugccugacccgaaccgaccgcggaugguacugcgacaacgcuggcuccgugucuuucuuuccccaagccgaaaccugcaaaguccaguccaaccgcgucuucugcgacacaaugaacucccucacccuacccuccgaaguuaaccucugcaacaucgacaucuucaauccaaaauacgacugcaaaaucaugaccucgaaaacggacguauccuccuccgucauaacaucacuuggagccaucguuagcugcuacggaaaaaccaaauguaccgccuccaacaaaaaccgcggaauaaucaaaacauucuccaacggcugcgacuacguaagcaacaaaggggucgauacugucuccguagguaacacccuauacuacgucaacaaacaagaaggaaaaucacuauacguuaaaggcgaacccauuaucaacuucuacgacccccucguuuucccauccgacgaguucgacgccuccauaagccaaguuaacgaaaagauaaaccaaucgcucgcauucauccgcaaauccgacgaacuccuacacaacgucaacgugggcaaauccacaacaaacaucaugaucaccaccaucauuaucgucauaauagucauccuccuccugcucaucgccgugggacuauuccuauacugcaaagcccgcucgacgcccgucacacuuuccaaagaccaacuaagcggaaucaacaacauagcguucagcaauuaaggacuaguacuggcugcaucucccuuuccucuguccuccauccuucucccaggauggugaagggggaccugguacccagugauccccaccccaggauccuaaaucaugacuuaccugcuaauaaaaacucauuggaaaagugagaagaucuaaaaaaaaaaaaaaaaaaaaaaaaaaaaaaaaaaaaaaaaaaaaaaaaaaaaaaaaaaaaaaaaugcaucccccccccccccccccccccccccccccccaaaggcucuuuucagagccaccagaauu

SEQ ID NO: 12031 - RNA, 2319 nt, Artificial Sequence
  mRNA product Design h-2 comprising derived and/or modified sequence from HRSV(Memphis-37)__AIY60640.1__F0 (wt)
gggagacccgugacccggaaguuguacggcuacgcgacuuucccucccacaaacccucgcgcccuuccuuuccuacuugggcccggcagaaagcuuaccauggaguugccaauccucaaaacaaaugcaauuaccacaauccuugcugcagucacacucuguuucgcuuccagucaaaacaucacugaagaauuuuaucaaucaacaugcagugcaguuagcaaaggcuaucuuagugcuuuaagaacugguugguauacuaguguuauaacuauagaauuaaguaauaucaaggaaaauaaguguaauggaacagaugcuaagguaaaauugauaaaacaagaauuagauaaauauaaaaaugcuguaacagaauugcaguugcucaugcaaagcacaccagcagccaacaaucgagccagaagagaacuaccaagguuuaugaauuauacacucaacaauaccaaaaauaacaauguaacauuaagcaagaaaaggaaaagaagauuucuuggcuuuuuguuagguguuggaucugcaaucgccaguggcauugcuguaucuaaaguccugcaccuagaaggggaagugaacaaaaucaaaaaugcucuacuauccacaaacaaggcuguagucagcuuaucaaauggaguuagugucuuaaccagcaaaguguuagaccucaaaaacuauauagauaaacaguuguuacccauugugaacaagcaaagcugcagcauaucaaacauugaaacugugauagaauuccaacaaaagaacaacagacuacuagagauuaccagggaauuuaguguuaaugcagguguaacuacaccuguaagcacuuauauguuaacaaauagugaauuauuaucauuaaucaaugauaugccuauaacaaaugaucagaaaaaguuaauguccaacaauguucaaauaguuagacagcaaaguuacucuaucauguccauaauaaaggaggaagucuuagcauauguaguucaauuaccacuauaugguguaauagauacaccuuguuggaaacuacacacauccccucuaugcacaaccaacacaaaggaaggguccaacaucuguuuaacaagaaccgacagaggaugguacugugacaaugcaggaucagugucuuucuucccacaagcugaaacaugcaaaguucaaucgaaucgaguauuuugugacacaaugaacagucuaacauuaccaagugaaguaaaucucugcaacauugacauauucaacccuaaauaugauugcaaaauuaugacuucaaaaacagaugugagcagcuccguuaucacaucucuaggagccauugugucaugcuauggcaaaacuaaauguacagcauccaauaaaaaucguggaaucauaaagacauuuucuaacgggugugauuauguaucaaauaaggggguggacacuguaucuguagguaauacauuauauuauguaaauaagcaagaaggaaaaagccucuauguaaaaggugaaccaauaauaaauuucuaugacccauuaguguucccuucugaugaauuugaugcaucaauaucucaagucaaugagaagauuaaccagagccuagcauuuauucguaaauccgaugaauuauuacauaauguaaauguugguaaauccaccacaaauaucaugauaacuacuauaauuauagugauuauaguaauauuguuauuauuaauugcaguugggcuguuccuauacugcaaggccagaagcacaccagucacacuaagcaaggaucaacugagugguauaaauaauauugcauuuaguaacugaggacuagugaagggaacacccaaauuuaauucagccuuaagcacaauuaauuaagagugaaacguaauuguacaagcaguuggucacccaccauagggcaugaucaacaccgcaaccuuuccuuuuucccccagugauucugaaaaaccccucuucccuucagcuugcuuagauguuccaaauuuaguaagcuuaaggcggccuacagaagaaaaagaaaaaaaaggccacaaaaguucccucucacuuucaguaaauaaaauaaaagcagcaacagaaauaaagaaauaaaugaaauucaaaaugaaauaaauauuguguugugcagcauuaaaaaaucaauaaaaauuaaaaaugagcaagaucuaaaaaaaaaaaaaaaaaaaaaaaaaaaaaaaaaaaaaaaaaaaaaaaaaaaaaaaaaaaaaaaaugcaucccccccccccccccccccccccccccccccaaaggcucuuuucagagccaccagaauu

SEQ ID NO: 12032 - RNA, 2319 nt, Artificial Sequence
  mRNA product Design h-2 comprising derived and/or modified sequence from HRSV(Memphis-37)__AIY60640.1__F0 (opt1)
gggagacccgugacccggaaguuguacggcuacgcgacuuucccucccacaaacccucgcgcccuuccuuuccuacuugggcccggcagaaagcuuaccauggagcugcccauccucaagaccaacgccaucaccacgauccuggccgcggugacccugugcuucgccagcucccagaacaucaccgaggaguucuaccagagcacgugcuccgccgucagcaagggcuaccucuccgcccugcgcaccgggugguacaccagcgugaucaccaucgagcuguccaacaucaaggagaacaagugcaacggcaccgacgccaaggugaagcucaucaagcaggagcuggacaaguacaagaacgcggucacggagcugcagcuccugaugcagagcaccccggccgccaacaaccgggcccgccgggagcugccccgcuucaugaacuacacccucaacaacaccaagaacaacaacgugacgcuguccaagaagcggaagcgccgguuccugggguuccuccugggcguggggagcgcgaucgccuccggcaucgccgucagcaaggugcugcaccucgagggcgaggugaacaagaucaagaacgcccugcuguccaccaacaaggccgucgugagccucuccaacggggugagcguccugaccuccaaggugcuggaccucaagaacuacaucgacaagcagcugcugcccaucgugaacaagcagagcugcuccaucagcaacaucgagaccgucaucgaguuccagcagaagaacaaccgccuccuggagaucacgcgggaguucagcgugaacgcgggcgugaccacccccgucuccaccuacaugcugacgaacagcgagcuccugucccugaucaacgacaugccgaucaccaacgaccagaagaagcucaugagcaacaacgugcagaucgugcgccagcaguccuacagcaucauguccaucaucaaggaggagguccuggccuacguggugcagcugccccucuacggggucaucgacacccccugcuggaagcugcacaccagcccccugugcacgaccaacaccaaggagggcuccaacaucugccucacccggacggaccgcgggugguacugcgacaacgccggcagcguguccuucuucccgcaggccgagaccugcaagguccagagcaaccggguguucugcgacaccaugaacucccugacccugcccagcgaggugaaccucugcaacaucgacaucuucaaccccaaguacgacugcaagaucaugacguccaagaccgacgucagcuccagcgugaucaccucccugggcgccaucgugagcugcuacgggaagaccaagugcacggcgagcaacaagaaccgcggcaucaucaagaccuucuccaacgggugcgacuacgucagcaacaagggcguggacaccguguccgucggcaacacccuguacuacgugaacaagcaggagggcaagagccucuacgugaagggggagcccaucaucaacuucuacgacccgcuggucuuccccuccgacgaguucgacgccagcaucucccaggugaacgagaagaucaaccagagccuggccuucauccggaaguccgacgagcuccugcacaacgugaacgucggcaagagcaccacgaacaucaugaucaccaccaucaucaucgugaucaucgugauccugcugcuccugaucgccgucgggcuguuccucuacugcaaggcccgcuccacccccgugacgcugagcaaggaccagcuguccgggaucaacaacaucgcguucagcaacugaggacuagugaagggaacacccaaauuuaauucagccuuaagcacaauuaauuaagagugaaacguaauuguacaagcaguuggucacccaccauagggcaugaucaacaccgcaaccuuuccuuuuucccccagugauucugaaaaaccccucuucccuucagcuugcuuagauguuccaaauuuaguaagcuuaaggcggccuacagaagaaaaagaaaaaaaaggccacaaaaguucccucucacuuucaguaaauaaaauaaaagcagcaacagaaauaaagaaauaaaugaaauucaaaaugaaauaaauauuguguugugcagcauuaaaaaaucaauaaaaauuaaaaaugagcaagaucuaaaaaaaaaaaaaaaaaaaaaaaaaaaaaaaaaaaaaaaaaaaaaaaaaaaaaaaaaaaaaaaaugcaucccccccccccccccccccccccccccccccaaaggcucuuuucagagccaccagaauu

SEQ ID NO: 12033 - RNA, 2319 nt, Artificial Sequence
  mRNA product Design h-2 comprising derived and/or modified sequence from HRSV(Memphis-37)__AIY60640.1__F0 (opt2)
gggagacccgugacccggaaguuguacggcuacgcgacuuucccucccacaaacccucgcgcccuuccuuuccuacuugggcccggcagaaagcuuaccauggagcuccccauccucaagaccaacgccaucaccaccauccucgccgccgucacccucugcuucgccuccucccagaacaucaccgaggaguucuaccaguccaccugcuccgccgucuccaagggcuaccucuccgcccuccgcaccggcugguacaccuccgucaucaccaucgagcucuccaacaucaaggagaacaagugcaacggcaccgacgccaaggucaagcucaucaagcaggagcucgacaaguacaagaacgccgucaccgagcuccagcuccucaugcaguccacccccgccgccaacaaccgcgcccgccgcgagcucccccgcuucaugaacuacacccucaacaacaccaagaacaacaacgucacccucuccaagaagcgcaagcgccgcuuccucggcuuccuccucggcgucggcuccgccaucgccuccggcaucgccgucuccaagguccuccaccucgagggcgaggucaacaagaucaagaacgcccuccucuccaccaacaaggccgucgucucccucuccaacggcgucuccguccucaccuccaagguccucgaccucaagaacuacaucgacaagcagcuccuccccaucgucaacaagcaguccugcuccaucuccaacaucgagaccgucaucgaguuccagcagaagaacaaccgccuccucgagaucacccgcgaguucuccgucaacgccggcgucaccacccccgucuccaccuacaugcucaccaacuccgagcuccucucccucaucaacgacaugcccaucaccaacgaccagaagaagcucauguccaacaacguccagaucguccgccagcaguccuacuccaucauguccaucaucaaggaggagguccucgccuacgucguccagcucccccucuacggcgucaucgacacccccugcuggaagcuccacaccuccccccucugcaccaccaacaccaaggagggcuccaacaucugccucacccgcaccgaccgcggcugguacugcgacaacgccggcuccgucuccuucuucccccaggccgagaccugcaagguccaguccaaccgcgucuucugcgacaccaugaacucccucacccuccccuccgaggucaaccucugcaacaucgacaucuucaaccccaaguacgacugcaagaucaugaccuccaagaccgacgucuccuccuccgucaucaccucccucggcgccaucgucuccugcuacggcaagaccaagugcaccgccuccaacaagaaccgcggcaucaucaagaccuucuccaacggcugcgacuacgucuccaacaagggcgucgacaccgucuccgucggcaacacccucuacuacgucaacaagcaggagggcaagucccucuacgucaagggcgagcccaucaucaacuucuacgacccccucgucuuccccuccgacgaguucgacgccuccaucucccaggucaacgagaagaucaaccagucccucgccuucauccgcaaguccgacgagcuccuccacaacgucaacgucggcaaguccaccaccaacaucaugaucaccaccaucaucaucgucaucaucgucauccuccuccuccucaucgccgucggccucuuccucuacugcaaggcccgcuccacccccgucacccucuccaaggaccagcucuccggcaucaacaacaucgccuucuccaacugaggacuagugaagggaacacccaaauuuaauucagccuuaagcacaauuaauuaagagugaaacguaauuguacaagcaguuggucacccaccauagggcaugaucaacaccgcaaccuuuccuuuuucccccagugauucugaaaaaccccucuucccuucagcuugcuuagauguuccaaauuuaguaagcuuaaggcggccuacagaagaaaaagaaaaaaaaggccacaaaaguucccucucacuuucaguaaauaaaauaaaagcagcaacagaaauaaagaaauaaaugaaauucaaaaugaaauaaauauuguguugugcagcauuaaaaaaucaauaaaaauuaaaaaugagcaagaucuaaaaaaaaaaaaaaaaaaaaaaaaaaaaaaaaaaaaaaaaaaaaaaaaaaaaaaaaaaaaaaaaugcaucccccccccccccccccccccccccccccccaaaggcucuuuucagagccaccagaauu

SEQ ID NO: 12034 - RNA, 2319 nt, Artificial Sequence
  mRNA product Design h-2 comprising derived and/or modified sequence from HRSV(Memphis-37)__AIY60640.1__F0 (opt3)
gggagacccgugacccggaaguuguacggcuacgcgacuuucccucccacaaacccucgcgcccuuccuuuccuacuugggcccggcagaaagcuuaccauggagcugcccauccucaagaccaacgccauuacaacuauacuugcugcagugacgcugugcuucgccagcucccagaauaucaccgaagaguuuuaccaaucuacauguucagcggucaguaaaggcuauuugagcgcuuuaagaacugggugguacaccuccguuauuacaaucgaacugucuaacauuaaggagaauaaaugcaacggaaccgacgccaaggugaaacuaaucaagcaggaacucgauaaguauaaaaaugcaguaacugagcugcagcuucugaugcagucgaccccugccgcuaacaauagggcacggcgcgaguugccacgauucaugaacuacacacucaauaacacgaagaauaacaaugugacucugagcaaaaagcguaaaagaagguuucuggguuuccucuuaggcgucgggucagccauagcuaguggaaucgccguguccaagguucugcaccuugaaggcgaggugaacaagauuaaaaaugcguugcugucuaccaacaaggcagucgugagccuauccaacgguguaucaguucucacaaguaaagugcuggaccuuaagaauuauaucgauaaacaacuguugccgauugucaacaagcagagcuguucuaucuccaauauagaaacugugauugaguuucagcagaaaaacaaucggcuccuggagaucacccgcgaguucucagugaacgccggggucacaacccccguuagcacguacauguuaacuaauagugaacugcucucucuuauuaacgacaugccuaucacaaaugaucaaaagaagcugauguccaacaaugugcagaucguaagacagcagagcuauucgauuaugucuauaaucaaagaagagguguuggcuuacgucgugcaacuaccacuguacggaguuauugacacccccugcuggaagcuccauacuuccccucuguguacaaccaacacgaaagaaggcucaaauaucugccuuaccaggacagaucggggcugguauugugacaacgccgggagugugagcuuuuucccacaggcagagacuugcaagguccaguccaaucgcguguuuugugauaccaugaacucucugacauugcccagcgagguaaaccucugcaauauagacauuuucaacccuaaauacgauuguaagaucaugacuucaaagaccgacguuaguuccagcgugaucacaucucugggagcuauugucucaugcuaugguaaaaccaagugcacugccaguaauaaaaaccgaggcaucauuaagacguuuagcaaugggugugauuacguguccaacaaaggagucgacacagugucuguuggcaauaccuuauauuacgugaacaagcaagaagguaagucgcuguauguaaaaggggagccaauaaucaauuucuacgacccgcuagucuuucccagcgaugaguucgacgcguccauuucacaggugaacgaaaagaucaaucagagucucgccuucaucagaaaaucugaugaacugcuucacaacguuaaugugggaaagagcacuaccaacauuaugauaacaaccaucauuaucgucauuaucgugauauugcugcuccugaucgcaguaggccuuuuucuguacugcaaagcuagguccacuccugugacauugucaaaggaccagcucagcggcauuaauaacaucgccuucucuaacugaggacuagugaagggaacacccaaauuuaauucagccuuaagcacaauuaauuaagagugaaacguaauuguacaagcaguuggucacccaccauagggcaugaucaacaccgcaaccuuuccuuuuucccccagugauucugaaaaaccccucuucccuucagcuugcuuagauguuccaaauuuaguaagcuuaaggcggccuacagaagaaaaagaaaaaaaaggccacaaaaguucccucucacuuucaguaaauaaaauaaaagcagcaacagaaauaaagaaauaaaugaaauucaaaaugaaauaaauauuguguugugcagcauuaaaaaaucaauaaaaauuaaaaaugagcaagaucuaaaaaaaaaaaaaaaaaaaaaaaaaaaaaaaaaaaaaaaaaaaaaaaaaaaaaaaaaaaaaaaaugcaucccccccccccccccccccccccccccccccaaaggcucuuuucagagccaccagaauu

SEQ ID NO: 12035 - RNA, 2319 nt, Artificial Sequence
  mRNA product Design h-2 comprising derived and/or modified sequence from HRSV(Memphis-37)__AIY60640.1__F0 (opt4)
gggagacccgugacccggaaguuguacggcuacgcgacuuucccucccacaaacccucgcgcccuuccuuuccuacuugggcccggcagaaagcuuaccauggagcugcccauccugaagaccaacgccaucaccaccauccuggccgccgugacccugugcuucgccagcagccagaacaucaccgaggaguucuaccagagcaccugcagcgccgugagcaagggcuaccugagcgcccugagaaccggcugguacaccagcgugaucaccaucgagcugagcaacaucaaggagaacaagugcaacggcaccgacgccaaggugaagcugaucaagcaggagcuggacaaguacaagaacgccgugaccgagcugcagcugcugaugcagagcacccccgccgccaacaacagagccagaagagagcugcccagauucaugaacuacacccugaacaacaccaagaacaacaacgugacccugagcaagaagagaaagagaagauuccugggcuuccugcugggcgugggcagcgccaucgccagcggcaucgccgugagcaaggugcugcaccuggagggcgaggugaacaagaucaagaacgcccugcugagcaccaacaaggccguggugagccugagcaacggcgugagcgugcugaccagcaaggugcuggaccugaagaacuacaucgacaagcagcugcugcccaucgugaacaagcagagcugcagcaucagcaacaucgagaccgugaucgaguuccagcagaagaacaacagacugcuggagaucaccagagaguucagcgugaacgccggcgugaccacccccgugagcaccuacaugcugaccaacagcgagcugcugagccugaucaacgacaugcccaucaccaacgaccagaagaagcugaugagcaacaacgugcagaucgugagacagcagagcuacagcaucaugagcaucaucaaggaggaggugcuggccuacguggugcagcugccccuguacggcgugaucgacacccccugcuggaagcugcacaccagcccccugugcaccaccaacaccaaggagggcagcaacaucugccugaccagaaccgacagaggcugguacugcgacaacgccggcagcgugagcuucuucccccaggccgagaccugcaaggugcagagcaacagaguguucugcgacaccaugaacagccugacccugcccagcgaggugaaccugugcaacaucgacaucuucaaccccaaguacgacugcaagaucaugaccagcaagaccgacgugagcagcagcgugaucaccagccugggcgccaucgugagcugcuacggcaagaccaagugcaccgccagcaacaagaacagaggcaucaucaagaccuucagcaacggcugcgacuacgugagcaacaagggcguggacaccgugagcgugggcaacacccuguacuacgugaacaagcaggagggcaagagccuguacgugaagggcgagcccaucaucaacuucuacgacccccugguguuccccagcgacgaguucgacgccagcaucagccaggugaacgagaagaucaaccagagccuggccuucaucagaaagagcgacgagcugcugcacaacgugaacgugggcaagagcaccaccaacaucaugaucaccaccaucaucaucgugaucaucgugauccugcugcugcugaucgccgugggccuguuccuguacugcaaggccagaagcacccccgugacccugagcaaggaccagcugagcggcaucaacaacaucgccuucagcaacugaggacuagugaagggaacacccaaauuuaauucagccuuaagcacaauuaauuaagagugaaacguaauuguacaagcaguuggucacccaccauagggcaugaucaacaccgcaaccuuuccuuuuucccccagugauucugaaaaaccccucuucccuucagcuugcuuagauguuccaaauuuaguaagcuuaaggcggccuacagaagaaaaagaaaaaaaaggccacaaaaguucccucucacuuucaguaaauaaaauaaaagcagcaacagaaauaaagaaauaaaugaaauucaaaaugaaauaaauauuguguugugcagcauuaaaaaaucaauaaaaauuaaaaaugagcaagaucuaaaaaaaaaaaaaaaaaaaaaaaaaaaaaaaaaaaaaaaaaaaaaaaaaaaaaaaaaaaaaaaaugcaucccccccccccccccccccccccccccccccaaaggcucuuuucagagccaccagaauu

SEQ ID NO: 12036 - RNA, 2319 nt, Artificial Sequence
  mRNA product Design h-2 comprising derived and/or modified sequence from HRSV(Memphis-37)__AIY60640.1__F0 (opt5)
gggagacccgugacccggaaguuguacggcuacgcgacuuucccucccacaaacccucgcgcccuuccuuuccuacuugggcccggcagaaagcuuaccauggagcugcccauccucaagaccaacgccauuacaacgauccuggcugccgugacccuuugcuucgcgagcucccagaauauuacagaagaguuuuaccaaucuaccuguagcgcugucuccaaaggcuaucugucugcccucagaacagggugguacaccagcguuaucacaauugaacuguccaacaucaaggagaauaaaugcaacggaaccgacgccaaggugaaacuuaucaagcaggaacuggauaaguauaaaaaugcugugacggagcuccagcugcugaugcagucuaccccugccgcuaacaaucgggcccgcagagagcucccgcgguucaugaacuacacacugaauaacaccaagaauaacaaugucacacuuagcaaaaagcgcaaaagacgguuucugggcuuccuccugggggugggauccgcgauugccagcggcaucgcuguuucuaaggugcuucaccuggaaggggaggucaacaagauuaaaaaugcccuccuguccaccaacaaggcugugguuagccugucuaacggaguguccguccucacgagcaaagugcuggaccuuaagaauuauaucgauaaacaacugcuccccauugugaacaagcagucuuguuccaucagcaauauugaaacagucaucgaguuucagcagaaaaacaaucgccugcuugagaucaccagagaauuuuccguuaacgccggcgugacaaccccugugucuaccuacaugcugacaaauagcgagcuccugucccugauuaacgacaugcccaucacgaaugaucaaaagaagcucaugagcaacaauguccagauugugcggcagcagucuuauuccaucaugagcauuaucaaagaagagguucuggcguacgugguccaacuuccucuguacggcgugaucgacacccccugcuggaagcuccauacaucuccucuguguaccacaaacaccaaagaagggagcaauauuugccuuacgcgcacagauagaggaugguauugugacaacgccggcuccguuucuuucuucccgcaggcugagaccugcaaggugcagagcaaucgggucuuuugugauaccaugaacucccugacacuccccagcgaggugaaccugugcaauaucgacauuuucaacccuaaauacgauuguaagaucaugaccucuaagacagacgucuccagcucugugauuacgucccugggggccaucguuagcugcuauggaaaaaccaagugcacagcuuccaauaaaaaccgcggcaucauuaagaccuuuucuaaugggugugauuacgugagcaacaaaggagucgacacaguguccguuggcaauacccucuauuacgugaacaagcaagaaggcaagucucuguaugucaaaggggagcccaucauuaauuucuacgacccucuuguguuucccagcgaugaguucgacgccuccaucagccaggugaacgaaaagauuaaucagucucuggccuucaucagaaaauccgaugaacuccugcacaacguuaaugucggaaagagcacgaccaacauuaugaucacaaccaucauuaucgugauuaucgugauucugcuucuccugaucgcugucggccuguuucucuacugcaaagcgcggucuacaccggugacccuguccaaggaccagcuuagcgggaucaauaacauugccuucucuaacugaggacuagugaagggaacacccaaauuuaauucagccuuaagcacaauuaauuaagagugaaacguaauuguacaagcaguuggucacccaccauagggcaugaucaacaccgcaaccuuuccuuuuucccccagugauucugaaaaaccccucuucccuucagcuugcuuagauguuccaaauuuaguaagcuuaaggcggccuacagaagaaaaagaaaaaaaaggccacaaaaguucccucucacuuucaguaaauaaaauaaaagcagcaacagaaauaaagaaauaaaugaaauucaaaaugaaauaaauauuguguugugcagcauuaaaaaaucaauaaaaauuaaaaaugagcaagaucuaaaaaaaaaaaaaaaaaaaaaaaaaaaaaaaaaaaaaaaaaaaaaaaaaaaaaaaaaaaaaaaaugcaucccccccccccccccccccccccccccccccaaaggcucuuuucagagccaccagaauu

SEQ ID NO: 12037 - RNA, 2319 nt, Artificial Sequence
  mRNA product Design h-2 comprising derived and/or modified sequence from HRSV(Memphis-37)__AIY60640.1__F0 (opt6)
gggagacccgugacccggaaguuguacggcuacgcgacuuucccucccacaaacccucgcgcccuuccuuuccuacuugggcccggcagaaagcuuaccauggaacugccuauucuaaaaacaaaugccauaacaacaauucuugcagcaguaacauuauguuuugcaucaucacaaaacauuacagaagaauuuuaccaauccacuugcucagccguaucaaaaggauaccuaucagccuuaagaacagguugguacaccucaguaauaaccauagaacuaucaaacauaaaagaaaacaaaugcaaugguacugaugcaaaagucaaacuaaucaaacaagaacuggacaaauacaaaaaugcaguaaccgaacuacaacuccuaaugcaauccacaccugcagccaacaacagagcaagacgcgaacuaccaagauuuaugaauuacacauuaaacaacaccaagaacaacaauguaacucucucaaaaaaaagaaaaagacgcuuucuagguuuccuccuaggcgucggaucugcaauagccucaggaauagcaguaucaaaaguucuacaccuagaaggagaaguaaacaaaauuaaaaacgcauuacuaucaaccaacaaagcaguuguaucccuuucaaauggagucucuguacuuacaucaaaaguacucgaccuaaaaaacuauauagacaaacaacuacucccaauagucaauaagcaaucaugcagcauaucaaacauagaaacaguuauagaauuucaacaaaaaaacaacagacuacucgaaauaaccagagaauuuagcgucaacgcaggcguaaccacaccgguauccacauacaugcuuacaaacucagaacuccucucacuaauaaacgacaugccaauaacuaaugaccaaaaaaaacuaaugucaaacaauguccaaauaguccgucaacaaucauacucaauaaugucaauaauaaaagaagaaguauuagcauauguaguccaacuaccauuauacggcguuauagacacaccuuguuggaaacuucacacauccccacucuguacaaccaacacaaaagaagguuccaauauaugccuaacuagaaccgacagaggaugguauugcgacaacgcaggaucuguaucauucuuuccccaagcagaaacauguaaaguacaaaguaaccgcguauucugcgacaccaugaacucauuaacccucccauccgaaguuaauuuaugcaauauagacauauuuaauccuaaauacgacugcaaaauaaugacaucaaaaacagacguuaguuccuccguaaucacaucuuugggcgcaauagucucaugcuauggaaaaacaaaaugcacagccucaaacaaaaauagaggaauaauaaaaacauucagcaacggcugugauuauguauccaacaaaggaguagacacaguauccguaggcaauacccuuuacuacguuaauaaacaagaaggaaaaucauuauacgucaaaggagaaccuaucauaaauuucuacgacccauuaguauucccuucagacgaauuugaugccucaauaucccaagucaaugaaaaaaucaaccaaucacuagccuuuauccgcaaaucagacgaauuacuacacaacguaaacguaggcaaaucaacaacuaauauaaugauaacaacaauaauaauaguaauuauaguaauauuauuacuacuaaucgccguagguuuauucuuauacuguaaagcacgaucaacaccaguuacacucucaaaagaucaacuaucaggaauaaacaacauagcauuuuccaauuaaggacuagugaagggaacacccaaauuuaauucagccuuaagcacaauuaauuaagagugaaacguaauuguacaagcaguuggucacccaccauagggcaugaucaacaccgcaaccuuuccuuuuucccccagugauucugaaaaaccccucuucccuucagcuugcuuagauguuccaaauuuaguaagcuuaaggcggccuacagaagaaaaagaaaaaaaaggccacaaaaguucccucucacuuucaguaaauaaaauaaaagcagcaacagaaauaaagaaauaaaugaaauucaaaaugaaauaaauauuguguugugcagcauuaaaaaaucaauaaaaauuaaaaaugagcaagaucuaaaaaaaaaaaaaaaaaaaaaaaaaaaaaaaaaaaaaaaaaaaaaaaaaaaaaaaaaaaaaaaaugcaucccccccccccccccccccccccccccccccaaaggcucuuuucagagccaccagaauu

SEQ ID NO: 12038 - RNA, 2319 nt, Artificial Sequence
  mRNA product Design h-2 comprising derived and/or modified sequence from HRSV(Memphis-37)__AIY60640.1__F0 (opt11)
gggagacccgugacccggaaguuguacggcuacgcgacuuucccucccacaaacccucgcgcccuuccuuuccuacuugggcccggcagaaagcuuaccauggaacuccccauccucaaaacaaacgccauaaccacuauccucgccgccgucacccucugcuucgccuccucccaaaacaucacagaggaguucuaccaauccacaugcuccgccgucuccaaaggcuaccucagcgcccuacguaccggcugguacaccagcgucaucacaauagaacucuccaacaucaaggaaaacaaaugcaacggcaccgaugccaaaguaaaacucaucaaacaagaacucgauaaauacaaaaacgccgucaccgaacuacaacuccuaaugcaaagcacacccgccgccaacaacagagcacggcgcgaacugccccgcuucaugaacuacacccucaacaacaccaaaaauaacaacgucacccuauccaagaaacgcaaacgccgauuccucgguuuccuacucggcguaggaagcgccauagccucaggcaucgccgucuccaaaguccuccaucuggaaggcgaagucaacaaaaucaaaaacgcacucuuauccaccaacaaagccgucgucucccucucgaacggggucuccguccuuaccuccaaaguccucgaccuuaaaaacuacaucgacaaacaacuacuaccaauagucaauaaacaauccugcuccaucucaaacauagaaaccgucauagaguuccaacagaagaacaaucgccuccucgaaauaacucgcgaguucuccgucaacgcaggcgucacgaccccugucucaacauacaugcuaacuaacucagaacuccuaagccuaaucaacgacaugcccaucacaaacgaccaaaagaaacucaugagcaacaauguccagauagucagacagcaauccuauagcaucaugucuauaauaaaagaagaagugcucgccuacguaguccaacucccucuuuacggcgucauagacacacccugcuggaaacuccacacaucuccucucugcaccaccaacacaaaagaaggcagcaacaucugccugacccgaaccgaccgcggaugguacugcgacaacgcuggcuccgugucuuucuuuccccaagccgaaaccugcaaaguccaguccaaccgcgucuucugcgacacaaugaacucccucacccuacccuccgaaguuaaccucugcaacaucgacaucuucaauccaaaauacgacugcaaaaucaugaccucgaaaacggacguauccuccuccgucauaacaucacuuggagccaucguuagcugcuacggaaaaaccaaauguaccgccuccaacaaaaaccgcggaauaaucaaaacauucuccaacggcugcgacuacguaagcaacaaaggggucgauacugucuccguagguaacacccuauacuacgucaacaaacaagaaggaaaaucacuauacguuaaaggcgaacccauuaucaacuucuacgacccccucguuuucccauccgacgaguucgacgccuccauaagccaaguuaacgaaaagauaaaccaaucgcucgcauucauccgcaaauccgacgaacuccuacacaacgucaacgugggcaaauccacaacaaacaucaugaucaccaccaucauuaucgucauaauagucauccuccuccugcucaucgccgugggacuauuccuauacugcaaagcccgcucgacgcccgucacacuuuccaaagaccaacuaagcggaaucaacaacauagcguucagcaauuaaggacuagugaagggaacacccaaauuuaauucagccuuaagcacaauuaauuaagagugaaacguaauuguacaagcaguuggucacccaccauagggcaugaucaacaccgcaaccuuuccuuuuucccccagugauucugaaaaaccccucuucccuucagcuugcuuagauguuccaaauuuaguaagcuuaaggcggccuacagaagaaaaagaaaaaaaaggccacaaaaguucccucucacuuucaguaaauaaaauaaaagcagcaacagaaauaaagaaauaaaugaaauucaaaaugaaauaaauauuguguugugcagcauuaaaaaaucaauaaaaauuaaaaaugagcaagaucuaaaaaaaaaaaaaaaaaaaaaaaaaaaaaaaaaaaaaaaaaaaaaaaaaaaaaaaaaaaaaaaaugcaucccccccccccccccccccccccccccccccaaaggcucuuuucagagccaccagaauu

SEQ ID NO: 12039 - RNA, 2099 nt, Artificial Sequence
  mRNA product Design h-3 comprising derived and/or modified sequence from HRSV(Memphis-37)__AIY60640.1__F0 (wt)
gggagacccgugacccggaaguuguacggcuacgcgacuuucccucccacaaacccucgcgcccuuccuuuccuacuugggcccggcagaaagcuuaccauggaguugccaauccucaaaacaaaugcaauuaccacaauccuugcugcagucacacucuguuucgcuuccagucaaaacaucacugaagaauuuuaucaaucaacaugcagugcaguuagcaaaggcuaucuuagugcuuuaagaacugguugguauacuaguguuauaacuauagaauuaaguaauaucaaggaaaauaaguguaauggaacagaugcuaagguaaaauugauaaaacaagaauuagauaaauauaaaaaugcuguaacagaauugcaguugcucaugcaaagcacaccagcagccaacaaucgagccagaagagaacuaccaagguuuaugaauuauacacucaacaauaccaaaaauaacaauguaacauuaagcaagaaaaggaaaagaagauuucuuggcuuuuuguuagguguuggaucugcaaucgccaguggcauugcuguaucuaaaguccugcaccuagaaggggaagugaacaaaaucaaaaaugcucuacuauccacaaacaaggcuguagucagcuuaucaaauggaguuagugucuuaaccagcaaaguguuagaccucaaaaacuauauagauaaacaguuguuacccauugugaacaagcaaagcugcagcauaucaaacauugaaacugugauagaauuccaacaaaagaacaacagacuacuagagauuaccagggaauuuaguguuaaugcagguguaacuacaccuguaagcacuuauauguuaacaaauagugaauuauuaucauuaaucaaugauaugccuauaacaaaugaucagaaaaaguuaauguccaacaauguucaaauaguuagacagcaaaguuacucuaucauguccauaauaaaggaggaagucuuagcauauguaguucaauuaccacuauaugguguaauagauacaccuuguuggaaacuacacacauccccucuaugcacaaccaacacaaaggaaggguccaacaucuguuuaacaagaaccgacagaggaugguacugugacaaugcaggaucagugucuuucuucccacaagcugaaacaugcaaaguucaaucgaaucgaguauuuugugacacaaugaacagucuaacauuaccaagugaaguaaaucucugcaacauugacauauucaacccuaaauaugauugcaaaauuaugacuucaaaaacagaugugagcagcuccguuaucacaucucuaggagccauugugucaugcuauggcaaaacuaaauguacagcauccaauaaaaaucguggaaucauaaagacauuuucuaacgggugugauuauguaucaaauaaggggguggacacuguaucuguagguaauacauuauauuauguaaauaagcaagaaggaaaaagccucuauguaaaaggugaaccaauaauaaauuucuaugacccauuaguguucccuucugaugaauuugaugcaucaauaucucaagucaaugagaagauuaaccagagccuagcauuuauucguaaauccgaugaauuauuacauaauguaaauguugguaaauccaccacaaauaucaugauaacuacuauaauuauagugauuauaguaauauuguuauuauuaauugcaguugggcuguuccuauacugcaaggccagaagcacaccagucacacuaagcaaggaucaacugagugguauaaauaauauugcauuuaguaacugaggacuaguggaagcauuuuccuggcugauuaaaagaaauuacucagcuauggucaucuguuccuguuagaaggcuaugcagcauauuauauacuaugcgcauguuaugaaaugcauaauaaaaaauuuuaaaaaaucuaaaagaucuaaaaaaaaaaaaaaaaaaaaaaaaaaaaaaaaaaaaaaaaaaaaaaaaaaaaaaaaaaaaaaaaugcaucccccccccccccccccccccccccccccccaaaggcucuuuucagagccaccagaauu

SEQ ID NO: 12040 - RNA, 2099 nt, Artificial Sequence
  mRNA product Design h-3 comprising derived and/or modified sequence from HRSV(Memphis-37)__AIY60640.1__F0 (opt1)
gggagacccgugacccggaaguuguacggcuacgcgacuuucccucccacaaacccucgcgcccuuccuuuccuacuugggcccggcagaaagcuuaccauggagcugcccauccucaagaccaacgccaucaccacgauccuggccgcggugacccugugcuucgccagcucccagaacaucaccgaggaguucuaccagagcacgugcuccgccgucagcaagggcuaccucuccgcccugcgcaccgggugguacaccagcgugaucaccaucgagcuguccaacaucaaggagaacaagugcaacggcaccgacgccaaggugaagcucaucaagcaggagcuggacaaguacaagaacgcggucacggagcugcagcuccugaugcagagcaccccggccgccaacaaccgggcccgccgggagcugccccgcuucaugaacuacacccucaacaacaccaagaacaacaacgugacgcuguccaagaagcggaagcgccgguuccugggguuccuccugggcguggggagcgcgaucgccuccggcaucgccgucagcaaggugcugcaccucgagggcgaggugaacaagaucaagaacgcccugcuguccaccaacaaggccgucgugagccucuccaacggggugagcguccugaccuccaaggugcuggaccucaagaacuacaucgacaagcagcugcugcccaucgugaacaagcagagcugcuccaucagcaacaucgagaccgucaucgaguuccagcagaagaacaaccgccuccuggagaucacgcgggaguucagcgugaacgcgggcgugaccacccccgucuccaccuacaugcugacgaacagcgagcuccugucccugaucaacgacaugccgaucaccaacgaccagaagaagcucaugagcaacaacgugcagaucgugcgccagcaguccuacagcaucauguccaucaucaaggaggagguccuggccuacguggugcagcugccccucuacggggucaucgacacccccugcuggaagcugcacaccagcccccugugcacgaccaacaccaaggagggcuccaacaucugccucacccggacggaccgcgggugguacugcgacaacgccggcagcguguccuucuucccgcaggccgagaccugcaagguccagagcaaccggguguucugcgacaccaugaacucccugacccugcccagcgaggugaaccucugcaacaucgacaucuucaaccccaaguacgacugcaagaucaugacguccaagaccgacgucagcuccagcgugaucaccucccugggcgccaucgugagcugcuacgggaagaccaagugcacggcgagcaacaagaaccgcggcaucaucaagaccuucuccaacgggugcgacuacgucagcaacaagggcguggacaccguguccgucggcaacacccuguacuacgugaacaagcaggagggcaagagccucuacgugaagggggagcccaucaucaacuucuacgacccgcuggucuuccccuccgacgaguucgacgccagcaucucccaggugaacgagaagaucaaccagagccuggccuucauccggaaguccgacgagcuccugcacaacgugaacgucggcaagagcaccacgaacaucaugaucaccaccaucaucaucgugaucaucgugauccugcugcuccugaucgccgucgggcuguuccucuacugcaaggcccgcuccacccccgugacgcugagcaaggaccagcuguccgggaucaacaacaucgcguucagcaacugaggacuaguggaagcauuuuccuggcugauuaaaagaaauuacucagcuauggucaucuguuccuguuagaaggcuaugcagcauauuauauacuaugcgcauguuaugaaaugcauaauaaaaaauuuuaaaaaaucuaaaagaucuaaaaaaaaaaaaaaaaaaaaaaaaaaaaaaaaaaaaaaaaaaaaaaaaaaaaaaaaaaaaaaaaugcaucccccccccccccccccccccccccccccccaaaggcucuuuucagagccaccagaauu

SEQ ID NO: 12041 - RNA, 2099 nt, Artificial Sequence
  mRNA product Design h-3 comprising derived and/or modified sequence from HRSV(Memphis-37)__AIY60640.1__F0 (opt2)
gggagacccgugacccggaaguuguacggcuacgcgacuuucccucccacaaacccucgcgcccuuccuuuccuacuugggcccggcagaaagcuuaccauggagcuccccauccucaagaccaacgccaucaccaccauccucgccgccgucacccucugcuucgccuccucccagaacaucaccgaggaguucuaccaguccaccugcuccgccgucuccaagggcuaccucuccgcccuccgcaccggcugguacaccuccgucaucaccaucgagcucuccaacaucaaggagaacaagugcaacggcaccgacgccaaggucaagcucaucaagcaggagcucgacaaguacaagaacgccgucaccgagcuccagcuccucaugcaguccacccccgccgccaacaaccgcgcccgccgcgagcucccccgcuucaugaacuacacccucaacaacaccaagaacaacaacgucacccucuccaagaagcgcaagcgccgcuuccucggcuuccuccucggcgucggcuccgccaucgccuccggcaucgccgucuccaagguccuccaccucgagggcgaggucaacaagaucaagaacgcccuccucuccaccaacaaggccgucgucucccucuccaacggcgucuccguccucaccuccaagguccucgaccucaagaacuacaucgacaagcagcuccuccccaucgucaacaagcaguccugcuccaucuccaacaucgagaccgucaucgaguuccagcagaagaacaaccgccuccucgagaucacccgcgaguucuccgucaacgccggcgucaccacccccgucuccaccuacaugcucaccaacuccgagcuccucucccucaucaacgacaugcccaucaccaacgaccagaagaagcucauguccaacaacguccagaucguccgccagcaguccuacuccaucauguccaucaucaaggaggagguccucgccuacgucguccagcucccccucuacggcgucaucgacacccccugcuggaagcuccacaccuccccccucugcaccaccaacaccaaggagggcuccaacaucugccucacccgcaccgaccgcggcugguacugcgacaacgccggcuccgucuccuucuucccccaggccgagaccugcaagguccaguccaaccgcgucuucugcgacaccaugaacucccucacccuccccuccgaggucaaccucugcaacaucgacaucuucaaccccaaguacgacugcaagaucaugaccuccaagaccgacgucuccuccuccgucaucaccucccucggcgccaucgucuccugcuacggcaagaccaagugcaccgccuccaacaagaaccgcggcaucaucaagaccuucuccaacggcugcgacuacgucuccaacaagggcgucgacaccgucuccgucggcaacacccucuacuacgucaacaagcaggagggcaagucccucuacgucaagggcgagcccaucaucaacuucuacgacccccucgucuuccccuccgacgaguucgacgccuccaucucccaggucaacgagaagaucaaccagucccucgccuucauccgcaaguccgacgagcuccuccacaacgucaacgucggcaaguccaccaccaacaucaugaucaccaccaucaucaucgucaucaucgucauccuccuccuccucaucgccgucggccucuuccucuacugcaaggcccgcuccacccccgucacccucuccaaggaccagcucuccggcaucaacaacaucgccuucuccaacugaggacuaguggaagcauuuuccuggcugauuaaaagaaauuacucagcuauggucaucuguuccuguuagaaggcuaugcagcauauuauauacuaugcgcauguuaugaaaugcauaauaaaaaauuuuaaaaaaucuaaaagaucuaaaaaaaaaaaaaaaaaaaaaaaaaaaaaaaaaaaaaaaaaaaaaaaaaaaaaaaaaaaaaaaaugcaucccccccccccccccccccccccccccccccaaaggcucuuuucagagccaccagaauu

SEQ ID NO: 12042 - RNA, 2099 nt, Artificial Sequence
  mRNA product Design h-3 comprising derived and/or modified sequence from HRSV(Memphis-37)__AIY60640.1__F0 (opt3)
gggagacccgugacccggaaguuguacggcuacgcgacuuucccucccacaaacccucgcgcccuuccuuuccuacuugggcccggcagaaagcuuaccauggagcugcccauccucaagaccaacgccauuacaacuauacuugcugcagugacgcugugcuucgccagcucccagaauaucaccgaagaguuuuaccaaucuacauguucagcggucaguaaaggcuauuugagcgcuuuaagaacugggugguacaccuccguuauuacaaucgaacugucuaacauuaaggagaauaaaugcaacggaaccgacgccaaggugaaacuaaucaagcaggaacucgauaaguauaaaaaugcaguaacugagcugcagcuucugaugcagucgaccccugccgcuaacaauagggcacggcgcgaguugccacgauucaugaacuacacacucaauaacacgaagaauaacaaugugacucugagcaaaaagcguaaaagaagguuucuggguuuccucuuaggcgucgggucagccauagcuaguggaaucgccguguccaagguucugcaccuugaaggcgaggugaacaagauuaaaaaugcguugcugucuaccaacaaggcagucgugagccuauccaacgguguaucaguucucacaaguaaagugcuggaccuuaagaauuauaucgauaaacaacuguugccgauugucaacaagcagagcuguucuaucuccaauauagaaacugugauugaguuucagcagaaaaacaaucggcuccuggagaucacccgcgaguucucagugaacgccggggucacaacccccguuagcacguacauguuaacuaauagugaacugcucucucuuauuaacgacaugccuaucacaaaugaucaaaagaagcugauguccaacaaugugcagaucguaagacagcagagcuauucgauuaugucuauaaucaaagaagagguguuggcuuacgucgugcaacuaccacuguacggaguuauugacacccccugcuggaagcuccauacuuccccucuguguacaaccaacacgaaagaaggcucaaauaucugccuuaccaggacagaucggggcugguauugugacaacgccgggagugugagcuuuuucccacaggcagagacuugcaagguccaguccaaucgcguguuuugugauaccaugaacucucugacauugcccagcgagguaaaccucugcaauauagacauuuucaacccuaaauacgauuguaagaucaugacuucaaagaccgacguuaguuccagcgugaucacaucucugggagcuauugucucaugcuaugguaaaaccaagugcacugccaguaauaaaaaccgaggcaucauuaagacguuuagcaaugggugugauuacguguccaacaaaggagucgacacagugucuguuggcaauaccuuauauuacgugaacaagcaagaagguaagucgcuguauguaaaaggggagccaauaaucaauuucuacgacccgcuagucuuucccagcgaugaguucgacgcguccauuucacaggugaacgaaaagaucaaucagagucucgccuucaucagaaaaucugaugaacugcuucacaacguuaaugugggaaagagcacuaccaacauuaugauaacaaccaucauuaucgucauuaucgugauauugcugcuccugaucgcaguaggccuuuuucuguacugcaaagcuagguccacuccugugacauugucaaaggaccagcucagcggcauuaauaacaucgccuucucuaacugaggacuaguggaagcauuuuccuggcugauuaaaagaaauuacucagcuauggucaucuguuccuguuagaaggcuaugcagcauauuauauacuaugcgcauguuaugaaaugcauaauaaaaaauuuuaaaaaaucuaaaagaucuaaaaaaaaaaaaaaaaaaaaaaaaaaaaaaaaaaaaaaaaaaaaaaaaaaaaaaaaaaaaaaaaugcaucccccccccccccccccccccccccccccccaaaggcucuuuucagagccaccagaauu

SEQ ID NO: 12043 - RNA, 2099 nt, Artificial Sequence
  mRNA product Design h-3 comprising derived and/or modified sequence from HRSV(Memphis-37)__AIY60640.1__F0 (opt4)
gggagacccgugacccggaaguuguacggcuacgcgacuuucccucccacaaacccucgcgcccuuccuuuccuacuugggcccggcagaaagcuuaccauggagcugcccauccugaagaccaacgccaucaccaccauccuggccgccgugacccugugcuucgccagcagccagaacaucaccgaggaguucuaccagagcaccugcagcgccgugagcaagggcuaccugagcgcccugagaaccggcugguacaccagcgugaucaccaucgagcugagcaacaucaaggagaacaagugcaacggcaccgacgccaaggugaagcugaucaagcaggagcuggacaaguacaagaacgccgugaccgagcugcagcugcugaugcagagcacccccgccgccaacaacagagccagaagagagcugcccagauucaugaacuacacccugaacaacaccaagaacaacaacgugacccugagcaagaagagaaagagaagauuccugggcuuccugcugggcgugggcagcgccaucgccagcggcaucgccgugagcaaggugcugcaccuggagggcgaggugaacaagaucaagaacgcccugcugagcaccaacaaggccguggugagccugagcaacggcgugagcgugcugaccagcaaggugcuggaccugaagaacuacaucgacaagcagcugcugcccaucgugaacaagcagagcugcagcaucagcaacaucgagaccgugaucgaguuccagcagaagaacaacagacugcuggagaucaccagagaguucagcgugaacgccggcgugaccacccccgugagcaccuacaugcugaccaacagcgagcugcugagccugaucaacgacaugcccaucaccaacgaccagaagaagcugaugagcaacaacgugcagaucgugagacagcagagcuacagcaucaugagcaucaucaaggaggaggugcuggccuacguggugcagcugccccuguacggcgugaucgacacccccugcuggaagcugcacaccagcccccugugcaccaccaacaccaaggagggcagcaacaucugccugaccagaaccgacagaggcugguacugcgacaacgccggcagcgugagcuucuucccccaggccgagaccugcaaggugcagagcaacagaguguucugcgacaccaugaacagccugacccugcccagcgaggugaaccugugcaacaucgacaucuucaaccccaaguacgacugcaagaucaugaccagcaagaccgacgugagcagcagcgugaucaccagccugggcgccaucgugagcugcuacggcaagaccaagugcaccgccagcaacaagaacagaggcaucaucaagaccuucagcaacggcugcgacuacgugagcaacaagggcguggacaccgugagcgugggcaacacccuguacuacgugaacaagcaggagggcaagagccuguacgugaagggcgagcccaucaucaacuucuacgacccccugguguuccccagcgacgaguucgacgccagcaucagccaggugaacgagaagaucaaccagagccuggccuucaucagaaagagcgacgagcugcugcacaacgugaacgugggcaagagcaccaccaacaucaugaucaccaccaucaucaucgugaucaucgugauccugcugcugcugaucgccgugggccuguuccuguacugcaaggccagaagcacccccgugacccugagcaaggaccagcugagcggcaucaacaacaucgccuucagcaacugaggacuaguggaagcauuuuccuggcugauuaaaagaaauuacucagcuauggucaucuguuccuguuagaaggcuaugcagcauauuauauacuaugcgcauguuaugaaaugcauaauaaaaaauuuuaaaaaaucuaaaagaucuaaaaaaaaaaaaaaaaaaaaaaaaaaaaaaaaaaaaaaaaaaaaaaaaaaaaaaaaaaaaaaaaugcaucccccccccccccccccccccccccccccccaaaggcucuuuucagagccaccagaauu

SEQ ID NO: 12044 - RNA, 2099 nt, Artificial Sequence
  mRNA product Design h-3 comprising derived and/or modified sequence from HRSV(Memphis-37)__AIY60640.1__F0 (opt5)
gggagacccgugacccggaaguuguacggcuacgcgacuuucccucccacaaacccucgcgcccuuccuuuccuacuugggcccggcagaaagcuuaccauggagcugcccauccucaagaccaacgccauuacaacgauccuggcugccgugacccuuugcuucgcgagcucccagaauauuacagaagaguuuuaccaaucuaccuguagcgcugucuccaaaggcuaucugucugcccucagaacagggugguacaccagcguuaucacaauugaacuguccaacaucaaggagaauaaaugcaacggaaccgacgccaaggugaaacuuaucaagcaggaacuggauaaguauaaaaaugcugugacggagcuccagcugcugaugcagucuaccccugccgcuaacaaucgggcccgcagagagcucccgcgguucaugaacuacacacugaauaacaccaagaauaacaaugucacacuuagcaaaaagcgcaaaagacgguuucugggcuuccuccugggggugggauccgcgauugccagcggcaucgcuguuucuaaggugcuucaccuggaaggggaggucaacaagauuaaaaaugcccuccuguccaccaacaaggcugugguuagccugucuaacggaguguccguccucacgagcaaagugcuggaccuuaagaauuauaucgauaaacaacugcuccccauugugaacaagcagucuuguuccaucagcaauauugaaacagucaucgaguuucagcagaaaaacaaucgccugcuugagaucaccagagaauuuuccguuaacgccggcgugacaaccccugugucuaccuacaugcugacaaauagcgagcuccugucccugauuaacgacaugcccaucacgaaugaucaaaagaagcucaugagcaacaauguccagauugugcggcagcagucuuauuccaucaugagcauuaucaaagaagagguucuggcguacgugguccaacuuccucuguacggcgugaucgacacccccugcuggaagcuccauacaucuccucuguguaccacaaacaccaaagaagggagcaauauuugccuuacgcgcacagauagaggaugguauugugacaacgccggcuccguuucuuucuucccgcaggcugagaccugcaaggugcagagcaaucgggucuuuugugauaccaugaacucccugacacuccccagcgaggugaaccugugcaauaucgacauuuucaacccuaaauacgauuguaagaucaugaccucuaagacagacgucuccagcucugugauuacgucccugggggccaucguuagcugcuauggaaaaaccaagugcacagcuuccaauaaaaaccgcggcaucauuaagaccuuuucuaaugggugugauuacgugagcaacaaaggagucgacacaguguccguuggcaauacccucuauuacgugaacaagcaagaaggcaagucucuguaugucaaaggggagcccaucauuaauuucuacgacccucuuguguuucccagcgaugaguucgacgccuccaucagccaggugaacgaaaagauuaaucagucucuggccuucaucagaaaauccgaugaacuccugcacaacguuaaugucggaaagagcacgaccaacauuaugaucacaaccaucauuaucgugauuaucgugauucugcuucuccugaucgcugucggccuguuucucuacugcaaagcgcggucuacaccggugacccuguccaaggaccagcuuagcgggaucaauaacauugccuucucuaacugaggacuaguggaagcauuuuccuggcugauuaaaagaaauuacucagcuauggucaucuguuccuguuagaaggcuaugcagcauauuauauacuaugcgcauguuaugaaaugcauaauaaaaaauuuuaaaaaaucuaaaagaucuaaaaaaaaaaaaaaaaaaaaaaaaaaaaaaaaaaaaaaaaaaaaaaaaaaaaaaaaaaaaaaaaugcaucccccccccccccccccccccccccccccccaaaggcucuuuucagagccaccagaauu

SEQ ID NO: 12045 - RNA, 2099 nt, Artificial Sequence
  mRNA product Design h-3 comprising derived and/or modified sequence from HRSV(Memphis-37)__AIY60640.1__F0 (opt6)
gggagacccgugacccggaaguuguacggcuacgcgacuuucccucccacaaacccucgcgcccuuccuuuccuacuugggcccggcagaaagcuuaccauggaacugccuauucuaaaaacaaaugccauaacaacaauucuugcagcaguaacauuauguuuugcaucaucacaaaacauuacagaagaauuuuaccaauccacuugcucagccguaucaaaaggauaccuaucagccuuaagaacagguugguacaccucaguaauaaccauagaacuaucaaacauaaaagaaaacaaaugcaaugguacugaugcaaaagucaaacuaaucaaacaagaacuggacaaauacaaaaaugcaguaaccgaacuacaacuccuaaugcaauccacaccugcagccaacaacagagcaagacgcgaacuaccaagauuuaugaauuacacauuaaacaacaccaagaacaacaauguaacucucucaaaaaaaagaaaaagacgcuuucuagguuuccuccuaggcgucggaucugcaauagccucaggaauagcaguaucaaaaguucuacaccuagaaggagaaguaaacaaaauuaaaaacgcauuacuaucaaccaacaaagcaguuguaucccuuucaaauggagucucuguacuuacaucaaaaguacucgaccuaaaaaacuauauagacaaacaacuacucccaauagucaauaagcaaucaugcagcauaucaaacauagaaacaguuauagaauuucaacaaaaaaacaacagacuacucgaaauaaccagagaauuuagcgucaacgcaggcguaaccacaccgguauccacauacaugcuuacaaacucagaacuccucucacuaauaaacgacaugccaauaacuaaugaccaaaaaaaacuaaugucaaacaauguccaaauaguccgucaacaaucauacucaauaaugucaauaauaaaagaagaaguauuagcauauguaguccaacuaccauuauacggcguuauagacacaccuuguuggaaacuucacacauccccacucuguacaaccaacacaaaagaagguuccaauauaugccuaacuagaaccgacagaggaugguauugcgacaacgcaggaucuguaucauucuuuccccaagcagaaacauguaaaguacaaaguaaccgcguauucugcgacaccaugaacucauuaacccucccauccgaaguuaauuuaugcaauauagacauauuuaauccuaaauacgacugcaaaauaaugacaucaaaaacagacguuaguuccuccguaaucacaucuuugggcgcaauagucucaugcuauggaaaaacaaaaugcacagccucaaacaaaaauagaggaauaauaaaaacauucagcaacggcugugauuauguauccaacaaaggaguagacacaguauccguaggcaauacccuuuacuacguuaauaaacaagaaggaaaaucauuauacgucaaaggagaaccuaucauaaauuucuacgacccauuaguauucccuucagacgaauuugaugccucaauaucccaagucaaugaaaaaaucaaccaaucacuagccuuuauccgcaaaucagacgaauuacuacacaacguaaacguaggcaaaucaacaacuaauauaaugauaacaacaauaauaauaguaauuauaguaauauuauuacuacuaaucgccguagguuuauucuuauacuguaaagcacgaucaacaccaguuacacucucaaaagaucaacuaucaggaauaaacaacauagcauuuuccaauuaaggacuaguggaagcauuuuccuggcugauuaaaagaaauuacucagcuauggucaucuguuccuguuagaaggcuaugcagcauauuauauacuaugcgcauguuaugaaaugcauaauaaaaaauuuuaaaaaaucuaaaagaucuaaaaaaaaaaaaaaaaaaaaaaaaaaaaaaaaaaaaaaaaaaaaaaaaaaaaaaaaaaaaaaaaugcaucccccccccccccccccccccccccccccccaaaggcucuuuucagagccaccagaauu

SEQ ID NO: 12046 - RNA, 2099 nt, Artificial Sequence
  mRNA product Design h-3 comprising derived and/or modified sequence from HRSV(Memphis-37)__AIY60640.1__F0 (opt11)
gggagacccgugacccggaaguuguacggcuacgcgacuuucccucccacaaacccucgcgcccuuccuuuccuacuugggcccggcagaaagcuuaccauggaacuccccauccucaaaacaaacgccauaaccacuauccucgccgccgucacccucugcuucgccuccucccaaaacaucacagaggaguucuaccaauccacaugcuccgccgucuccaaaggcuaccucagcgcccuacguaccggcugguacaccagcgucaucacaauagaacucuccaacaucaaggaaaacaaaugcaacggcaccgaugccaaaguaaaacucaucaaacaagaacucgauaaauacaaaaacgccgucaccgaacuacaacuccuaaugcaaagcacacccgccgccaacaacagagcacggcgcgaacugccccgcuucaugaacuacacccucaacaacaccaaaaauaacaacgucacccuauccaagaaacgcaaacgccgauuccucgguuuccuacucggcguaggaagcgccauagccucaggcaucgccgucuccaaaguccuccaucuggaaggcgaagucaacaaaaucaaaaacgcacucuuauccaccaacaaagccgucgucucccucucgaacggggucuccguccuuaccuccaaaguccucgaccuuaaaaacuacaucgacaaacaacuacuaccaauagucaauaaacaauccugcuccaucucaaacauagaaaccgucauagaguuccaacagaagaacaaucgccuccucgaaauaacucgcgaguucuccgucaacgcaggcgucacgaccccugucucaacauacaugcuaacuaacucagaacuccuaagccuaaucaacgacaugcccaucacaaacgaccaaaagaaacucaugagcaacaauguccagauagucagacagcaauccuauagcaucaugucuauaauaaaagaagaagugcucgccuacguaguccaacucccucuuuacggcgucauagacacacccugcuggaaacuccacacaucuccucucugcaccaccaacacaaaagaaggcagcaacaucugccugacccgaaccgaccgcggaugguacugcgacaacgcuggcuccgugucuuucuuuccccaagccgaaaccugcaaaguccaguccaaccgcgucuucugcgacacaaugaacucccucacccuacccuccgaaguuaaccucugcaacaucgacaucuucaauccaaaauacgacugcaaaaucaugaccucgaaaacggacguauccuccuccgucauaacaucacuuggagccaucguuagcugcuacggaaaaaccaaauguaccgccuccaacaaaaaccgcggaauaaucaaaacauucuccaacggcugcgacuacguaagcaacaaaggggucgauacugucuccguagguaacacccuauacuacgucaacaaacaagaaggaaaaucacuauacguuaaaggcgaacccauuaucaacuucuacgacccccucguuuucccauccgacgaguucgacgccuccauaagccaaguuaacgaaaagauaaaccaaucgcucgcauucauccgcaaauccgacgaacuccuacacaacgucaacgugggcaaauccacaacaaacaucaugaucaccaccaucauuaucgucauaauagucauccuccuccugcucaucgccgugggacuauuccuauacugcaaagcccgcucgacgcccgucacacuuuccaaagaccaacuaagcggaaucaacaacauagcguucagcaauuaaggacuaguggaagcauuuuccuggcugauuaaaagaaauuacucagcuauggucaucuguuccuguuagaaggcuaugcagcauauuauauacuaugcgcauguuaugaaaugcauaauaaaaaauuuuaaaaaaucuaaaagaucuaaaaaaaaaaaaaaaaaaaaaaaaaaaaaaaaaaaaaaaaaaaaaaaaaaaaaaaaaaaaaaaaugcaucccccccccccccccccccccccccccccccaaaggcucuuuucagagccaccagaauu

SEQ ID NO: 12047 - RNA, 2162 nt, Artificial Sequence
  mRNA product Design h-4 comprising derived and/or modified sequence from HRSV(Memphis-37)__AIY60640.1__F0 (wt)
gggagagggcgcuuggcuugcaaggacccugagcugcggcauugaagcacacccaacccaacucgacugaagucagccucacugaaccggaucugagaaucuucucucucugggcuugccagggcucuccgaaccuagcuagcauccucuucaauuccaacuagaaagcuuaccauggaguugccaauccucaaaacaaaugcaauuaccacaauccuugcugcagucacacucuguuucgcuuccagucaaaacaucacugaagaauuuuaucaaucaacaugcagugcaguuagcaaaggcuaucuuagugcuuuaagaacugguugguauacuaguguuauaacuauagaauuaaguaauaucaaggaaaauaaguguaauggaacagaugcuaagguaaaauugauaaaacaagaauuagauaaauauaaaaaugcuguaacagaauugcaguugcucaugcaaagcacaccagcagccaacaaucgagccagaagagaacuaccaagguuuaugaauuauacacucaacaauaccaaaaauaacaauguaacauuaagcaagaaaaggaaaagaagauuucuuggcuuuuuguuagguguuggaucugcaaucgccaguggcauugcuguaucuaaaguccugcaccuagaaggggaagugaacaaaaucaaaaaugcucuacuauccacaaacaaggcuguagucagcuuaucaaauggaguuagugucuuaaccagcaaaguguuagaccucaaaaacuauauagauaaacaguuguuacccauugugaacaagcaaagcugcagcauaucaaacauugaaacugugauagaauuccaacaaaagaacaacagacuacuagagauuaccagggaauuuaguguuaaugcagguguaacuacaccuguaagcacuuauauguuaacaaauagugaauuauuaucauuaaucaaugauaugccuauaacaaaugaucagaaaaaguuaauguccaacaauguucaaauaguuagacagcaaaguuacucuaucauguccauaauaaaggaggaagucuuagcauauguaguucaauuaccacuauaugguguaauagauacaccuuguuggaaacuacacacauccccucuaugcacaaccaacacaaaggaaggguccaacaucuguuuaacaagaaccgacagaggaugguacugugacaaugcaggaucagugucuuucuucccacaagcugaaacaugcaaaguucaaucgaaucgaguauuuugugacacaaugaacagucuaacauuaccaagugaaguaaaucucugcaacauugacauauucaacccuaaauaugauugcaaaauuaugacuucaaaaacagaugugagcagcuccguuaucacaucucuaggagccauugugucaugcuauggcaaaacuaaauguacagcauccaauaaaaaucguggaaucauaaagacauuuucuaacgggugugauuauguaucaaauaaggggguggacacuguaucuguagguaauacauuauauuauguaaauaagcaagaaggaaaaagccucuauguaaaaggugaaccaauaauaaauuucuaugacccauuaguguucccuucugaugaauuugaugcaucaauaucucaagucaaugagaagauuaaccagagccuagcauuuauucguaaauccgaugaauuauuacauaauguaaauguugguaaauccaccacaaauaucaugauaacuacuauaauuauagugauuauaguaauauuguuauuauuaauugcaguugggcuguuccuauacugcaaggccagaagcacaccagucacacuaagcaaggaucaacugagugguauaaauaauauugcauuuaguaacugaggacuaguaauaaggaaacuguaugaaugucugugggcaggaagugaagagauccuucuguaaagguuuuuggaauuaugucugcugaauaauaaacuuuuuugaaauaauaaaucugguagaaaaaugagaucuaaaaaaaaaaaaaaaaaaaaaaaaaaaaaaaaaaaaaaaaaaaaaaaaaaaaaaaaaaaaaaaaugcaucccccccccccccccccccccccccccccccaaaggcucuuuucagagccaccagaauu

SEQ ID NO: 12048 - RNA, 2162 nt, Artificial Sequence
  mRNA product Design h-4 comprising derived and/or modified sequence from HRSV(Memphis-37)__AIY60640.1__F0 (opt1)
gggagagggcgcuuggcuugcaaggacccugagcugcggcauugaagcacacccaacccaacucgacugaagucagccucacugaaccggaucugagaaucuucucucucugggcuugccagggcucuccgaaccuagcuagcauccucuucaauuccaacuagaaagcuuaccauggagcugcccauccucaagaccaacgccaucaccacgauccuggccgcggugacccugugcuucgccagcucccagaacaucaccgaggaguucuaccagagcacgugcuccgccgucagcaagggcuaccucuccgcccugcgcaccgggugguacaccagcgugaucaccaucgagcuguccaacaucaaggagaacaagugcaacggcaccgacgccaaggugaagcucaucaagcaggagcuggacaaguacaagaacgcggucacggagcugcagcuccugaugcagagcaccccggccgccaacaaccgggcccgccgggagcugccccgcuucaugaacuacacccucaacaacaccaagaacaacaacgugacgcuguccaagaagcggaagcgccgguuccugggguuccuccugggcguggggagcgcgaucgccuccggcaucgccgucagcaaggugcugcaccucgagggcgaggugaacaagaucaagaacgcccugcuguccaccaacaaggccgucgugagccucuccaacggggugagcguccugaccuccaaggugcuggaccucaagaacuacaucgacaagcagcugcugcccaucgugaacaagcagagcugcuccaucagcaacaucgagaccgucaucgaguuccagcagaagaacaaccgccuccuggagaucacgcgggaguucagcgugaacgcgggcgugaccacccccgucuccaccuacaugcugacgaacagcgagcuccugucccugaucaacgacaugccgaucaccaacgaccagaagaagcucaugagcaacaacgugcagaucgugcgccagcaguccuacagcaucauguccaucaucaaggaggagguccuggccuacguggugcagcugccccucuacggggucaucgacacccccugcuggaagcugcacaccagcccccugugcacgaccaacaccaaggagggcuccaacaucugccucacccggacggaccgcgggugguacugcgacaacgccggcagcguguccuucuucccgcaggccgagaccugcaagguccagagcaaccggguguucugcgacaccaugaacucccugacccugcccagcgaggugaaccucugcaacaucgacaucuucaaccccaaguacgacugcaagaucaugacguccaagaccgacgucagcuccagcgugaucaccucccugggcgccaucgugagcugcuacgggaagaccaagugcacggcgagcaacaagaaccgcggcaucaucaagaccuucuccaacgggugcgacuacgucagcaacaagggcguggacaccguguccgucggcaacacccuguacuacgugaacaagcaggagggcaagagccucuacgugaagggggagcccaucaucaacuucuacgacccgcuggucuuccccuccgacgaguucgacgccagcaucucccaggugaacgagaagaucaaccagagccuggccuucauccggaaguccgacgagcuccugcacaacgugaacgucggcaagagcaccacgaacaucaugaucaccaccaucaucaucgugaucaucgugauccugcugcuccugaucgccgucgggcuguuccucuacugcaaggcccgcuccacccccgugacgcugagcaaggaccagcuguccgggaucaacaacaucgcguucagcaacugaggacuaguaauaaggaaacuguaugaaugucugugggcaggaagugaagagauccuucuguaaagguuuuuggaauuaugucugcugaauaauaaacuuuuuugaaauaauaaaucugguagaaaaaugagaucuaaaaaaaaaaaaaaaaaaaaaaaaaaaaaaaaaaaaaaaaaaaaaaaaaaaaaaaaaaaaaaaaugcaucccccccccccccccccccccccccccccccaaaggcucuuuucagagccaccagaauu

SEQ ID NO: 12049 - RNA, 2162 nt, Artificial Sequence
  mRNA product Design h-4 comprising derived and/or modified sequence from HRSV(Memphis-37)__AIY60640.1__F0 (opt2)
gggagagggcgcuuggcuugcaaggacccugagcugcggcauugaagcacacccaacccaacucgacugaagucagccucacugaaccggaucugagaaucuucucucucugggcuugccagggcucuccgaaccuagcuagcauccucuucaauuccaacuagaaagcuuaccauggagcuccccauccucaagaccaacgccaucaccaccauccucgccgccgucacccucugcuucgccuccucccagaacaucaccgaggaguucuaccaguccaccugcuccgccgucuccaagggcuaccucuccgcccuccgcaccggcugguacaccuccgucaucaccaucgagcucuccaacaucaaggagaacaagugcaacggcaccgacgccaaggucaagcucaucaagcaggagcucgacaaguacaagaacgccgucaccgagcuccagcuccucaugcaguccacccccgccgccaacaaccgcgcccgccgcgagcucccccgcuucaugaacuacacccucaacaacaccaagaacaacaacgucacccucuccaagaagcgcaagcgccgcuuccucggcuuccuccucggcgucggcuccgccaucgccuccggcaucgccgucuccaagguccuccaccucgagggcgaggucaacaagaucaagaacgcccuccucuccaccaacaaggccgucgucucccucuccaacggcgucuccguccucaccuccaagguccucgaccucaagaacuacaucgacaagcagcuccuccccaucgucaacaagcaguccugcuccaucuccaacaucgagaccgucaucgaguuccagcagaagaacaaccgccuccucgagaucacccgcgaguucuccgucaacgccggcgucaccacccccgucuccaccuacaugcucaccaacuccgagcuccucucccucaucaacgacaugcccaucaccaacgaccagaagaagcucauguccaacaacguccagaucguccgccagcaguccuacuccaucauguccaucaucaaggaggagguccucgccuacgucguccagcucccccucuacggcgucaucgacacccccugcuggaagcuccacaccuccccccucugcaccaccaacaccaaggagggcuccaacaucugccucacccgcaccgaccgcggcugguacugcgacaacgccggcuccgucuccuucuucccccaggccgagaccugcaagguccaguccaaccgcgucuucugcgacaccaugaacucccucacccuccccuccgaggucaaccucugcaacaucgacaucuucaaccccaaguacgacugcaagaucaugaccuccaagaccgacgucuccuccuccgucaucaccucccucggcgccaucgucuccugcuacggcaagaccaagugcaccgccuccaacaagaaccgcggcaucaucaagaccuucuccaacggcugcgacuacgucuccaacaagggcgucgacaccgucuccgucggcaacacccucuacuacgucaacaagcaggagggcaagucccucuacgucaagggcgagcccaucaucaacuucuacgacccccucgucuuccccuccgacgaguucgacgccuccaucucccaggucaacgagaagaucaaccagucccucgccuucauccgcaaguccgacgagcuccuccacaacgucaacgucggcaaguccaccaccaacaucaugaucaccaccaucaucaucgucaucaucgucauccuccuccuccucaucgccgucggccucuuccucuacugcaaggcccgcuccacccccgucacccucuccaaggaccagcucuccggcaucaacaacaucgccuucuccaacugaggacuaguaauaaggaaacuguaugaaugucugugggcaggaagugaagagauccuucuguaaagguuuuuggaauuaugucugcugaauaauaaacuuuuuugaaauaauaaaucugguagaaaaaugagaucuaaaaaaaaaaaaaaaaaaaaaaaaaaaaaaaaaaaaaaaaaaaaaaaaaaaaaaaaaaaaaaaaugcaucccccccccccccccccccccccccccccccaaaggcucuuuucagagccaccagaauu

SEQ ID NO: 12050 - RNA, 2162 nt, Artificial Sequence
  mRNA product Design h-4 comprising derived and/or modified sequence from HRSV(Memphis-37)__AIY60640.1__F0 (opt3)
gggagagggcgcuuggcuugcaaggacccugagcugcggcauugaagcacacccaacccaacucgacugaagucagccucacugaaccggaucugagaaucuucucucucugggcuugccagggcucuccgaaccuagcuagcauccucuucaauuccaacuagaaagcuuaccauggagcugcccauccucaagaccaacgccauuacaacuauacuugcugcagugacgcugugcuucgccagcucccagaauaucaccgaagaguuuuaccaaucuacauguucagcggucaguaaaggcuauuugagcgcuuuaagaacugggugguacaccuccguuauuacaaucgaacugucuaacauuaaggagaauaaaugcaacggaaccgacgccaaggugaaacuaaucaagcaggaacucgauaaguauaaaaaugcaguaacugagcugcagcuucugaugcagucgaccccugccgcuaacaauagggcacggcgcgaguugccacgauucaugaacuacacacucaauaacacgaagaauaacaaugugacucugagcaaaaagcguaaaagaagguuucuggguuuccucuuaggcgucgggucagccauagcuaguggaaucgccguguccaagguucugcaccuugaaggcgaggugaacaagauuaaaaaugcguugcugucuaccaacaaggcagucgugagccuauccaacgguguaucaguucucacaaguaaagugcuggaccuuaagaauuauaucgauaaacaacuguugccgauugucaacaagcagagcuguucuaucuccaauauagaaacugugauugaguuucagcagaaaaacaaucggcuccuggagaucacccgcgaguucucagugaacgccggggucacaacccccguuagcacguacauguuaacuaauagugaacugcucucucuuauuaacgacaugccuaucacaaaugaucaaaagaagcugauguccaacaaugugcagaucguaagacagcagagcuauucgauuaugucuauaaucaaagaagagguguuggcuuacgucgugcaacuaccacuguacggaguuauugacacccccugcuggaagcuccauacuuccccucuguguacaaccaacacgaaagaaggcucaaauaucugccuuaccaggacagaucggggcugguauugugacaacgccgggagugugagcuuuuucccacaggcagagacuugcaagguccaguccaaucgcguguuuugugauaccaugaacucucugacauugcccagcgagguaaaccucugcaauauagacauuuucaacccuaaauacgauuguaagaucaugacuucaaagaccgacguuaguuccagcgugaucacaucucugggagcuauugucucaugcuaugguaaaaccaagugcacugccaguaauaaaaaccgaggcaucauuaagacguuuagcaaugggugugauuacguguccaacaaaggagucgacacagugucuguuggcaauaccuuauauuacgugaacaagcaagaagguaagucgcuguauguaaaaggggagccaauaaucaauuucuacgacccgcuagucuuucccagcgaugaguucgacgcguccauuucacaggugaacgaaaagaucaaucagagucucgccuucaucagaaaaucugaugaacugcuucacaacguuaaugugggaaagagcacuaccaacauuaugauaacaaccaucauuaucgucauuaucgugauauugcugcuccugaucgcaguaggccuuuuucuguacugcaaagcuagguccacuccugugacauugucaaaggaccagcucagcggcauuaauaacaucgccuucucuaacugaggacuaguaauaaggaaacuguaugaaugucugugggcaggaagugaagagauccuucuguaaagguuuuuggaauuaugucugcugaauaauaaacuuuuuugaaauaauaaaucugguagaaaaaugagaucuaaaaaaaaaaaaaaaaaaaaaaaaaaaaaaaaaaaaaaaaaaaaaaaaaaaaaaaaaaaaaaaaugcaucccccccccccccccccccccccccccccccaaaggcucuuuucagagccaccagaauu

SEQ ID NO: 12051 - RNA, 2162 nt, Artificial Sequence
  mRNA product Design h-4 comprising derived and/or modified sequence from HRSV(Memphis-37)__AIY60640.1__F0 (opt4)
gggagagggcgcuuggcuugcaaggacccugagcugcggcauugaagcacacccaacccaacucgacugaagucagccucacugaaccggaucugagaaucuucucucucugggcuugccagggcucuccgaaccuagcuagcauccucuucaauuccaacuagaaagcuuaccauggagcugcccauccugaagaccaacgccaucaccaccauccuggccgccgugacccugugcuucgccagcagccagaacaucaccgaggaguucuaccagagcaccugcagcgccgugagcaagggcuaccugagcgcccugagaaccggcugguacaccagcgugaucaccaucgagcugagcaacaucaaggagaacaagugcaacggcaccgacgccaaggugaagcugaucaagcaggagcuggacaaguacaagaacgccgugaccgagcugcagcugcugaugcagagcacccccgccgccaacaacagagccagaagagagcugcccagauucaugaacuacacccugaacaacaccaagaacaacaacgugacccugagcaagaagagaaagagaagauuccugggcuuccugcugggcgugggcagcgccaucgccagcggcaucgccgugagcaaggugcugcaccuggagggcgaggugaacaagaucaagaacgcccugcugagcaccaacaaggccguggugagccugagcaacggcgugagcgugcugaccagcaaggugcuggaccugaagaacuacaucgacaagcagcugcugcccaucgugaacaagcagagcugcagcaucagcaacaucgagaccgugaucgaguuccagcagaagaacaacagacugcuggagaucaccagagaguucagcgugaacgccggcgugaccacccccgugagcaccuacaugcugaccaacagcgagcugcugagccugaucaacgacaugcccaucaccaacgaccagaagaagcugaugagcaacaacgugcagaucgugagacagcagagcuacagcaucaugagcaucaucaaggaggaggugcuggccuacguggugcagcugccccuguacggcgugaucgacacccccugcuggaagcugcacaccagcccccugugcaccaccaacaccaaggagggcagcaacaucugccugaccagaaccgacagaggcugguacugcgacaacgccggcagcgugagcuucuucccccaggccgagaccugcaaggugcagagcaacagaguguucugcgacaccaugaacagccugacccugcccagcgaggugaaccugugcaacaucgacaucuucaaccccaaguacgacugcaagaucaugaccagcaagaccgacgugagcagcagcgugaucaccagccugggcgccaucgugagcugcuacggcaagaccaagugcaccgccagcaacaagaacagaggcaucaucaagaccuucagcaacggcugcgacuacgugagcaacaagggcguggacaccgugagcgugggcaacacccuguacuacgugaacaagcaggagggcaagagccuguacgugaagggcgagcccaucaucaacuucuacgacccccugguguuccccagcgacgaguucgacgccagcaucagccaggugaacgagaagaucaaccagagccuggccuucaucagaaagagcgacgagcugcugcacaacgugaacgugggcaagagcaccaccaacaucaugaucaccaccaucaucaucgugaucaucgugauccugcugcugcugaucgccgugggccuguuccuguacugcaaggccagaagcacccccgugacccugagcaaggaccagcugagcggcaucaacaacaucgccuucagcaacugaggacuaguaauaaggaaacuguaugaaugucugugggcaggaagugaagagauccuucuguaaagguuuuuggaauuaugucugcugaauaauaaacuuuuuugaaauaauaaaucugguagaaaaaugagaucuaaaaaaaaaaaaaaaaaaaaaaaaaaaaaaaaaaaaaaaaaaaaaaaaaaaaaaaaaaaaaaaaugcaucccccccccccccccccccccccccccccccaaaggcucuuuucagagccaccagaauu

SEQ ID NO: 12052 - RNA, 2162 nt, Artificial Sequence
  mRNA product Design h-4 comprising derived and/or modified sequence from HRSV(Memphis-37)__AIY60640.1__F0 (opt5)
gggagagggcgcuuggcuugcaaggacccugagcugcggcauugaagcacacccaacccaacucgacugaagucagccucacugaaccggaucugagaaucuucucucucugggcuugccagggcucuccgaaccuagcuagcauccucuucaauuccaacuagaaagcuuaccauggagcugcccauccucaagaccaacgccauuacaacgauccuggcugccgugacccuuugcuucgcgagcucccagaauauuacagaagaguuuuaccaaucuaccuguagcgcugucuccaaaggcuaucugucugcccucagaacagggugguacaccagcguuaucacaauugaacuguccaacaucaaggagaauaaaugcaacggaaccgacgccaaggugaaacuuaucaagcaggaacuggauaaguauaaaaaugcugugacggagcuccagcugcugaugcagucuaccccugccgcuaacaaucgggcccgcagagagcucccgcgguucaugaacuacacacugaauaacaccaagaauaacaaugucacacuuagcaaaaagcgcaaaagacgguuucugggcuuccuccugggggugggauccgcgauugccagcggcaucgcuguuucuaaggugcuucaccuggaaggggaggucaacaagauuaaaaaugcccuccuguccaccaacaaggcugugguuagccugucuaacggaguguccguccucacgagcaaagugcuggaccuuaagaauuauaucgauaaacaacugcuccccauugugaacaagcagucuuguuccaucagcaauauugaaacagucaucgaguuucagcagaaaaacaaucgccugcuugagaucaccagagaauuuuccguuaacgccggcgugacaaccccugugucuaccuacaugcugacaaauagcgagcuccugucccugauuaacgacaugcccaucacgaaugaucaaaagaagcucaugagcaacaauguccagauugugcggcagcagucuuauuccaucaugagcauuaucaaagaagagguucuggcguacgugguccaacuuccucuguacggcgugaucgacacccccugcuggaagcuccauacaucuccucuguguaccacaaacaccaaagaagggagcaauauuugccuuacgcgcacagauagaggaugguauugugacaacgccggcuccguuucuuucuucccgcaggcugagaccugcaaggugcagagcaaucgggucuuuugugauaccaugaacucccugacacuccccagcgaggugaaccugugcaauaucgacauuuucaacccuaaauacgauuguaagaucaugaccucuaagacagacgucuccagcucugugauuacgucccugggggccaucguuagcugcuauggaaaaaccaagugcacagcuuccaauaaaaaccgcggcaucauuaagaccuuuucuaaugggugugauuacgugagcaacaaaggagucgacacaguguccguuggcaauacccucuauuacgugaacaagcaagaaggcaagucucuguaugucaaaggggagcccaucauuaauuucuacgacccucuuguguuucccagcgaugaguucgacgccuccaucagccaggugaacgaaaagauuaaucagucucuggccuucaucagaaaauccgaugaacuccugcacaacguuaaugucggaaagagcacgaccaacauuaugaucacaaccaucauuaucgugauuaucgugauucugcuucuccugaucgcugucggccuguuucucuacugcaaagcgcggucuacaccggugacccuguccaaggaccagcuuagcgggaucaauaacauugccuucucuaacugaggacuaguaauaaggaaacuguaugaaugucugugggcaggaagugaagagauccuucuguaaagguuuuuggaauuaugucugcugaauaauaaacuuuuuugaaauaauaaaucugguagaaaaaugagaucuaaaaaaaaaaaaaaaaaaaaaaaaaaaaaaaaaaaaaaaaaaaaaaaaaaaaaaaaaaaaaaaaugcaucccccccccccccccccccccccccccccccaaaggcucuuuucagagccaccagaauu

SEQ ID NO: 12053 - RNA, 2162 nt, Artificial Sequence
  mRNA product Design h-4 comprising derived and/or modified sequence from HRSV(Memphis-37)__AIY60640.1__F0 (opt6)
gggagagggcgcuuggcuugcaaggacccugagcugcggcauugaagcacacccaacccaacucgacugaagucagccucacugaaccggaucugagaaucuucucucucugggcuugccagggcucuccgaaccuagcuagcauccucuucaauuccaacuagaaagcuuaccauggaacugccuauucuaaaaacaaaugccauaacaacaauucuugcagcaguaacauuauguuuugcaucaucacaaaacauuacagaagaauuuuaccaauccacuugcucagccguaucaaaaggauaccuaucagccuuaagaacagguugguacaccucaguaauaaccauagaacuaucaaacauaaaagaaaacaaaugcaaugguacugaugcaaaagucaaacuaaucaaacaagaacuggacaaauacaaaaaugcaguaaccgaacuacaacuccuaaugcaauccacaccugcagccaacaacagagcaagacgcgaacuaccaagauuuaugaauuacacauuaaacaacaccaagaacaacaauguaacucucucaaaaaaaagaaaaagacgcuuucuagguuuccuccuaggcgucggaucugcaauagccucaggaauagcaguaucaaaaguucuacaccuagaaggagaaguaaacaaaauuaaaaacgcauuacuaucaaccaacaaagcaguuguaucccuuucaaauggagucucuguacuuacaucaaaaguacucgaccuaaaaaacuauauagacaaacaacuacucccaauagucaauaagcaaucaugcagcauaucaaacauagaaacaguuauagaauuucaacaaaaaaacaacagacuacucgaaauaaccagagaauuuagcgucaacgcaggcguaaccacaccgguauccacauacaugcuuacaaacucagaacuccucucacuaauaaacgacaugccaauaacuaaugaccaaaaaaaacuaaugucaaacaauguccaaauaguccgucaacaaucauacucaauaaugucaauaauaaaagaagaaguauuagcauauguaguccaacuaccauuauacggcguuauagacacaccuuguuggaaacuucacacauccccacucuguacaaccaacacaaaagaagguuccaauauaugccuaacuagaaccgacagaggaugguauugcgacaacgcaggaucuguaucauucuuuccccaagcagaaacauguaaaguacaaaguaaccgcguauucugcgacaccaugaacucauuaacccucccauccgaaguuaauuuaugcaauauagacauauuuaauccuaaauacgacugcaaaauaaugacaucaaaaacagacguuaguuccuccguaaucacaucuuugggcgcaauagucucaugcuauggaaaaacaaaaugcacagccucaaacaaaaauagaggaauaauaaaaacauucagcaacggcugugauuauguauccaacaaaggaguagacacaguauccguaggcaauacccuuuacuacguuaauaaacaagaaggaaaaucauuauacgucaaaggagaaccuaucauaaauuucuacgacccauuaguauucccuucagacgaauuugaugccucaauaucccaagucaaugaaaaaaucaaccaaucacuagccuuuauccgcaaaucagacgaauuacuacacaacguaaacguaggcaaaucaacaacuaauauaaugauaacaacaauaauaauaguaauuauaguaauauuauuacuacuaaucgccguagguuuauucuuauacuguaaagcacgaucaacaccaguuacacucucaaaagaucaacuaucaggaauaaacaacauagcauuuuccaauuaaggacuaguaauaaggaaacuguaugaaugucugugggcaggaagugaagagauccuucuguaaagguuuuuggaauuaugucugcugaauaauaaacuuuuuugaaauaauaaaucugguagaaaaaugagaucuaaaaaaaaaaaaaaaaaaaaaaaaaaaaaaaaaaaaaaaaaaaaaaaaaaaaaaaaaaaaaaaaugcaucccccccccccccccccccccccccccccccaaaggcucuuuucagagccaccagaauu

SEQ ID NO: 12054 - RNA, 2162 nt, Artificial Sequence
  mRNA product Design h-4 comprising derived and/or modified sequence from HRSV(Memphis-37)__AIY60640.1__F0 (opt11)
gggagagggcgcuuggcuugcaaggacccugagcugcggcauugaagcacacccaacccaacucgacugaagucagccucacugaaccggaucugagaaucuucucucucugggcuugccagggcucuccgaaccuagcuagcauccucuucaauuccaacuagaaagcuuaccauggaacuccccauccucaaaacaaacgccauaaccacuauccucgccgccgucacccucugcuucgccuccucccaaaacaucacagaggaguucuaccaauccacaugcuccgccgucuccaaaggcuaccucagcgcccuacguaccggcugguacaccagcgucaucacaauagaacucuccaacaucaaggaaaacaaaugcaacggcaccgaugccaaaguaaaacucaucaaacaagaacucgauaaauacaaaaacgccgucaccgaacuacaacuccuaaugcaaagcacacccgccgccaacaacagagcacggcgcgaacugccccgcuucaugaacuacacccucaacaacaccaaaaauaacaacgucacccuauccaagaaacgcaaacgccgauuccucgguuuccuacucggcguaggaagcgccauagccucaggcaucgccgucuccaaaguccuccaucuggaaggcgaagucaacaaaaucaaaaacgcacucuuauccaccaacaaagccgucgucucccucucgaacggggucuccguccuuaccuccaaaguccucgaccuuaaaaacuacaucgacaaacaacuacuaccaauagucaauaaacaauccugcuccaucucaaacauagaaaccgucauagaguuccaacagaagaacaaucgccuccucgaaauaacucgcgaguucuccgucaacgcaggcgucacgaccccugucucaacauacaugcuaacuaacucagaacuccuaagccuaaucaacgacaugcccaucacaaacgaccaaaagaaacucaugagcaacaauguccagauagucagacagcaauccuauagcaucaugucuauaauaaaagaagaagugcucgccuacguaguccaacucccucuuuacggcgucauagacacacccugcuggaaacuccacacaucuccucucugcaccaccaacacaaaagaaggcagcaacaucugccugacccgaaccgaccgcggaugguacugcgacaacgcuggcuccgugucuuucuuuccccaagccgaaaccugcaaaguccaguccaaccgcgucuucugcgacacaaugaacucccucacccuacccuccgaaguuaaccucugcaacaucgacaucuucaauccaaaauacgacugcaaaaucaugaccucgaaaacggacguauccuccuccgucauaacaucacuuggagccaucguuagcugcuacggaaaaaccaaauguaccgccuccaacaaaaaccgcggaauaaucaaaacauucuccaacggcugcgacuacguaagcaacaaaggggucgauacugucuccguagguaacacccuauacuacgucaacaaacaagaaggaaaaucacuauacguuaaaggcgaacccauuaucaacuucuacgacccccucguuuucccauccgacgaguucgacgccuccauaagccaaguuaacgaaaagauaaaccaaucgcucgcauucauccgcaaauccgacgaacuccuacacaacgucaacgugggcaaauccacaacaaacaucaugaucaccaccaucauuaucgucauaauagucauccuccuccugcucaucgccgugggacuauuccuauacugcaaagcccgcucgacgcccgucacacuuuccaaagaccaacuaagcggaaucaacaacauagcguucagcaauuaaggacuaguaauaaggaaacuguaugaaugucugugggcaggaagugaagagauccuucuguaaagguuuuuggaauuaugucugcugaauaauaaacuuuuuugaaauaauaaaucugguagaaaaaugagaucuaaaaaaaaaaaaaaaaaaaaaaaaaaaaaaaaaaaaaaaaaaaaaaaaaaaaaaaaaaaaaaaaugcaucccccccccccccccccccccccccccccccaaaggcucuuuucagagccaccagaauu

SEQ ID NO: 12055 - RNA, 2178 nt, Artificial Sequence
  mRNA product Design h-5 comprising derived and/or modified sequence from HRSV(Memphis-37)__AIY60640.1__F0 (wt)
gggagagggcgcuuggcuugcaaggacccugagcugcggcauugaagcacacccaacccaacucgacugaagucagccucacugaaccggaucugagaaucuucucucucugggcuugccagggcucuccgaaccuagcuagcauccucuucaauuccaacuagaaagcuuaccauggaguugccaauccucaaaacaaaugcaauuaccacaauccuugcugcagucacacucuguuucgcuuccagucaaaacaucacugaagaauuuuaucaaucaacaugcagugcaguuagcaaaggcuaucuuagugcuuuaagaacugguugguauacuaguguuauaacuauagaauuaaguaauaucaaggaaaauaaguguaauggaacagaugcuaagguaaaauugauaaaacaagaauuagauaaauauaaaaaugcuguaacagaauugcaguugcucaugcaaagcacaccagcagccaacaaucgagccagaagagaacuaccaagguuuaugaauuauacacucaacaauaccaaaaauaacaauguaacauuaagcaagaaaaggaaaagaagauuucuuggcuuuuuguuagguguuggaucugcaaucgccaguggcauugcuguaucuaaaguccugcaccuagaaggggaagugaacaaaaucaaaaaugcucuacuauccacaaacaaggcuguagucagcuuaucaaauggaguuagugucuuaaccagcaaaguguuagaccucaaaaacuauauagauaaacaguuguuacccauugugaacaagcaaagcugcagcauaucaaacauugaaacugugauagaauuccaacaaaagaacaacagacuacuagagauuaccagggaauuuaguguuaaugcagguguaacuacaccuguaagcacuuauauguuaacaaauagugaauuauuaucauuaaucaaugauaugccuauaacaaaugaucagaaaaaguuaauguccaacaauguucaaauaguuagacagcaaaguuacucuaucauguccauaauaaaggaggaagucuuagcauauguaguucaauuaccacuauaugguguaauagauacaccuuguuggaaacuacacacauccccucuaugcacaaccaacacaaaggaaggguccaacaucuguuuaacaagaaccgacagaggaugguacugugacaaugcaggaucagugucuuucuucccacaagcugaaacaugcaaaguucaaucgaaucgaguauuuugugacacaaugaacagucuaacauuaccaagugaaguaaaucucugcaacauugacauauucaacccuaaauaugauugcaaaauuaugacuucaaaaacagaugugagcagcuccguuaucacaucucuaggagccauugugucaugcuauggcaaaacuaaauguacagcauccaauaaaaaucguggaaucauaaagacauuuucuaacgggugugauuauguaucaaauaaggggguggacacuguaucuguagguaauacauuauauuauguaaauaagcaagaaggaaaaagccucuauguaaaaggugaaccaauaauaaauuucuaugacccauuaguguucccuucugaugaauuugaugcaucaauaucucaagucaaugagaagauuaaccagagccuagcauuuauucguaaauccgaugaauuauuacauaauguaaauguugguaaauccaccacaaauaucaugauaacuacuauaauuauagugauuauaguaauauuguuauuauuaauugcaguugggcuguuccuauacugcaaggccagaagcacaccagucacacuaagcaaggaucaacugagugguauaaauaauauugcauuuaguaacugaggacuaguacuggcugcaucucccuuuccucuguccuccauccuucucccaggauggugaagggggaccugguacccagugauccccaccccaggauccuaaaucaugacuuaccugcuaauaaaaacucauuggaaaagugagaagaucuaaaaaaaaaaaaaaaaaaaaaaaaaaaaaaaaaaaaaaaaaaaaaaaaaaaaaaaaaaaaaaaaugcaucccccccccccccccccccccccccccccccaaaggcucuuuucagagccaccagaauu

SEQ ID NO: 12056 - RNA, 2178 nt, Artificial Sequence
  mRNA product Design h-5 comprising derived and/or modified sequence from HRSV(Memphis-37)__AIY60640.1__F0 (opt1)
gggagagggcgcuuggcuugcaaggacccugagcugcggcauugaagcacacccaacccaacucgacugaagucagccucacugaaccggaucugagaaucuucucucucugggcuugccagggcucuccgaaccuagcuagcauccucuucaauuccaacuagaaagcuuaccauggagcugcccauccucaagaccaacgccaucaccacgauccuggccgcggugacccugugcuucgccagcucccagaacaucaccgaggaguucuaccagagcacgugcuccgccgucagcaagggcuaccucuccgcccugcgcaccgggugguacaccagcgugaucaccaucgagcuguccaacaucaaggagaacaagugcaacggcaccgacgccaaggugaagcucaucaagcaggagcuggacaaguacaagaacgcggucacggagcugcagcuccugaugcagagcaccccggccgccaacaaccgggcccgccgggagcugccccgcuucaugaacuacacccucaacaacaccaagaacaacaacgugacgcuguccaagaagcggaagcgccgguuccugggguuccuccugggcguggggagcgcgaucgccuccggcaucgccgucagcaaggugcugcaccucgagggcgaggugaacaagaucaagaacgcccugcuguccaccaacaaggccgucgugagccucuccaacggggugagcguccugaccuccaaggugcuggaccucaagaacuacaucgacaagcagcugcugcccaucgugaacaagcagagcugcuccaucagcaacaucgagaccgucaucgaguuccagcagaagaacaaccgccuccuggagaucacgcgggaguucagcgugaacgcgggcgugaccacccccgucuccaccuacaugcugacgaacagcgagcuccugucccugaucaacgacaugccgaucaccaacgaccagaagaagcucaugagcaacaacgugcagaucgugcgccagcaguccuacagcaucauguccaucaucaaggaggagguccuggccuacguggugcagcugccccucuacggggucaucgacacccccugcuggaagcugcacaccagcccccugugcacgaccaacaccaaggagggcuccaacaucugccucacccggacggaccgcgggugguacugcgacaacgccggcagcguguccuucuucccgcaggccgagaccugcaagguccagagcaaccggguguucugcgacaccaugaacucccugacccugcccagcgaggugaaccucugcaacaucgacaucuucaaccccaaguacgacugcaagaucaugacguccaagaccgacgucagcuccagcgugaucaccucccugggcgccaucgugagcugcuacgggaagaccaagugcacggcgagcaacaagaaccgcggcaucaucaagaccuucuccaacgggugcgacuacgucagcaacaagggcguggacaccguguccgucggcaacacccuguacuacgugaacaagcaggagggcaagagccucuacgugaagggggagcccaucaucaacuucuacgacccgcuggucuuccccuccgacgaguucgacgccagcaucucccaggugaacgagaagaucaaccagagccuggccuucauccggaaguccgacgagcuccugcacaacgugaacgucggcaagagcaccacgaacaucaugaucaccaccaucaucaucgugaucaucgugauccugcugcuccugaucgccgucgggcuguuccucuacugcaaggcccgcuccacccccgugacgcugagcaaggaccagcuguccgggaucaacaacaucgcguucagcaacugaggacuaguacuggcugcaucucccuuuccucuguccuccauccuucucccaggauggugaagggggaccugguacccagugauccccaccccaggauccuaaaucaugacuuaccugcuaauaaaaacucauuggaaaagugagaagaucuaaaaaaaaaaaaaaaaaaaaaaaaaaaaaaaaaaaaaaaaaaaaaaaaaaaaaaaaaaaaaaaaugcaucccccccccccccccccccccccccccccccaaaggcucuuuucagagccaccagaauu

SEQ ID NO: 12057 - RNA, 2178 nt, Artificial Sequence
  mRNA product Design h-5 comprising derived and/or modified sequence from HRSV(Memphis-37)__AIY60640.1__F0 (opt2)
gggagagggcgcuuggcuugcaaggacccugagcugcggcauugaagcacacccaacccaacucgacugaagucagccucacugaaccggaucugagaaucuucucucucugggcuugccagggcucuccgaaccuagcuagcauccucuucaauuccaacuagaaagcuuaccauggagcuccccauccucaagaccaacgccaucaccaccauccucgccgccgucacccucugcuucgccuccucccagaacaucaccgaggaguucuaccaguccaccugcuccgccgucuccaagggcuaccucuccgcccuccgcaccggcugguacaccuccgucaucaccaucgagcucuccaacaucaaggagaacaagugcaacggcaccgacgccaaggucaagcucaucaagcaggagcucgacaaguacaagaacgccgucaccgagcuccagcuccucaugcaguccacccccgccgccaacaaccgcgcccgccgcgagcucccccgcuucaugaacuacacccucaacaacaccaagaacaacaacgucacccucuccaagaagcgcaagcgccgcuuccucggcuuccuccucggcgucggcuccgccaucgccuccggcaucgccgucuccaagguccuccaccucgagggcgaggucaacaagaucaagaacgcccuccucuccaccaacaaggccgucgucucccucuccaacggcgucuccguccucaccuccaagguccucgaccucaagaacuacaucgacaagcagcuccuccccaucgucaacaagcaguccugcuccaucuccaacaucgagaccgucaucgaguuccagcagaagaacaaccgccuccucgagaucacccgcgaguucuccgucaacgccggcgucaccacccccgucuccaccuacaugcucaccaacuccgagcuccucucccucaucaacgacaugcccaucaccaacgaccagaagaagcucauguccaacaacguccagaucguccgccagcaguccuacuccaucauguccaucaucaaggaggagguccucgccuacgucguccagcucccccucuacggcgucaucgacacccccugcuggaagcuccacaccuccccccucugcaccaccaacaccaaggagggcuccaacaucugccucacccgcaccgaccgcggcugguacugcgacaacgccggcuccgucuccuucuucccccaggccgagaccugcaagguccaguccaaccgcgucuucugcgacaccaugaacucccucacccuccccuccgaggucaaccucugcaacaucgacaucuucaaccccaaguacgacugcaagaucaugaccuccaagaccgacgucuccuccuccgucaucaccucccucggcgccaucgucuccugcuacggcaagaccaagugcaccgccuccaacaagaaccgcggcaucaucaagaccuucuccaacggcugcgacuacgucuccaacaagggcgucgacaccgucuccgucggcaacacccucuacuacgucaacaagcaggagggcaagucccucuacgucaagggcgagcccaucaucaacuucuacgacccccucgucuuccccuccgacgaguucgacgccuccaucucccaggucaacgagaagaucaaccagucccucgccuucauccgcaaguccgacgagcuccuccacaacgucaacgucggcaaguccaccaccaacaucaugaucaccaccaucaucaucgucaucaucgucauccuccuccuccucaucgccgucggccucuuccucuacugcaaggcccgcuccacccccgucacccucuccaaggaccagcucuccggcaucaacaacaucgccuucuccaacugaggacuaguacuggcugcaucucccuuuccucuguccuccauccuucucccaggauggugaagggggaccugguacccagugauccccaccccaggauccuaaaucaugacuuaccugcuaauaaaaacucauuggaaaagugagaagaucuaaaaaaaaaaaaaaaaaaaaaaaaaaaaaaaaaaaaaaaaaaaaaaaaaaaaaaaaaaaaaaaaugcaucccccccccccccccccccccccccccccccaaaggcucuuuucagagccaccagaauu

SEQ ID NO: 12058 - RNA, 2178 nt, Artificial Sequence
  mRNA product Design h-5 comprising derived and/or modified sequence from HRSV(Memphis-37)__AIY60640.1__F0 (opt3)
gggagagggcgcuuggcuugcaaggacccugagcugcggcauugaagcacacccaacccaacucgacugaagucagccucacugaaccggaucugagaaucuucucucucugggcuugccagggcucuccgaaccuagcuagcauccucuucaauuccaacuagaaagcuuaccauggagcugcccauccucaagaccaacgccauuacaacuauacuugcugcagugacgcugugcuucgccagcucccagaauaucaccgaagaguuuuaccaaucuacauguucagcggucaguaaaggcuauuugagcgcuuuaagaacugggugguacaccuccguuauuacaaucgaacugucuaacauuaaggagaauaaaugcaacggaaccgacgccaaggugaaacuaaucaagcaggaacucgauaaguauaaaaaugcaguaacugagcugcagcuucugaugcagucgaccccugccgcuaacaauagggcacggcgcgaguugccacgauucaugaacuacacacucaauaacacgaagaauaacaaugugacucugagcaaaaagcguaaaagaagguuucuggguuuccucuuaggcgucgggucagccauagcuaguggaaucgccguguccaagguucugcaccuugaaggcgaggugaacaagauuaaaaaugcguugcugucuaccaacaaggcagucgugagccuauccaacgguguaucaguucucacaaguaaagugcuggaccuuaagaauuauaucgauaaacaacuguugccgauugucaacaagcagagcuguucuaucuccaauauagaaacugugauugaguuucagcagaaaaacaaucggcuccuggagaucacccgcgaguucucagugaacgccggggucacaacccccguuagcacguacauguuaacuaauagugaacugcucucucuuauuaacgacaugccuaucacaaaugaucaaaagaagcugauguccaacaaugugcagaucguaagacagcagagcuauucgauuaugucuauaaucaaagaagagguguuggcuuacgucgugcaacuaccacuguacggaguuauugacacccccugcuggaagcuccauacuuccccucuguguacaaccaacacgaaagaaggcucaaauaucugccuuaccaggacagaucggggcugguauugugacaacgccgggagugugagcuuuuucccacaggcagagacuugcaagguccaguccaaucgcguguuuugugauaccaugaacucucugacauugcccagcgagguaaaccucugcaauauagacauuuucaacccuaaauacgauuguaagaucaugacuucaaagaccgacguuaguuccagcgugaucacaucucugggagcuauugucucaugcuaugguaaaaccaagugcacugccaguaauaaaaaccgaggcaucauuaagacguuuagcaaugggugugauuacguguccaacaaaggagucgacacagugucuguuggcaauaccuuauauuacgugaacaagcaagaagguaagucgcuguauguaaaaggggagccaauaaucaauuucuacgacccgcuagucuuucccagcgaugaguucgacgcguccauuucacaggugaacgaaaagaucaaucagagucucgccuucaucagaaaaucugaugaacugcuucacaacguuaaugugggaaagagcacuaccaacauuaugauaacaaccaucauuaucgucauuaucgugauauugcugcuccugaucgcaguaggccuuuuucuguacugcaaagcuagguccacuccugugacauugucaaaggaccagcucagcggcauuaauaacaucgccuucucuaacugaggacuaguacuggcugcaucucccuuuccucuguccuccauccuucucccaggauggugaagggggaccugguacccagugauccccaccccaggauccuaaaucaugacuuaccugcuaauaaaaacucauuggaaaagugagaagaucuaaaaaaaaaaaaaaaaaaaaaaaaaaaaaaaaaaaaaaaaaaaaaaaaaaaaaaaaaaaaaaaaugcaucccccccccccccccccccccccccccccccaaaggcucuuuucagagccaccagaauu

SEQ ID NO: 12059 - RNA, 2178 nt, Artificial Sequence
  mRNA product Design h-5 comprising derived and/or modified sequence from HRSV(Memphis-37)__AIY60640.1__F0 (opt4)
gggagagggcgcuuggcuugcaaggacccugagcugcggcauugaagcacacccaacccaacucgacugaagucagccucacugaaccggaucugagaaucuucucucucugggcuugccagggcucuccgaaccuagcuagcauccucuucaauuccaacuagaaagcuuaccauggagcugcccauccugaagaccaacgccaucaccaccauccuggccgccgugacccugugcuucgccagcagccagaacaucaccgaggaguucuaccagagcaccugcagcgccgugagcaagggcuaccugagcgcccugagaaccggcugguacaccagcgugaucaccaucgagcugagcaacaucaaggagaacaagugcaacggcaccgacgccaaggugaagcugaucaagcaggagcuggacaaguacaagaacgccgugaccgagcugcagcugcugaugcagagcacccccgccgccaacaacagagccagaagagagcugcccagauucaugaacuacacccugaacaacaccaagaacaacaacgugacccugagcaagaagagaaagagaagauuccugggcuuccugcugggcgugggcagcgccaucgccagcggcaucgccgugagcaaggugcugcaccuggagggcgaggugaacaagaucaagaacgcccugcugagcaccaacaaggccguggugagccugagcaacggcgugagcgugcugaccagcaaggugcuggaccugaagaacuacaucgacaagcagcugcugcccaucgugaacaagcagagcugcagcaucagcaacaucgagaccgugaucgaguuccagcagaagaacaacagacugcuggagaucaccagagaguucagcgugaacgccggcgugaccacccccgugagcaccuacaugcugaccaacagcgagcugcugagccugaucaacgacaugcccaucaccaacgaccagaagaagcugaugagcaacaacgugcagaucgugagacagcagagcuacagcaucaugagcaucaucaaggaggaggugcuggccuacguggugcagcugccccuguacggcgugaucgacacccccugcuggaagcugcacaccagcccccugugcaccaccaacaccaaggagggcagcaacaucugccugaccagaaccgacagaggcugguacugcgacaacgccggcagcgugagcuucuucccccaggccgagaccugcaaggugcagagcaacagaguguucugcgacaccaugaacagccugacccugcccagcgaggugaaccugugcaacaucgacaucuucaaccccaaguacgacugcaagaucaugaccagcaagaccgacgugagcagcagcgugaucaccagccugggcgccaucgugagcugcuacggcaagaccaagugcaccgccagcaacaagaacagaggcaucaucaagaccuucagcaacggcugcgacuacgugagcaacaagggcguggacaccgugagcgugggcaacacccuguacuacgugaacaagcaggagggcaagagccuguacgugaagggcgagcccaucaucaacuucuacgacccccugguguuccccagcgacgaguucgacgccagcaucagccaggugaacgagaagaucaaccagagccuggccuucaucagaaagagcgacgagcugcugcacaacgugaacgugggcaagagcaccaccaacaucaugaucaccaccaucaucaucgugaucaucgugauccugcugcugcugaucgccgugggccuguuccuguacugcaaggccagaagcacccccgugacccugagcaaggaccagcugagcggcaucaacaacaucgccuucagcaacugaggacuaguacuggcugcaucucccuuuccucuguccuccauccuucucccaggauggugaagggggaccugguacccagugauccccaccccaggauccuaaaucaugacuuaccugcuaauaaaaacucauuggaaaagugagaagaucuaaaaaaaaaaaaaaaaaaaaaaaaaaaaaaaaaaaaaaaaaaaaaaaaaaaaaaaaaaaaaaaaugcaucccccccccccccccccccccccccccccccaaaggcucuuuucagagccaccagaauu

SEQ ID NO: 12060 - RNA, 2178 nt, Artificial Sequence
  mRNA product Design h-5 comprising derived and/or modified sequence from HRSV(Memphis-37)__AIY60640.1__F0 (opt5)
gggagagggcgcuuggcuugcaaggacccugagcugcggcauugaagcacacccaacccaacucgacugaagucagccucacugaaccggaucugagaaucuucucucucugggcuugccagggcucuccgaaccuagcuagcauccucuucaauuccaacuagaaagcuuaccauggagcugcccauccucaagaccaacgccauuacaacgauccuggcugccgugacccuuugcuucgcgagcucccagaauauuacagaagaguuuuaccaaucuaccuguagcgcugucuccaaaggcuaucugucugcccucagaacagggugguacaccagcguuaucacaauugaacuguccaacaucaaggagaauaaaugcaacggaaccgacgccaaggugaaacuuaucaagcaggaacuggauaaguauaaaaaugcugugacggagcuccagcugcugaugcagucuaccccugccgcuaacaaucgggcccgcagagagcucccgcgguucaugaacuacacacugaauaacaccaagaauaacaaugucacacuuagcaaaaagcgcaaaagacgguuucugggcuuccuccugggggugggauccgcgauugccagcggcaucgcuguuucuaaggugcuucaccuggaaggggaggucaacaagauuaaaaaugcccuccuguccaccaacaaggcugugguuagccugucuaacggaguguccguccucacgagcaaagugcuggaccuuaagaauuauaucgauaaacaacugcuccccauugugaacaagcagucuuguuccaucagcaauauugaaacagucaucgaguuucagcagaaaaacaaucgccugcuugagaucaccagagaauuuuccguuaacgccggcgugacaaccccugugucuaccuacaugcugacaaauagcgagcuccugucccugauuaacgacaugcccaucacgaaugaucaaaagaagcucaugagcaacaauguccagauugugcggcagcagucuuauuccaucaugagcauuaucaaagaagagguucuggcguacgugguccaacuuccucuguacggcgugaucgacacccccugcuggaagcuccauacaucuccucuguguaccacaaacaccaaagaagggagcaauauuugccuuacgcgcacagauagaggaugguauugugacaacgccggcuccguuucuuucuucccgcaggcugagaccugcaaggugcagagcaaucgggucuuuugugauaccaugaacucccugacacuccccagcgaggugaaccugugcaauaucgacauuuucaacccuaaauacgauuguaagaucaugaccucuaagacagacgucuccagcucugugauuacgucccugggggccaucguuagcugcuauggaaaaaccaagugcacagcuuccaauaaaaaccgcggcaucauuaagaccuuuucuaaugggugugauuacgugagcaacaaaggagucgacacaguguccguuggcaauacccucuauuacgugaacaagcaagaaggcaagucucuguaugucaaaggggagcccaucauuaauuucuacgacccucuuguguuucccagcgaugaguucgacgccuccaucagccaggugaacgaaaagauuaaucagucucuggccuucaucagaaaauccgaugaacuccugcacaacguuaaugucggaaagagcacgaccaacauuaugaucacaaccaucauuaucgugauuaucgugauucugcuucuccugaucgcugucggccuguuucucuacugcaaagcgcggucuacaccggugacccuguccaaggaccagcuuagcgggaucaauaacauugccuucucuaacugaggacuaguacuggcugcaucucccuuuccucuguccuccauccuucucccaggauggugaagggggaccugguacccagugauccccaccccaggauccuaaaucaugacuuaccugcuaauaaaaacucauuggaaaagugagaagaucuaaaaaaaaaaaaaaaaaaaaaaaaaaaaaaaaaaaaaaaaaaaaaaaaaaaaaaaaaaaaaaaaugcaucccccccccccccccccccccccccccccccaaaggcucuuuucagagccaccagaauu

SEQ ID NO: 12061 - RNA, 2178 nt, Artificial Sequence
  mRNA product Design h-5 comprising derived and/or modified sequence from HRSV(Memphis-37)__AIY60640.1__F0 (opt6)
gggagagggcgcuuggcuugcaaggacccugagcugcggcauugaagcacacccaacccaacucgacugaagucagccucacugaaccggaucugagaaucuucucucucugggcuugccagggcucuccgaaccuagcuagcauccucuucaauuccaacuagaaagcuuaccauggaacugccuauucuaaaaacaaaugccauaacaacaauucuugcagcaguaacauuauguuuugcaucaucacaaaacauuacagaagaauuuuaccaauccacuugcucagccguaucaaaaggauaccuaucagccuuaagaacagguugguacaccucaguaauaaccauagaacuaucaaacauaaaagaaaacaaaugcaaugguacugaugcaaaagucaaacuaaucaaacaagaacuggacaaauacaaaaaugcaguaaccgaacuacaacuccuaaugcaauccacaccugcagccaacaacagagcaagacgcgaacuaccaagauuuaugaauuacacauuaaacaacaccaagaacaacaauguaacucucucaaaaaaaagaaaaagacgcuuucuagguuuccuccuaggcgucggaucugcaauagccucaggaauagcaguaucaaaaguucuacaccuagaaggagaaguaaacaaaauuaaaaacgcauuacuaucaaccaacaaagcaguuguaucccuuucaaauggagucucuguacuuacaucaaaaguacucgaccuaaaaaacuauauagacaaacaacuacucccaauagucaauaagcaaucaugcagcauaucaaacauagaaacaguuauagaauuucaacaaaaaaacaacagacuacucgaaauaaccagagaauuuagcgucaacgcaggcguaaccacaccgguauccacauacaugcuuacaaacucagaacuccucucacuaauaaacgacaugccaauaacuaaugaccaaaaaaaacuaaugucaaacaauguccaaauaguccgucaacaaucauacucaauaaugucaauaauaaaagaagaaguauuagcauauguaguccaacuaccauuauacggcguuauagacacaccuuguuggaaacuucacacauccccacucuguacaaccaacacaaaagaagguuccaauauaugccuaacuagaaccgacagaggaugguauugcgacaacgcaggaucuguaucauucuuuccccaagcagaaacauguaaaguacaaaguaaccgcguauucugcgacaccaugaacucauuaacccucccauccgaaguuaauuuaugcaauauagacauauuuaauccuaaauacgacugcaaaauaaugacaucaaaaacagacguuaguuccuccguaaucacaucuuugggcgcaauagucucaugcuauggaaaaacaaaaugcacagccucaaacaaaaauagaggaauaauaaaaacauucagcaacggcugugauuauguauccaacaaaggaguagacacaguauccguaggcaauacccuuuacuacguuaauaaacaagaaggaaaaucauuauacgucaaaggagaaccuaucauaaauuucuacgacccauuaguauucccuucagacgaauuugaugccucaauaucccaagucaaugaaaaaaucaaccaaucacuagccuuuauccgcaaaucagacgaauuacuacacaacguaaacguaggcaaaucaacaacuaauauaaugauaacaacaauaauaauaguaauuauaguaauauuauuacuacuaaucgccguagguuuauucuuauacuguaaagcacgaucaacaccaguuacacucucaaaagaucaacuaucaggaauaaacaacauagcauuuuccaauuaaggacuaguacuggcugcaucucccuuuccucuguccuccauccuucucccaggauggugaagggggaccugguacccagugauccccaccccaggauccuaaaucaugacuuaccugcuaauaaaaacucauuggaaaagugagaagaucuaaaaaaaaaaaaaaaaaaaaaaaaaaaaaaaaaaaaaaaaaaaaaaaaaaaaaaaaaaaaaaaaugcaucccccccccccccccccccccccccccccccaaaggcucuuuucagagccaccagaauu

SEQ ID NO: 12062 - RNA, 2178 nt, Artificial Sequence
  mRNA product Design h-5 comprising derived and/or modified sequence from HRSV(Memphis-37)__AIY60640.1__F0 (opt11)
gggagagggcgcuuggcuugcaaggacccugagcugcggcauugaagcacacccaacccaacucgacugaagucagccucacugaaccggaucugagaaucuucucucucugggcuugccagggcucuccgaaccuagcuagcauccucuucaauuccaacuagaaagcuuaccauggaacuccccauccucaaaacaaacgccauaaccacuauccucgccgccgucacccucugcuucgccuccucccaaaacaucacagaggaguucuaccaauccacaugcuccgccgucuccaaaggcuaccucagcgcccuacguaccggcugguacaccagcgucaucacaauagaacucuccaacaucaaggaaaacaaaugcaacggcaccgaugccaaaguaaaacucaucaaacaagaacucgauaaauacaaaaacgccgucaccgaacuacaacuccuaaugcaaagcacacccgccgccaacaacagagcacggcgcgaacugccccgcuucaugaacuacacccucaacaacaccaaaaauaacaacgucacccuauccaagaaacgcaaacgccgauuccucgguuuccuacucggcguaggaagcgccauagccucaggcaucgccgucuccaaaguccuccaucuggaaggcgaagucaacaaaaucaaaaacgcacucuuauccaccaacaaagccgucgucucccucucgaacggggucuccguccuuaccuccaaaguccucgaccuuaaaaacuacaucgacaaacaacuacuaccaauagucaauaaacaauccugcuccaucucaaacauagaaaccgucauagaguuccaacagaagaacaaucgccuccucgaaauaacucgcgaguucuccgucaacgcaggcgucacgaccccugucucaacauacaugcuaacuaacucagaacuccuaagccuaaucaacgacaugcccaucacaaacgaccaaaagaaacucaugagcaacaauguccagauagucagacagcaauccuauagcaucaugucuauaauaaaagaagaagugcucgccuacguaguccaacucccucuuuacggcgucauagacacacccugcuggaaacuccacacaucuccucucugcaccaccaacacaaaagaaggcagcaacaucugccugacccgaaccgaccgcggaugguacugcgacaacgcuggcuccgugucuuucuuuccccaagccgaaaccugcaaaguccaguccaaccgcgucuucugcgacacaaugaacucccucacccuacccuccgaaguuaaccucugcaacaucgacaucuucaauccaaaauacgacugcaaaaucaugaccucgaaaacggacguauccuccuccgucauaacaucacuuggagccaucguuagcugcuacggaaaaaccaaauguaccgccuccaacaaaaaccgcggaauaaucaaaacauucuccaacggcugcgacuacguaagcaacaaaggggucgauacugucuccguagguaacacccuauacuacgucaacaaacaagaaggaaaaucacuauacguuaaaggcgaacccauuaucaacuucuacgacccccucguuuucccauccgacgaguucgacgccuccauaagccaaguuaacgaaaagauaaaccaaucgcucgcauucauccgcaaauccgacgaacuccuacacaacgucaacgugggcaaauccacaacaaacaucaugaucaccaccaucauuaucgucauaauagucauccuccuccugcucaucgccgugggacuauuccuauacugcaaagcccgcucgacgcccgucacacuuuccaaagaccaacuaagcggaaucaacaacauagcguucagcaauuaaggacuaguacuggcugcaucucccuuuccucuguccuccauccuucucccaggauggugaagggggaccugguacccagugauccccaccccaggauccuaaaucaugacuuaccugcuaauaaaaacucauuggaaaagugagaagaucuaaaaaaaaaaaaaaaaaaaaaaaaaaaaaaaaaaaaaaaaaaaaaaaaaaaaaaaaaaaaaaaaugcaucccccccccccccccccccccccccccccccaaaggcucuuuucagagccaccagaauu

SEQ ID NO: 12063 - RNA, 2111 nt, Artificial Sequence
  mRNA product Design i-1 comprising derived and/or modified sequence from HRSV(Memphis-37)__AIY60640.1__F0 (wt)
gggagagggcgcuuggcuugcaaggacccugagcugcggcauugaagcacacccaacccaacucgacugaagucagccucacugaaccggaucugagaaucuucucucucugggcuugccagggcucuccgaaccuagcuagcauccucuucaauuccaacuagaaagcuuaccauggaguugccaauccucaaaacaaaugcaauuaccacaauccuugcugcagucacacucuguuucgcuuccagucaaaacaucacugaagaauuuuaucaaucaacaugcagugcaguuagcaaaggcuaucuuagugcuuuaagaacugguugguauacuaguguuauaacuauagaauuaaguaauaucaaggaaaauaaguguaauggaacagaugcuaagguaaaauugauaaaacaagaauuagauaaauauaaaaaugcuguaacagaauugcaguugcucaugcaaagcacaccagcagccaacaaucgagccagaagagaacuaccaagguuuaugaauuauacacucaacaauaccaaaaauaacaauguaacauuaagcaagaaaaggaaaagaagauuucuuggcuuuuuguuagguguuggaucugcaaucgccaguggcauugcuguaucuaaaguccugcaccuagaaggggaagugaacaaaaucaaaaaugcucuacuauccacaaacaaggcuguagucagcuuaucaaauggaguuagugucuuaaccagcaaaguguuagaccucaaaaacuauauagauaaacaguuguuacccauugugaacaagcaaagcugcagcauaucaaacauugaaacugugauagaauuccaacaaaagaacaacagacuacuagagauuaccagggaauuuaguguuaaugcagguguaacuacaccuguaagcacuuauauguuaacaaauagugaauuauuaucauuaaucaaugauaugccuauaacaaaugaucagaaaaaguuaauguccaacaauguucaaauaguuagacagcaaaguuacucuaucauguccauaauaaaggaggaagucuuagcauauguaguucaauuaccacuauaugguguaauagauacaccuuguuggaaacuacacacauccccucuaugcacaaccaacacaaaggaaggguccaacaucuguuuaacaagaaccgacagaggaugguacugugacaaugcaggaucagugucuuucuucccacaagcugaaacaugcaaaguucaaucgaaucgaguauuuugugacacaaugaacagucuaacauuaccaagugaaguaaaucucugcaacauugacauauucaacccuaaauaugauugcaaaauuaugacuucaaaaacagaugugagcagcuccguuaucacaucucuaggagccauugugucaugcuauggcaaaacuaaauguacagcauccaauaaaaaucguggaaucauaaagacauuuucuaacgggugugauuauguaucaaauaaggggguggacacuguaucuguagguaauacauuauauuauguaaauaagcaagaaggaaaaagccucuauguaaaaggugaaccaauaauaaauuucuaugacccauuaguguucccuucugaugaauuugaugcaucaauaucucaagucaaugagaagauuaaccagagccuagcauuuauucguaaauccgaugaauuauuacauaauguaaauguugguaaauccaccacaaauaucaugauaacuacuauaauuauagugauuauaguaauauuguuauuauuaauugcaguugggcuguuccuauacugcaaggccagaagcacaccagucacacuaagcaaggaucaacugagugguauaaauaauauugcauuuaguaacugaggacuaguguccaccugucccuccugggcugcuggauugucucguuuuccugccaaauaaacaggaucagcgcuuuacagaucuaaaaaaaaaaaaaaaaaaaaaaaaaaaaaaaaaaaaaaaaaaaaaaaaaaaaaaaaaaaaaaaaugcaucccccccccccccccccccccccccccccccaaaggcucuuuucagagccaccagaauu

SEQ ID NO: 12064 - RNA, 2111 nt, Artificial Sequence
  mRNA product Design i-1 comprising derived and/or modified sequence from HRSV(Memphis-37)__AIY60640.1__F0 (opt1)
gggagagggcgcuuggcuugcaaggacccugagcugcggcauugaagcacacccaacccaacucgacugaagucagccucacugaaccggaucugagaaucuucucucucugggcuugccagggcucuccgaaccuagcuagcauccucuucaauuccaacuagaaagcuuaccauggagcugcccauccucaagaccaacgccaucaccacgauccuggccgcggugacccugugcuucgccagcucccagaacaucaccgaggaguucuaccagagcacgugcuccgccgucagcaagggcuaccucuccgcccugcgcaccgggugguacaccagcgugaucaccaucgagcuguccaacaucaaggagaacaagugcaacggcaccgacgccaaggugaagcucaucaagcaggagcuggacaaguacaagaacgcggucacggagcugcagcuccugaugcagagcaccccggccgccaacaaccgggcccgccgggagcugccccgcuucaugaacuacacccucaacaacaccaagaacaacaacgugacgcuguccaagaagcggaagcgccgguuccugggguuccuccugggcguggggagcgcgaucgccuccggcaucgccgucagcaaggugcugcaccucgagggcgaggugaacaagaucaagaacgcccugcuguccaccaacaaggccgucgugagccucuccaacggggugagcguccugaccuccaaggugcuggaccucaagaacuacaucgacaagcagcugcugcccaucgugaacaagcagagcugcuccaucagcaacaucgagaccgucaucgaguuccagcagaagaacaaccgccuccuggagaucacgcgggaguucagcgugaacgcgggcgugaccacccccgucuccaccuacaugcugacgaacagcgagcuccugucccugaucaacgacaugccgaucaccaacgaccagaagaagcucaugagcaacaacgugcagaucgugcgccagcaguccuacagcaucauguccaucaucaaggaggagguccuggccuacguggugcagcugccccucuacggggucaucgacacccccugcuggaagcugcacaccagcccccugugcacgaccaacaccaaggagggcuccaacaucugccucacccggacggaccgcgggugguacugcgacaacgccggcagcguguccuucuucccgcaggccgagaccugcaagguccagagcaaccggguguucugcgacaccaugaacucccugacccugcccagcgaggugaaccucugcaacaucgacaucuucaaccccaaguacgacugcaagaucaugacguccaagaccgacgucagcuccagcgugaucaccucccugggcgccaucgugagcugcuacgggaagaccaagugcacggcgagcaacaagaaccgcggcaucaucaagaccuucuccaacgggugcgacuacgucagcaacaagggcguggacaccguguccgucggcaacacccuguacuacgugaacaagcaggagggcaagagccucuacgugaagggggagcccaucaucaacuucuacgacccgcuggucuuccccuccgacgaguucgacgccagcaucucccaggugaacgagaagaucaaccagagccuggccuucauccggaaguccgacgagcuccugcacaacgugaacgucggcaagagcaccacgaacaucaugaucaccaccaucaucaucgugaucaucgugauccugcugcuccugaucgccgucgggcuguuccucuacugcaaggcccgcuccacccccgugacgcugagcaaggaccagcuguccgggaucaacaacaucgcguucagcaacugaggacuaguguccaccugucccuccugggcugcuggauugucucguuuuccugccaaauaaacaggaucagcgcuuuacagaucuaaaaaaaaaaaaaaaaaaaaaaaaaaaaaaaaaaaaaaaaaaaaaaaaaaaaaaaaaaaaaaaaugcaucccccccccccccccccccccccccccccccaaaggcucuuuucagagccaccagaauu

SEQ ID NO: 12065 - RNA, 2111 nt, Artificial Sequence
  mRNA product Design i-1 comprising derived and/or modified sequence from HRSV(Memphis-37)__AIY60640.1__F0 (opt2)
gggagagggcgcuuggcuugcaaggacccugagcugcggcauugaagcacacccaacccaacucgacugaagucagccucacugaaccggaucugagaaucuucucucucugggcuugccagggcucuccgaaccuagcuagcauccucuucaauuccaacuagaaagcuuaccauggagcuccccauccucaagaccaacgccaucaccaccauccucgccgccgucacccucugcuucgccuccucccagaacaucaccgaggaguucuaccaguccaccugcuccgccgucuccaagggcuaccucuccgcccuccgcaccggcugguacaccuccgucaucaccaucgagcucuccaacaucaaggagaacaagugcaacggcaccgacgccaaggucaagcucaucaagcaggagcucgacaaguacaagaacgccgucaccgagcuccagcuccucaugcaguccacccccgccgccaacaaccgcgcccgccgcgagcucccccgcuucaugaacuacacccucaacaacaccaagaacaacaacgucacccucuccaagaagcgcaagcgccgcuuccucggcuuccuccucggcgucggcuccgccaucgccuccggcaucgccgucuccaagguccuccaccucgagggcgaggucaacaagaucaagaacgcccuccucuccaccaacaaggccgucgucucccucuccaacggcgucuccguccucaccuccaagguccucgaccucaagaacuacaucgacaagcagcuccuccccaucgucaacaagcaguccugcuccaucuccaacaucgagaccgucaucgaguuccagcagaagaacaaccgccuccucgagaucacccgcgaguucuccgucaacgccggcgucaccacccccgucuccaccuacaugcucaccaacuccgagcuccucucccucaucaacgacaugcccaucaccaacgaccagaagaagcucauguccaacaacguccagaucguccgccagcaguccuacuccaucauguccaucaucaaggaggagguccucgccuacgucguccagcucccccucuacggcgucaucgacacccccugcuggaagcuccacaccuccccccucugcaccaccaacaccaaggagggcuccaacaucugccucacccgcaccgaccgcggcugguacugcgacaacgccggcuccgucuccuucuucccccaggccgagaccugcaagguccaguccaaccgcgucuucugcgacaccaugaacucccucacccuccccuccgaggucaaccucugcaacaucgacaucuucaaccccaaguacgacugcaagaucaugaccuccaagaccgacgucuccuccuccgucaucaccucccucggcgccaucgucuccugcuacggcaagaccaagugcaccgccuccaacaagaaccgcggcaucaucaagaccuucuccaacggcugcgacuacgucuccaacaagggcgucgacaccgucuccgucggcaacacccucuacuacgucaacaagcaggagggcaagucccucuacgucaagggcgagcccaucaucaacuucuacgacccccucgucuuccccuccgacgaguucgacgccuccaucucccaggucaacgagaagaucaaccagucccucgccuucauccgcaaguccgacgagcuccuccacaacgucaacgucggcaaguccaccaccaacaucaugaucaccaccaucaucaucgucaucaucgucauccuccuccuccucaucgccgucggccucuuccucuacugcaaggcccgcuccacccccgucacccucuccaaggaccagcucuccggcaucaacaacaucgccuucuccaacugaggacuaguguccaccugucccuccugggcugcuggauugucucguuuuccugccaaauaaacaggaucagcgcuuuacagaucuaaaaaaaaaaaaaaaaaaaaaaaaaaaaaaaaaaaaaaaaaaaaaaaaaaaaaaaaaaaaaaaaugcaucccccccccccccccccccccccccccccccaaaggcucuuuucagagccaccagaauu

SEQ ID NO: 12066 - RNA, 2111 nt, Artificial Sequence
  mRNA product Design i-1 comprising derived and/or modified sequence from HRSV(Memphis-37)__AIY60640.1__F0 (opt3)
gggagagggcgcuuggcuugcaaggacccugagcugcggcauugaagcacacccaacccaacucgacugaagucagccucacugaaccggaucugagaaucuucucucucugggcuugccagggcucuccgaaccuagcuagcauccucuucaauuccaacuagaaagcuuaccauggagcugcccauccucaagaccaacgccauuacaacuauacuugcugcagugacgcugugcuucgccagcucccagaauaucaccgaagaguuuuaccaaucuacauguucagcggucaguaaaggcuauuugagcgcuuuaagaacugggugguacaccuccguuauuacaaucgaacugucuaacauuaaggagaauaaaugcaacggaaccgacgccaaggugaaacuaaucaagcaggaacucgauaaguauaaaaaugcaguaacugagcugcagcuucugaugcagucgaccccugccgcuaacaauagggcacggcgcgaguugccacgauucaugaacuacacacucaauaacacgaagaauaacaaugugacucugagcaaaaagcguaaaagaagguuucuggguuuccucuuaggcgucgggucagccauagcuaguggaaucgccguguccaagguucugcaccuugaaggcgaggugaacaagauuaaaaaugcguugcugucuaccaacaaggcagucgugagccuauccaacgguguaucaguucucacaaguaaagugcuggaccuuaagaauuauaucgauaaacaacuguugccgauugucaacaagcagagcuguucuaucuccaauauagaaacugugauugaguuucagcagaaaaacaaucggcuccuggagaucacccgcgaguucucagugaacgccggggucacaacccccguuagcacguacauguuaacuaauagugaacugcucucucuuauuaacgacaugccuaucacaaaugaucaaaagaagcugauguccaacaaugugcagaucguaagacagcagagcuauucgauuaugucuauaaucaaagaagagguguuggcuuacgucgugcaacuaccacuguacggaguuauugacacccccugcuggaagcuccauacuuccccucuguguacaaccaacacgaaagaaggcucaaauaucugccuuaccaggacagaucggggcugguauugugacaacgccgggagugugagcuuuuucccacaggcagagacuugcaagguccaguccaaucgcguguuuugugauaccaugaacucucugacauugcccagcgagguaaaccucugcaauauagacauuuucaacccuaaauacgauuguaagaucaugacuucaaagaccgacguuaguuccagcgugaucacaucucugggagcuauugucucaugcuaugguaaaaccaagugcacugccaguaauaaaaaccgaggcaucauuaagacguuuagcaaugggugugauuacguguccaacaaaggagucgacacagugucuguuggcaauaccuuauauuacgugaacaagcaagaagguaagucgcuguauguaaaaggggagccaauaaucaauuucuacgacccgcuagucuuucccagcgaugaguucgacgcguccauuucacaggugaacgaaaagaucaaucagagucucgccuucaucagaaaaucugaugaacugcuucacaacguuaaugugggaaagagcacuaccaacauuaugauaacaaccaucauuaucgucauuaucgugauauugcugcuccugaucgcaguaggccuuuuucuguacugcaaagcuagguccacuccugugacauugucaaaggaccagcucagcggcauuaauaacaucgccuucucuaacugaggacuaguguccaccugucccuccugggcugcuggauugucucguuuuccugccaaauaaacaggaucagcgcuuuacagaucuaaaaaaaaaaaaaaaaaaaaaaaaaaaaaaaaaaaaaaaaaaaaaaaaaaaaaaaaaaaaaaaaugcaucccccccccccccccccccccccccccccccaaaggcucuuuucagagccaccagaauu

SEQ ID NO: 12067 - RNA, 2111 nt, Artificial Sequence
  mRNA product Design i-1 comprising derived and/or modified sequence from HRSV(Memphis-37)__AIY60640.1__F0 (opt4)
gggagagggcgcuuggcuugcaaggacccugagcugcggcauugaagcacacccaacccaacucgacugaagucagccucacugaaccggaucugagaaucuucucucucugggcuugccagggcucuccgaaccuagcuagcauccucuucaauuccaacuagaaagcuuaccauggagcugcccauccugaagaccaacgccaucaccaccauccuggccgccgugacccugugcuucgccagcagccagaacaucaccgaggaguucuaccagagcaccugcagcgccgugagcaagggcuaccugagcgcccugagaaccggcugguacaccagcgugaucaccaucgagcugagcaacaucaaggagaacaagugcaacggcaccgacgccaaggugaagcugaucaagcaggagcuggacaaguacaagaacgccgugaccgagcugcagcugcugaugcagagcacccccgccgccaacaacagagccagaagagagcugcccagauucaugaacuacacccugaacaacaccaagaacaacaacgugacccugagcaagaagagaaagagaagauuccugggcuuccugcugggcgugggcagcgccaucgccagcggcaucgccgugagcaaggugcugcaccuggagggcgaggugaacaagaucaagaacgcccugcugagcaccaacaaggccguggugagccugagcaacggcgugagcgugcugaccagcaaggugcuggaccugaagaacuacaucgacaagcagcugcugcccaucgugaacaagcagagcugcagcaucagcaacaucgagaccgugaucgaguuccagcagaagaacaacagacugcuggagaucaccagagaguucagcgugaacgccggcgugaccacccccgugagcaccuacaugcugaccaacagcgagcugcugagccugaucaacgacaugcccaucaccaacgaccagaagaagcugaugagcaacaacgugcagaucgugagacagcagagcuacagcaucaugagcaucaucaaggaggaggugcuggccuacguggugcagcugccccuguacggcgugaucgacacccccugcuggaagcugcacaccagcccccugugcaccaccaacaccaaggagggcagcaacaucugccugaccagaaccgacagaggcugguacugcgacaacgccggcagcgugagcuucuucccccaggccgagaccugcaaggugcagagcaacagaguguucugcgacaccaugaacagccugacccugcccagcgaggugaaccugugcaacaucgacaucuucaaccccaaguacgacugcaagaucaugaccagcaagaccgacgugagcagcagcgugaucaccagccugggcgccaucgugagcugcuacggcaagaccaagugcaccgccagcaacaagaacagaggcaucaucaagaccuucagcaacggcugcgacuacgugagcaacaagggcguggacaccgugagcgugggcaacacccuguacuacgugaacaagcaggagggcaagagccuguacgugaagggcgagcccaucaucaacuucuacgacccccugguguuccccagcgacgaguucgacgccagcaucagccaggugaacgagaagaucaaccagagccuggccuucaucagaaagagcgacgagcugcugcacaacgugaacgugggcaagagcaccaccaacaucaugaucaccaccaucaucaucgugaucaucgugauccugcugcugcugaucgccgugggccuguuccuguacugcaaggccagaagcacccccgugacccugagcaaggaccagcugagcggcaucaacaacaucgccuucagcaacugaggacuaguguccaccugucccuccugggcugcuggauugucucguuuuccugccaaauaaacaggaucagcgcuuuacagaucuaaaaaaaaaaaaaaaaaaaaaaaaaaaaaaaaaaaaaaaaaaaaaaaaaaaaaaaaaaaaaaaaugcaucccccccccccccccccccccccccccccccaaaggcucuuuucagagccaccagaauu

SEQ ID NO: 12068 - RNA, 2111 nt, Artificial Sequence
  mRNA product Design i-1 comprising derived and/or modified sequence from HRSV(Memphis-37)__AIY60640.1__F0 (opt5)
gggagagggcgcuuggcuugcaaggacccugagcugcggcauugaagcacacccaacccaacucgacugaagucagccucacugaaccggaucugagaaucuucucucucugggcuugccagggcucuccgaaccuagcuagcauccucuucaauuccaacuagaaagcuuaccauggagcugcccauccucaagaccaacgccauuacaacgauccuggcugccgugacccuuugcuucgcgagcucccagaauauuacagaagaguuuuaccaaucuaccuguagcgcugucuccaaaggcuaucugucugcccucagaacagggugguacaccagcguuaucacaauugaacuguccaacaucaaggagaauaaaugcaacggaaccgacgccaaggugaaacuuaucaagcaggaacuggauaaguauaaaaaugcugugacggagcuccagcugcugaugcagucuaccccugccgcuaacaaucgggcccgcagagagcucccgcgguucaugaacuacacacugaauaacaccaagaauaacaaugucacacuuagcaaaaagcgcaaaagacgguuucugggcuuccuccugggggugggauccgcgauugccagcggcaucgcuguuucuaaggugcuucaccuggaaggggaggucaacaagauuaaaaaugcccuccuguccaccaacaaggcugugguuagccugucuaacggaguguccguccucacgagcaaagugcuggaccuuaagaauuauaucgauaaacaacugcuccccauugugaacaagcagucuuguuccaucagcaauauugaaacagucaucgaguuucagcagaaaaacaaucgccugcuugagaucaccagagaauuuuccguuaacgccggcgugacaaccccugugucuaccuacaugcugacaaauagcgagcuccugucccugauuaacgacaugcccaucacgaaugaucaaaagaagcucaugagcaacaauguccagauugugcggcagcagucuuauuccaucaugagcauuaucaaagaagagguucuggcguacgugguccaacuuccucuguacggcgugaucgacacccccugcuggaagcuccauacaucuccucuguguaccacaaacaccaaagaagggagcaauauuugccuuacgcgcacagauagaggaugguauugugacaacgccggcuccguuucuuucuucccgcaggcugagaccugcaaggugcagagcaaucgggucuuuugugauaccaugaacucccugacacuccccagcgaggugaaccugugcaauaucgacauuuucaacccuaaauacgauuguaagaucaugaccucuaagacagacgucuccagcucugugauuacgucccugggggccaucguuagcugcuauggaaaaaccaagugcacagcuuccaauaaaaaccgcggcaucauuaagaccuuuucuaaugggugugauuacgugagcaacaaaggagucgacacaguguccguuggcaauacccucuauuacgugaacaagcaagaaggcaagucucuguaugucaaaggggagcccaucauuaauuucuacgacccucuuguguuucccagcgaugaguucgacgccuccaucagccaggugaacgaaaagauuaaucagucucuggccuucaucagaaaauccgaugaacuccugcacaacguuaaugucggaaagagcacgaccaacauuaugaucacaaccaucauuaucgugauuaucgugauucugcuucuccugaucgcugucggccuguuucucuacugcaaagcgcggucuacaccggugacccuguccaaggaccagcuuagcgggaucaauaacauugccuucucuaacugaggacuaguguccaccugucccuccugggcugcuggauugucucguuuuccugccaaauaaacaggaucagcgcuuuacagaucuaaaaaaaaaaaaaaaaaaaaaaaaaaaaaaaaaaaaaaaaaaaaaaaaaaaaaaaaaaaaaaaaugcaucccccccccccccccccccccccccccccccaaaggcucuuuucagagccaccagaauu

SEQ ID NO: 12069 - RNA, 2111 nt, Artificial Sequence
  mRNA product Design i-1 comprising derived and/or modified sequence from HRSV(Memphis-37)__AIY60640.1__F0 (opt6)
gggagagggcgcuuggcuugcaaggacccugagcugcggcauugaagcacacccaacccaacucgacugaagucagccucacugaaccggaucugagaaucuucucucucugggcuugccagggcucuccgaaccuagcuagcauccucuucaauuccaacuagaaagcuuaccauggaacugccuauucuaaaaacaaaugccauaacaacaauucuugcagcaguaacauuauguuuugcaucaucacaaaacauuacagaagaauuuuaccaauccacuugcucagccguaucaaaaggauaccuaucagccuuaagaacagguugguacaccucaguaauaaccauagaacuaucaaacauaaaagaaaacaaaugcaaugguacugaugcaaaagucaaacuaaucaaacaagaacuggacaaauacaaaaaugcaguaaccgaacuacaacuccuaaugcaauccacaccugcagccaacaacagagcaagacgcgaacuaccaagauuuaugaauuacacauuaaacaacaccaagaacaacaauguaacucucucaaaaaaaagaaaaagacgcuuucuagguuuccuccuaggcgucggaucugcaauagccucaggaauagcaguaucaaaaguucuacaccuagaaggagaaguaaacaaaauuaaaaacgcauuacuaucaaccaacaaagcaguuguaucccuuucaaauggagucucuguacuuacaucaaaaguacucgaccuaaaaaacuauauagacaaacaacuacucccaauagucaauaagcaaucaugcagcauaucaaacauagaaacaguuauagaauuucaacaaaaaaacaacagacuacucgaaauaaccagagaauuuagcgucaacgcaggcguaaccacaccgguauccacauacaugcuuacaaacucagaacuccucucacuaauaaacgacaugccaauaacuaaugaccaaaaaaaacuaaugucaaacaauguccaaauaguccgucaacaaucauacucaauaaugucaauaauaaaagaagaaguauuagcauauguaguccaacuaccauuauacggcguuauagacacaccuuguuggaaacuucacacauccccacucuguacaaccaacacaaaagaagguuccaauauaugccuaacuagaaccgacagaggaugguauugcgacaacgcaggaucuguaucauucuuuccccaagcagaaacauguaaaguacaaaguaaccgcguauucugcgacaccaugaacucauuaacccucccauccgaaguuaauuuaugcaauauagacauauuuaauccuaaauacgacugcaaaauaaugacaucaaaaacagacguuaguuccuccguaaucacaucuuugggcgcaauagucucaugcuauggaaaaacaaaaugcacagccucaaacaaaaauagaggaauaauaaaaacauucagcaacggcugugauuauguauccaacaaaggaguagacacaguauccguaggcaauacccuuuacuacguuaauaaacaagaaggaaaaucauuauacgucaaaggagaaccuaucauaaauuucuacgacccauuaguauucccuucagacgaauuugaugccucaauaucccaagucaaugaaaaaaucaaccaaucacuagccuuuauccgcaaaucagacgaauuacuacacaacguaaacguaggcaaaucaacaacuaauauaaugauaacaacaauaauaauaguaauuauaguaauauuauuacuacuaaucgccguagguuuauucuuauacuguaaagcacgaucaacaccaguuacacucucaaaagaucaacuaucaggaauaaacaacauagcauuuuccaauuaaggacuaguguccaccugucccuccugggcugcuggauugucucguuuuccugccaaauaaacaggaucagcgcuuuacagaucuaaaaaaaaaaaaaaaaaaaaaaaaaaaaaaaaaaaaaaaaaaaaaaaaaaaaaaaaaaaaaaaaugcaucccccccccccccccccccccccccccccccaaaggcucuuuucagagccaccagaauu

SEQ ID NO: 12070 - RNA, 2111 nt, Artificial Sequence
  mRNA product Design i-1 comprising derived and/or modified sequence from HRSV(Memphis-37)__AIY60640.1__F0 (opt11)
gggagagggcgcuuggcuugcaaggacccugagcugcggcauugaagcacacccaacccaacucgacugaagucagccucacugaaccggaucugagaaucuucucucucugggcuugccagggcucuccgaaccuagcuagcauccucuucaauuccaacuagaaagcuuaccauggaacuccccauccucaaaacaaacgccauaaccacuauccucgccgccgucacccucugcuucgccuccucccaaaacaucacagaggaguucuaccaauccacaugcuccgccgucuccaaaggcuaccucagcgcccuacguaccggcugguacaccagcgucaucacaauagaacucuccaacaucaaggaaaacaaaugcaacggcaccgaugccaaaguaaaacucaucaaacaagaacucgauaaauacaaaaacgccgucaccgaacuacaacuccuaaugcaaagcacacccgccgccaacaacagagcacggcgcgaacugccccgcuucaugaacuacacccucaacaacaccaaaaauaacaacgucacccuauccaagaaacgcaaacgccgauuccucgguuuccuacucggcguaggaagcgccauagccucaggcaucgccgucuccaaaguccuccaucuggaaggcgaagucaacaaaaucaaaaacgcacucuuauccaccaacaaagccgucgucucccucucgaacggggucuccguccuuaccuccaaaguccucgaccuuaaaaacuacaucgacaaacaacuacuaccaauagucaauaaacaauccugcuccaucucaaacauagaaaccgucauagaguuccaacagaagaacaaucgccuccucgaaauaacucgcgaguucuccgucaacgcaggcgucacgaccccugucucaacauacaugcuaacuaacucagaacuccuaagccuaaucaacgacaugcccaucacaaacgaccaaaagaaacucaugagcaacaauguccagauagucagacagcaauccuauagcaucaugucuauaauaaaagaagaagugcucgccuacguaguccaacucccucuuuacggcgucauagacacacccugcuggaaacuccacacaucuccucucugcaccaccaacacaaaagaaggcagcaacaucugccugacccgaaccgaccgcggaugguacugcgacaacgcuggcuccgugucuuucuuuccccaagccgaaaccugcaaaguccaguccaaccgcgucuucugcgacacaaugaacucccucacccuacccuccgaaguuaaccucugcaacaucgacaucuucaauccaaaauacgacugcaaaaucaugaccucgaaaacggacguauccuccuccgucauaacaucacuuggagccaucguuagcugcuacggaaaaaccaaauguaccgccuccaacaaaaaccgcggaauaaucaaaacauucuccaacggcugcgacuacguaagcaacaaaggggucgauacugucuccguagguaacacccuauacuacgucaacaaacaagaaggaaaaucacuauacguuaaaggcgaacccauuaucaacuucuacgacccccucguuuucccauccgacgaguucgacgccuccauaagccaaguuaacgaaaagauaaaccaaucgcucgcauucauccgcaaauccgacgaacuccuacacaacgucaacgugggcaaauccacaacaaacaucaugaucaccaccaucauuaucgucauaauagucauccuccuccugcucaucgccgugggacuauuccuauacugcaaagcccgcucgacgcccgucacacuuuccaaagaccaacuaagcggaaucaacaacauagcguucagcaauuaaggacuaguguccaccugucccuccugggcugcuggauugucucguuuuccugccaaauaaacaggaucagcgcuuuacagaucuaaaaaaaaaaaaaaaaaaaaaaaaaaaaaaaaaaaaaaaaaaaaaaaaaaaaaaaaaaaaaaaaugcaucccccccccccccccccccccccccccccccaaaggcucuuuucagagccaccagaauu

SEQ ID NO: 12071 - RNA, 2111 nt, Artificial Sequence
  mRNA product Design i-2 comprising derived and/or modified sequence from HRSV(Memphis-37)__AIY60640.1__F0 (wt)
gggagaggcgcugccuacggagguggcagccaucuccuucucggcaucaagcuuaccauggaguugccaauccucaaaacaaaugcaauuaccacaauccuugcugcagucacacucuguuucgcuuccagucaaaacaucacugaagaauuuuaucaaucaacaugcagugcaguuagcaaaggcuaucuuagugcuuuaagaacugguugguauacuaguguuauaacuauagaauuaaguaauaucaaggaaaauaaguguaauggaacagaugcuaagguaaaauugauaaaacaagaauuagauaaauauaaaaaugcuguaacagaauugcaguugcucaugcaaagcacaccagcagccaacaaucgagccagaagagaacuaccaagguuuaugaauuauacacucaacaauaccaaaaauaacaauguaacauuaagcaagaaaaggaaaagaagauuucuuggcuuuuuguuagguguuggaucugcaaucgccaguggcauugcuguaucuaaaguccugcaccuagaaggggaagugaacaaaaucaaaaaugcucuacuauccacaaacaaggcuguagucagcuuaucaaauggaguuagugucuuaaccagcaaaguguuagaccucaaaaacuauauagauaaacaguuguuacccauugugaacaagcaaagcugcagcauaucaaacauugaaacugugauagaauuccaacaaaagaacaacagacuacuagagauuaccagggaauuuaguguuaaugcagguguaacuacaccuguaagcacuuauauguuaacaaauagugaauuauuaucauuaaucaaugauaugccuauaacaaaugaucagaaaaaguuaauguccaacaauguucaaauaguuagacagcaaaguuacucuaucauguccauaauaaaggaggaagucuuagcauauguaguucaauuaccacuauaugguguaauagauacaccuuguuggaaacuacacacauccccucuaugcacaaccaacacaaaggaaggguccaacaucuguuuaacaagaaccgacagaggaugguacugugacaaugcaggaucagugucuuucuucccacaagcugaaacaugcaaaguucaaucgaaucgaguauuuugugacacaaugaacagucuaacauuaccaagugaaguaaaucucugcaacauugacauauucaacccuaaauaugauugcaaaauuaugacuucaaaaacagaugugagcagcuccguuaucacaucucuaggagccauugugucaugcuauggcaaaacuaaauguacagcauccaauaaaaaucguggaaucauaaagacauuuucuaacgggugugauuauguaucaaauaaggggguggacacuguaucuguagguaauacauuauauuauguaaauaagcaagaaggaaaaagccucuauguaaaaggugaaccaauaauaaauuucuaugacccauuaguguucccuucugaugaauuugaugcaucaauaucucaagucaaugagaagauuaaccagagccuagcauuuauucguaaauccgaugaauuauuacauaauguaaauguugguaaauccaccacaaauaucaugauaacuacuauaauuauagugauuauaguaauauuguuauuauuaauugcaguugggcuguuccuauacugcaaggccagaagcacaccagucacacuaagcaaggaucaacugagugguauaaauaauauugcauuuaguaacugaggacuagugcaucacauuuaaaagcaucucagccuaccaugagaauaagagaaagaaaaugaagaucaauagcuuauucaucucuuuuucuuuuucguugguguaaagccaacacccugucuaaaaaacauaaauuucuuuaaucauuuugccucuuuucucugugcuucaauuaauaaaaaauggaaagaaccuagaucuaaaaaaaaaaaaaaaaaaaaaaaaaaaaaaaaaaaaaaaaaaaaaaaaaaaaaaaaaaaaaaaaugcaucccccccccccccccccccccccccccccccaaaggcucuuuucagagccaccagaauu

SEQ ID NO: 12072 - RNA, 2111 nt, Artificial Sequence
  mRNA product Design i-2 comprising derived and/or modified sequence from HRSV(Memphis-37)__AIY60640.1__F0 (opt1)
gggagaggcgcugccuacggagguggcagccaucuccuucucggcaucaagcuuaccauggagcugcccauccucaagaccaacgccaucaccacgauccuggccgcggugacccugugcuucgccagcucccagaacaucaccgaggaguucuaccagagcacgugcuccgccgucagcaagggcuaccucuccgcccugcgcaccgggugguacaccagcgugaucaccaucgagcuguccaacaucaaggagaacaagugcaacggcaccgacgccaaggugaagcucaucaagcaggagcuggacaaguacaagaacgcggucacggagcugcagcuccugaugcagagcaccccggccgccaacaaccgggcccgccgggagcugccccgcuucaugaacuacacccucaacaacaccaagaacaacaacgugacgcuguccaagaagcggaagcgccgguuccugggguuccuccugggcguggggagcgcgaucgccuccggcaucgccgucagcaaggugcugcaccucgagggcgaggugaacaagaucaagaacgcccugcuguccaccaacaaggccgucgugagccucuccaacggggugagcguccugaccuccaaggugcuggaccucaagaacuacaucgacaagcagcugcugcccaucgugaacaagcagagcugcuccaucagcaacaucgagaccgucaucgaguuccagcagaagaacaaccgccuccuggagaucacgcgggaguucagcgugaacgcgggcgugaccacccccgucuccaccuacaugcugacgaacagcgagcuccugucccugaucaacgacaugccgaucaccaacgaccagaagaagcucaugagcaacaacgugcagaucgugcgccagcaguccuacagcaucauguccaucaucaaggaggagguccuggccuacguggugcagcugccccucuacggggucaucgacacccccugcuggaagcugcacaccagcccccugugcacgaccaacaccaaggagggcuccaacaucugccucacccggacggaccgcgggugguacugcgacaacgccggcagcguguccuucuucccgcaggccgagaccugcaagguccagagcaaccggguguucugcgacaccaugaacucccugacccugcccagcgaggugaaccucugcaacaucgacaucuucaaccccaaguacgacugcaagaucaugacguccaagaccgacgucagcuccagcgugaucaccucccugggcgccaucgugagcugcuacgggaagaccaagugcacggcgagcaacaagaaccgcggcaucaucaagaccuucuccaacgggugcgacuacgucagcaacaagggcguggacaccguguccgucggcaacacccuguacuacgugaacaagcaggagggcaagagccucuacgugaagggggagcccaucaucaacuucuacgacccgcuggucuuccccuccgacgaguucgacgccagcaucucccaggugaacgagaagaucaaccagagccuggccuucauccggaaguccgacgagcuccugcacaacgugaacgucggcaagagcaccacgaacaucaugaucaccaccaucaucaucgugaucaucgugauccugcugcuccugaucgccgucgggcuguuccucuacugcaaggcccgcuccacccccgugacgcugagcaaggaccagcuguccgggaucaacaacaucgcguucagcaacugaggacuagugcaucacauuuaaaagcaucucagccuaccaugagaauaagagaaagaaaaugaagaucaauagcuuauucaucucuuuuucuuuuucguugguguaaagccaacacccugucuaaaaaacauaaauuucuuuaaucauuuugccucuuuucucugugcuucaauuaauaaaaaauggaaagaaccuagaucuaaaaaaaaaaaaaaaaaaaaaaaaaaaaaaaaaaaaaaaaaaaaaaaaaaaaaaaaaaaaaaaaugcaucccccccccccccccccccccccccccccccaaaggcucuuuucagagccaccagaauu

SEQ ID NO: 12073 - RNA, 2111 nt, Artificial Sequence
  mRNA product Design i-2 comprising derived and/or modified sequence from HRSV(Memphis-37)__AIY60640.1__F0 (opt2)
gggagaggcgcugccuacggagguggcagccaucuccuucucggcaucaagcuuaccauggagcuccccauccucaagaccaacgccaucaccaccauccucgccgccgucacccucugcuucgccuccucccagaacaucaccgaggaguucuaccaguccaccugcuccgccgucuccaagggcuaccucuccgcccuccgcaccggcugguacaccuccgucaucaccaucgagcucuccaacaucaaggagaacaagugcaacggcaccgacgccaaggucaagcucaucaagcaggagcucgacaaguacaagaacgccgucaccgagcuccagcuccucaugcaguccacccccgccgccaacaaccgcgcccgccgcgagcucccccgcuucaugaacuacacccucaacaacaccaagaacaacaacgucacccucuccaagaagcgcaagcgccgcuuccucggcuuccuccucggcgucggcuccgccaucgccuccggcaucgccgucuccaagguccuccaccucgagggcgaggucaacaagaucaagaacgcccuccucuccaccaacaaggccgucgucucccucuccaacggcgucuccguccucaccuccaagguccucgaccucaagaacuacaucgacaagcagcuccuccccaucgucaacaagcaguccugcuccaucuccaacaucgagaccgucaucgaguuccagcagaagaacaaccgccuccucgagaucacccgcgaguucuccgucaacgccggcgucaccacccccgucuccaccuacaugcucaccaacuccgagcuccucucccucaucaacgacaugcccaucaccaacgaccagaagaagcucauguccaacaacguccagaucguccgccagcaguccuacuccaucauguccaucaucaaggaggagguccucgccuacgucguccagcucccccucuacggcgucaucgacacccccugcuggaagcuccacaccuccccccucugcaccaccaacaccaaggagggcuccaacaucugccucacccgcaccgaccgcggcugguacugcgacaacgccggcuccgucuccuucuucccccaggccgagaccugcaagguccaguccaaccgcgucuucugcgacaccaugaacucccucacccuccccuccgaggucaaccucugcaacaucgacaucuucaaccccaaguacgacugcaagaucaugaccuccaagaccgacgucuccuccuccgucaucaccucccucggcgccaucgucuccugcuacggcaagaccaagugcaccgccuccaacaagaaccgcggcaucaucaagaccuucuccaacggcugcgacuacgucuccaacaagggcgucgacaccgucuccgucggcaacacccucuacuacgucaacaagcaggagggcaagucccucuacgucaagggcgagcccaucaucaacuucuacgacccccucgucuuccccuccgacgaguucgacgccuccaucucccaggucaacgagaagaucaaccagucccucgccuucauccgcaaguccgacgagcuccuccacaacgucaacgucggcaaguccaccaccaacaucaugaucaccaccaucaucaucgucaucaucgucauccuccuccuccucaucgccgucggccucuuccucuacugcaaggcccgcuccacccccgucacccucuccaaggaccagcucuccggcaucaacaacaucgccuucuccaacugaggacuagugcaucacauuuaaaagcaucucagccuaccaugagaauaagagaaagaaaaugaagaucaauagcuuauucaucucuuuuucuuuuucguugguguaaagccaacacccugucuaaaaaacauaaauuucuuuaaucauuuugccucuuuucucugugcuucaauuaauaaaaaauggaaagaaccuagaucuaaaaaaaaaaaaaaaaaaaaaaaaaaaaaaaaaaaaaaaaaaaaaaaaaaaaaaaaaaaaaaaaugcaucccccccccccccccccccccccccccccccaaaggcucuuuucagagccaccagaauu

SEQ ID NO: 12074 - RNA, 2111 nt, Artificial Sequence
  mRNA product Design i-2 comprising derived and/or modified sequence from HRSV(Memphis-37)__AIY60640.1__F0 (opt3)
gggagaggcgcugccuacggagguggcagccaucuccuucucggcaucaagcuuaccauggagcugcccauccucaagaccaacgccauuacaacuauacuugcugcagugacgcugugcuucgccagcucccagaauaucaccgaagaguuuuaccaaucuacauguucagcggucaguaaaggcuauuugagcgcuuuaagaacugggugguacaccuccguuauuacaaucgaacugucuaacauuaaggagaauaaaugcaacggaaccgacgccaaggugaaacuaaucaagcaggaacucgauaaguauaaaaaugcaguaacugagcugcagcuucugaugcagucgaccccugccgcuaacaauagggcacggcgcgaguugccacgauucaugaacuacacacucaauaacacgaagaauaacaaugugacucugagcaaaaagcguaaaagaagguuucuggguuuccucuuaggcgucgggucagccauagcuaguggaaucgccguguccaagguucugcaccuugaaggcgaggugaacaagauuaaaaaugcguugcugucuaccaacaaggcagucgugagccuauccaacgguguaucaguucucacaaguaaagugcuggaccuuaagaauuauaucgauaaacaacuguugccgauugucaacaagcagagcuguucuaucuccaauauagaaacugugauugaguuucagcagaaaaacaaucggcuccuggagaucacccgcgaguucucagugaacgccggggucacaacccccguuagcacguacauguuaacuaauagugaacugcucucucuuauuaacgacaugccuaucacaaaugaucaaaagaagcugauguccaacaaugugcagaucguaagacagcagagcuauucgauuaugucuauaaucaaagaagagguguuggcuuacgucgugcaacuaccacuguacggaguuauugacacccccugcuggaagcuccauacuuccccucuguguacaaccaacacgaaagaaggcucaaauaucugccuuaccaggacagaucggggcugguauugugacaacgccgggagugugagcuuuuucccacaggcagagacuugcaagguccaguccaaucgcguguuuugugauaccaugaacucucugacauugcccagcgagguaaaccucugcaauauagacauuuucaacccuaaauacgauuguaagaucaugacuucaaagaccgacguuaguuccagcgugaucacaucucugggagcuauugucucaugcuaugguaaaaccaagugcacugccaguaauaaaaaccgaggcaucauuaagacguuuagcaaugggugugauuacguguccaacaaaggagucgacacagugucuguuggcaauaccuuauauuacgugaacaagcaagaagguaagucgcuguauguaaaaggggagccaauaaucaauuucuacgacccgcuagucuuucccagcgaugaguucgacgcguccauuucacaggugaacgaaaagaucaaucagagucucgccuucaucagaaaaucugaugaacugcuucacaacguuaaugugggaaagagcacuaccaacauuaugauaacaaccaucauuaucgucauuaucgugauauugcugcuccugaucgcaguaggccuuuuucuguacugcaaagcuagguccacuccugugacauugucaaaggaccagcucagcggcauuaauaacaucgccuucucuaacugaggacuagugcaucacauuuaaaagcaucucagccuaccaugagaauaagagaaagaaaaugaagaucaauagcuuauucaucucuuuuucuuuuucguugguguaaagccaacacccugucuaaaaaacauaaauuucuuuaaucauuuugccucuuuucucugugcuucaauuaauaaaaaauggaaagaaccuagaucuaaaaaaaaaaaaaaaaaaaaaaaaaaaaaaaaaaaaaaaaaaaaaaaaaaaaaaaaaaaaaaaaugcaucccccccccccccccccccccccccccccccaaaggcucuuuucagagccaccagaauu

SEQ ID NO: 12075 - RNA, 2111 nt, Artificial Sequence
  mRNA product Design i-2 comprising derived and/or modified sequence from HRSV(Memphis-37)__AIY60640.1__F0 (opt4)
gggagaggcgcugccuacggagguggcagccaucuccuucucggcaucaagcuuaccauggagcugcccauccugaagaccaacgccaucaccaccauccuggccgccgugacccugugcuucgccagcagccagaacaucaccgaggaguucuaccagagcaccugcagcgccgugagcaagggcuaccugagcgcccugagaaccggcugguacaccagcgugaucaccaucgagcugagcaacaucaaggagaacaagugcaacggcaccgacgccaaggugaagcugaucaagcaggagcuggacaaguacaagaacgccgugaccgagcugcagcugcugaugcagagcacccccgccgccaacaacagagccagaagagagcugcccagauucaugaacuacacccugaacaacaccaagaacaacaacgugacccugagcaagaagagaaagagaagauuccugggcuuccugcugggcgugggcagcgccaucgccagcggcaucgccgugagcaaggugcugcaccuggagggcgaggugaacaagaucaagaacgcccugcugagcaccaacaaggccguggugagccugagcaacggcgugagcgugcugaccagcaaggugcuggaccugaagaacuacaucgacaagcagcugcugcccaucgugaacaagcagagcugcagcaucagcaacaucgagaccgugaucgaguuccagcagaagaacaacagacugcuggagaucaccagagaguucagcgugaacgccggcgugaccacccccgugagcaccuacaugcugaccaacagcgagcugcugagccugaucaacgacaugcccaucaccaacgaccagaagaagcugaugagcaacaacgugcagaucgugagacagcagagcuacagcaucaugagcaucaucaaggaggaggugcuggccuacguggugcagcugccccuguacggcgugaucgacacccccugcuggaagcugcacaccagcccccugugcaccaccaacaccaaggagggcagcaacaucugccugaccagaaccgacagaggcugguacugcgacaacgccggcagcgugagcuucuucccccaggccgagaccugcaaggugcagagcaacagaguguucugcgacaccaugaacagccugacccugcccagcgaggugaaccugugcaacaucgacaucuucaaccccaaguacgacugcaagaucaugaccagcaagaccgacgugagcagcagcgugaucaccagccugggcgccaucgugagcugcuacggcaagaccaagugcaccgccagcaacaagaacagaggcaucaucaagaccuucagcaacggcugcgacuacgugagcaacaagggcguggacaccgugagcgugggcaacacccuguacuacgugaacaagcaggagggcaagagccuguacgugaagggcgagcccaucaucaacuucuacgacccccugguguuccccagcgacgaguucgacgccagcaucagccaggugaacgagaagaucaaccagagccuggccuucaucagaaagagcgacgagcugcugcacaacgugaacgugggcaagagcaccaccaacaucaugaucaccaccaucaucaucgugaucaucgugauccugcugcugcugaucgccgugggccuguuccuguacugcaaggccagaagcacccccgugacccugagcaaggaccagcugagcggcaucaacaacaucgccuucagcaacugaggacuagugcaucacauuuaaaagcaucucagccuaccaugagaauaagagaaagaaaaugaagaucaauagcuuauucaucucuuuuucuuuuucguugguguaaagccaacacccugucuaaaaaacauaaauuucuuuaaucauuuugccucuuuucucugugcuucaauuaauaaaaaauggaaagaaccuagaucuaaaaaaaaaaaaaaaaaaaaaaaaaaaaaaaaaaaaaaaaaaaaaaaaaaaaaaaaaaaaaaaaugcaucccccccccccccccccccccccccccccccaaaggcucuuuucagagccaccagaauu

SEQ ID NO: 12076 - RNA, 2111 nt, Artificial Sequence
  mRNA product Design i-2 comprising derived and/or modified sequence from HRSV(Memphis-37)__AIY60640.1__F0 (opt5)
gggagaggcgcugccuacggagguggcagccaucuccuucucggcaucaagcuuaccauggagcugcccauccucaagaccaacgccauuacaacgauccuggcugccgugacccuuugcuucgcgagcucccagaauauuacagaagaguuuuaccaaucuaccuguagcgcugucuccaaaggcuaucugucugcccucagaacagggugguacaccagcguuaucacaauugaacuguccaacaucaaggagaauaaaugcaacggaaccgacgccaaggugaaacuuaucaagcaggaacuggauaaguauaaaaaugcugugacggagcuccagcugcugaugcagucuaccccugccgcuaacaaucgggcccgcagagagcucccgcgguucaugaacuacacacugaauaacaccaagaauaacaaugucacacuuagcaaaaagcgcaaaagacgguuucugggcuuccuccugggggugggauccgcgauugccagcggcaucgcuguuucuaaggugcuucaccuggaaggggaggucaacaagauuaaaaaugcccuccuguccaccaacaaggcugugguuagccugucuaacggaguguccguccucacgagcaaagugcuggaccuuaagaauuauaucgauaaacaacugcuccccauugugaacaagcagucuuguuccaucagcaauauugaaacagucaucgaguuucagcagaaaaacaaucgccugcuugagaucaccagagaauuuuccguuaacgccggcgugacaaccccugugucuaccuacaugcugacaaauagcgagcuccugucccugauuaacgacaugcccaucacgaaugaucaaaagaagcucaugagcaacaauguccagauugugcggcagcagucuuauuccaucaugagcauuaucaaagaagagguucuggcguacgugguccaacuuccucuguacggcgugaucgacacccccugcuggaagcuccauacaucuccucuguguaccacaaacaccaaagaagggagcaauauuugccuuacgcgcacagauagaggaugguauugugacaacgccggcuccguuucuuucuucccgcaggcugagaccugcaaggugcagagcaaucgggucuuuugugauaccaugaacucccugacacuccccagcgaggugaaccugugcaauaucgacauuuucaacccuaaauacgauuguaagaucaugaccucuaagacagacgucuccagcucugugauuacgucccugggggccaucguuagcugcuauggaaaaaccaagugcacagcuuccaauaaaaaccgcggcaucauuaagaccuuuucuaaugggugugauuacgugagcaacaaaggagucgacacaguguccguuggcaauacccucuauuacgugaacaagcaagaaggcaagucucuguaugucaaaggggagcccaucauuaauuucuacgacccucuuguguuucccagcgaugaguucgacgccuccaucagccaggugaacgaaaagauuaaucagucucuggccuucaucagaaaauccgaugaacuccugcacaacguuaaugucggaaagagcacgaccaacauuaugaucacaaccaucauuaucgugauuaucgugauucugcuucuccugaucgcugucggccuguuucucuacugcaaagcgcggucuacaccggugacccuguccaaggaccagcuuagcgggaucaauaacauugccuucucuaacugaggacuagugcaucacauuuaaaagcaucucagccuaccaugagaauaagagaaagaaaaugaagaucaauagcuuauucaucucuuuuucuuuuucguugguguaaagccaacacccugucuaaaaaacauaaauuucuuuaaucauuuugccucuuuucucugugcuucaauuaauaaaaaauggaaagaaccuagaucuaaaaaaaaaaaaaaaaaaaaaaaaaaaaaaaaaaaaaaaaaaaaaaaaaaaaaaaaaaaaaaaaugcaucccccccccccccccccccccccccccccccaaaggcucuuuucagagccaccagaauu

SEQ ID NO: 12077 - RNA, 2111 nt, Artificial Sequence
  mRNA product Design i-2 comprising derived and/or modified sequence from HRSV(Memphis-37)__AIY60640.1__F0 (opt6)
gggagaggcgcugccuacggagguggcagccaucuccuucucggcaucaagcuuaccauggaacugccuauucuaaaaacaaaugccauaacaacaauucuugcagcaguaacauuauguuuugcaucaucacaaaacauuacagaagaauuuuaccaauccacuugcucagccguaucaaaaggauaccuaucagccuuaagaacagguugguacaccucaguaauaaccauagaacuaucaaacauaaaagaaaacaaaugcaaugguacugaugcaaaagucaaacuaaucaaacaagaacuggacaaauacaaaaaugcaguaaccgaacuacaacuccuaaugcaauccacaccugcagccaacaacagagcaagacgcgaacuaccaagauuuaugaauuacacauuaaacaacaccaagaacaacaauguaacucucucaaaaaaaagaaaaagacgcuuucuagguuuccuccuaggcgucggaucugcaauagccucaggaauagcaguaucaaaaguucuacaccuagaaggagaaguaaacaaaauuaaaaacgcauuacuaucaaccaacaaagcaguuguaucccuuucaaauggagucucuguacuuacaucaaaaguacucgaccuaaaaaacuauauagacaaacaacuacucccaauagucaauaagcaaucaugcagcauaucaaacauagaaacaguuauagaauuucaacaaaaaaacaacagacuacucgaaauaaccagagaauuuagcgucaacgcaggcguaaccacaccgguauccacauacaugcuuacaaacucagaacuccucucacuaauaaacgacaugccaauaacuaaugaccaaaaaaaacuaaugucaaacaauguccaaauaguccgucaacaaucauacucaauaaugucaauaauaaaagaagaaguauuagcauauguaguccaacuaccauuauacggcguuauagacacaccuuguuggaaacuucacacauccccacucuguacaaccaacacaaaagaagguuccaauauaugccuaacuagaaccgacagaggaugguauugcgacaacgcaggaucuguaucauucuuuccccaagcagaaacauguaaaguacaaaguaaccgcguauucugcgacaccaugaacucauuaacccucccauccgaaguuaauuuaugcaauauagacauauuuaauccuaaauacgacugcaaaauaaugacaucaaaaacagacguuaguuccuccguaaucacaucuuugggcgcaauagucucaugcuauggaaaaacaaaaugcacagccucaaacaaaaauagaggaauaauaaaaacauucagcaacggcugugauuauguauccaacaaaggaguagacacaguauccguaggcaauacccuuuacuacguuaauaaacaagaaggaaaaucauuauacgucaaaggagaaccuaucauaaauuucuacgacccauuaguauucccuucagacgaauuugaugccucaauaucccaagucaaugaaaaaaucaaccaaucacuagccuuuauccgcaaaucagacgaauuacuacacaacguaaacguaggcaaaucaacaacuaauauaaugauaacaacaauaauaauaguaauuauaguaauauuauuacuacuaaucgccguagguuuauucuuauacuguaaagcacgaucaacaccaguuacacucucaaaagaucaacuaucaggaauaaacaacauagcauuuuccaauuaaggacuagugcaucacauuuaaaagcaucucagccuaccaugagaauaagagaaagaaaaugaagaucaauagcuuauucaucucuuuuucuuuuucguugguguaaagccaacacccugucuaaaaaacauaaauuucuuuaaucauuuugccucuuuucucugugcuucaauuaauaaaaaauggaaagaaccuagaucuaaaaaaaaaaaaaaaaaaaaaaaaaaaaaaaaaaaaaaaaaaaaaaaaaaaaaaaaaaaaaaaaugcaucccccccccccccccccccccccccccccccaaaggcucuuuucagagccaccagaauu

SEQ ID NO: 12078 - RNA, 2111 nt, Artificial Sequence
  mRNA product Design i-2 comprising derived and/or modified sequence from HRSV(Memphis-37)__AIY60640.1__F0 (opt11)
gggagaggcgcugccuacggagguggcagccaucuccuucucggcaucaagcuuaccauggaacuccccauccucaaaacaaacgccauaaccacuauccucgccgccgucacccucugcuucgccuccucccaaaacaucacagaggaguucuaccaauccacaugcuccgccgucuccaaaggcuaccucagcgcccuacguaccggcugguacaccagcgucaucacaauagaacucuccaacaucaaggaaaacaaaugcaacggcaccgaugccaaaguaaaacucaucaaacaagaacucgauaaauacaaaaacgccgucaccgaacuacaacuccuaaugcaaagcacacccgccgccaacaacagagcacggcgcgaacugccccgcuucaugaacuacacccucaacaacaccaaaaauaacaacgucacccuauccaagaaacgcaaacgccgauuccucgguuuccuacucggcguaggaagcgccauagccucaggcaucgccgucuccaaaguccuccaucuggaaggcgaagucaacaaaaucaaaaacgcacucuuauccaccaacaaagccgucgucucccucucgaacggggucuccguccuuaccuccaaaguccucgaccuuaaaaacuacaucgacaaacaacuacuaccaauagucaauaaacaauccugcuccaucucaaacauagaaaccgucauagaguuccaacagaagaacaaucgccuccucgaaauaacucgcgaguucuccgucaacgcaggcgucacgaccccugucucaacauacaugcuaacuaacucagaacuccuaagccuaaucaacgacaugcccaucacaaacgaccaaaagaaacucaugagcaacaauguccagauagucagacagcaauccuauagcaucaugucuauaauaaaagaagaagugcucgccuacguaguccaacucccucuuuacggcgucauagacacacccugcuggaaacuccacacaucuccucucugcaccaccaacacaaaagaaggcagcaacaucugccugacccgaaccgaccgcggaugguacugcgacaacgcuggcuccgugucuuucuuuccccaagccgaaaccugcaaaguccaguccaaccgcgucuucugcgacacaaugaacucccucacccuacccuccgaaguuaaccucugcaacaucgacaucuucaauccaaaauacgacugcaaaaucaugaccucgaaaacggacguauccuccuccgucauaacaucacuuggagccaucguuagcugcuacggaaaaaccaaauguaccgccuccaacaaaaaccgcggaauaaucaaaacauucuccaacggcugcgacuacguaagcaacaaaggggucgauacugucuccguagguaacacccuauacuacgucaacaaacaagaaggaaaaucacuauacguuaaaggcgaacccauuaucaacuucuacgacccccucguuuucccauccgacgaguucgacgccuccauaagccaaguuaacgaaaagauaaaccaaucgcucgcauucauccgcaaauccgacgaacuccuacacaacgucaacgugggcaaauccacaacaaacaucaugaucaccaccaucauuaucgucauaauagucauccuccuccugcucaucgccgugggacuauuccuauacugcaaagcccgcucgacgcccgucacacuuuccaaagaccaacuaagcggaaucaacaacauagcguucagcaauuaaggacuagugcaucacauuuaaaagcaucucagccuaccaugagaauaagagaaagaaaaugaagaucaauagcuuauucaucucuuuuucuuuuucguugguguaaagccaacacccugucuaaaaaacauaaauuucuuuaaucauuuugccucuuuucucugugcuucaauuaauaaaaaauggaaagaaccuagaucuaaaaaaaaaaaaaaaaaaaaaaaaaaaaaaaaaaaaaaaaaaaaaaaaaaaaaaaaaaaaaaaaugcaucccccccccccccccccccccccccccccccaaaggcucuuuucagagccaccagaauu

SEQ ID NO: 12079 - RNA, 2107 nt, Artificial Sequence
  mRNA product Design i-2 comprising derived and/or modified sequence from HRSV(Memphis-37)__AIY60640.1__F0 (wt)
ggggcgcugccuacggagguggcagccaucuccuucucggcaucaagcuuaccauggaguugccaauccucaaaacaaaugcaauuaccacaauccuugcugcagucacacucuguuucgcuuccagucaaaacaucacugaagaauuuuaucaaucaacaugcagugcaguuagcaaaggcuaucuuagugcuuuaagaacugguugguauacuaguguuauaacuauagaauuaaguaauaucaaggaaaauaaguguaauggaacagaugcuaagguaaaauugauaaaacaagaauuagauaaauauaaaaaugcuguaacagaauugcaguugcucaugcaaagcacaccagcagccaacaaucgagccagaagagaacuaccaagguuuaugaauuauacacucaacaauaccaaaaauaacaauguaacauuaagcaagaaaaggaaaagaagauuucuuggcuuuuuguuagguguuggaucugcaaucgccaguggcauugcuguaucuaaaguccugcaccuagaaggggaagugaacaaaaucaaaaaugcucuacuauccacaaacaaggcuguagucagcuuaucaaauggaguuagugucuuaaccagcaaaguguuagaccucaaaaacuauauagauaaacaguuguuacccauugugaacaagcaaagcugcagcauaucaaacauugaaacugugauagaauuccaacaaaagaacaacagacuacuagagauuaccagggaauuuaguguuaaugcagguguaacuacaccuguaagcacuuauauguuaacaaauagugaauuauuaucauuaaucaaugauaugccuauaacaaaugaucagaaaaaguuaauguccaacaauguucaaauaguuagacagcaaaguuacucuaucauguccauaauaaaggaggaagucuuagcauauguaguucaauuaccacuauaugguguaauagauacaccuuguuggaaacuacacacauccccucuaugcacaaccaacacaaaggaaggguccaacaucuguuuaacaagaaccgacagaggaugguacugugacaaugcaggaucagugucuuucuucccacaagcugaaacaugcaaaguucaaucgaaucgaguauuuugugacacaaugaacagucuaacauuaccaagugaaguaaaucucugcaacauugacauauucaacccuaaauaugauugcaaaauuaugacuucaaaaacagaugugagcagcuccguuaucacaucucuaggagccauugugucaugcuauggcaaaacuaaauguacagcauccaauaaaaaucguggaaucauaaagacauuuucuaacgggugugauuauguaucaaauaaggggguggacacuguaucuguagguaauacauuauauuauguaaauaagcaagaaggaaaaagccucuauguaaaaggugaaccaauaauaaauuucuaugacccauuaguguucccuucugaugaauuugaugcaucaauaucucaagucaaugagaagauuaaccagagccuagcauuuauucguaaauccgaugaauuauuacauaauguaaauguugguaaauccaccacaaauaucaugauaacuacuauaauuauagugauuauaguaauauuguuauuauuaauugcaguugggcuguuccuauacugcaaggccagaagcacaccagucacacuaagcaaggaucaacugagugguauaaauaauauugcauuuaguaacugaggacuagugcaucacauuuaaaagcaucucagccuaccaugagaauaagagaaagaaaaugaagaucaauagcuuauucaucucuuuuucuuuuucguugguguaaagccaacacccugucuaaaaaacauaaauuucuuuaaucauuuugccucuuuucucugugcuucaauuaauaaaaaauggaaagaaccuagaucuaaaaaaaaaaaaaaaaaaaaaaaaaaaaaaaaaaaaaaaaaaaaaaaaaaaaaaaaaaaaaaaaugcaucccccccccccccccccccccccccccccccaaaggcucuuuucagagccaccagaauu

SEQ ID NO: 12080 - RNA, 2107 nt, Artificial Sequence
  mRNA product Design i-2 comprising derived and/or modified sequence from HRSV(Memphis-37)__AIY60640.1__F0 (opt1)
ggggcgcugccuacggagguggcagccaucuccuucucggcaucaagcuuaccauggagcugcccauccucaagaccaacgccaucaccacgauccuggccgcggugacccugugcuucgccagcucccagaacaucaccgaggaguucuaccagagcacgugcuccgccgucagcaagggcuaccucuccgcccugcgcaccgggugguacaccagcgugaucaccaucgagcuguccaacaucaaggagaacaagugcaacggcaccgacgccaaggugaagcucaucaagcaggagcuggacaaguacaagaacgcggucacggagcugcagcuccugaugcagagcaccccggccgccaacaaccgggcccgccgggagcugccccgcuucaugaacuacacccucaacaacaccaagaacaacaacgugacgcuguccaagaagcggaagcgccgguuccugggguuccuccugggcguggggagcgcgaucgccuccggcaucgccgucagcaaggugcugcaccucgagggcgaggugaacaagaucaagaacgcccugcuguccaccaacaaggccgucgugagccucuccaacggggugagcguccugaccuccaaggugcuggaccucaagaacuacaucgacaagcagcugcugcccaucgugaacaagcagagcugcuccaucagcaacaucgagaccgucaucgaguuccagcagaagaacaaccgccuccuggagaucacgcgggaguucagcgugaacgcgggcgugaccacccccgucuccaccuacaugcugacgaacagcgagcuccugucccugaucaacgacaugccgaucaccaacgaccagaagaagcucaugagcaacaacgugcagaucgugcgccagcaguccuacagcaucauguccaucaucaaggaggagguccuggccuacguggugcagcugccccucuacggggucaucgacacccccugcuggaagcugcacaccagcccccugugcacgaccaacaccaaggagggcuccaacaucugccucacccggacggaccgcgggugguacugcgacaacgccggcagcguguccuucuucccgcaggccgagaccugcaagguccagagcaaccggguguucugcgacaccaugaacucccugacccugcccagcgaggugaaccucugcaacaucgacaucuucaaccccaaguacgacugcaagaucaugacguccaagaccgacgucagcuccagcgugaucaccucccugggcgccaucgugagcugcuacgggaagaccaagugcacggcgagcaacaagaaccgcggcaucaucaagaccuucuccaacgggugcgacuacgucagcaacaagggcguggacaccguguccgucggcaacacccuguacuacgugaacaagcaggagggcaagagccucuacgugaagggggagcccaucaucaacuucuacgacccgcuggucuuccccuccgacgaguucgacgccagcaucucccaggugaacgagaagaucaaccagagccuggccuucauccggaaguccgacgagcuccugcacaacgugaacgucggcaagagcaccacgaacaucaugaucaccaccaucaucaucgugaucaucgugauccugcugcuccugaucgccgucgggcuguuccucuacugcaaggcccgcuccacccccgugacgcugagcaaggaccagcuguccgggaucaacaacaucgcguucagcaacugaggacuagugcaucacauuuaaaagcaucucagccuaccaugagaauaagagaaagaaaaugaagaucaauagcuuauucaucucuuuuucuuuuucguugguguaaagccaacacccugucuaaaaaacauaaauuucuuuaaucauuuugccucuuuucucugugcuucaauuaauaaaaaauggaaagaaccuagaucuaaaaaaaaaaaaaaaaaaaaaaaaaaaaaaaaaaaaaaaaaaaaaaaaaaaaaaaaaaaaaaaaugcaucccccccccccccccccccccccccccccccaaaggcucuuuucagagccaccagaauu

SEQ ID NO: 12081 - RNA, 2107 nt, Artificial Sequence
  mRNA product Design i-2 comprising derived and/or modified sequence from HRSV(Memphis-37)__AIY60640.1__F0 (opt2)
ggggcgcugccuacggagguggcagccaucuccuucucggcaucaagcuuaccauggagcuccccauccucaagaccaacgccaucaccaccauccucgccgccgucacccucugcuucgccuccucccagaacaucaccgaggaguucuaccaguccaccugcuccgccgucuccaagggcuaccucuccgcccuccgcaccggcugguacaccuccgucaucaccaucgagcucuccaacaucaaggagaacaagugcaacggcaccgacgccaaggucaagcucaucaagcaggagcucgacaaguacaagaacgccgucaccgagcuccagcuccucaugcaguccacccccgccgccaacaaccgcgcccgccgcgagcucccccgcuucaugaacuacacccucaacaacaccaagaacaacaacgucacccucuccaagaagcgcaagcgccgcuuccucggcuuccuccucggcgucggcuccgccaucgccuccggcaucgccgucuccaagguccuccaccucgagggcgaggucaacaagaucaagaacgcccuccucuccaccaacaaggccgucgucucccucuccaacggcgucuccguccucaccuccaagguccucgaccucaagaacuacaucgacaagcagcuccuccccaucgucaacaagcaguccugcuccaucuccaacaucgagaccgucaucgaguuccagcagaagaacaaccgccuccucgagaucacccgcgaguucuccgucaacgccggcgucaccacccccgucuccaccuacaugcucaccaacuccgagcuccucucccucaucaacgacaugcccaucaccaacgaccagaagaagcucauguccaacaacguccagaucguccgccagcaguccuacuccaucauguccaucaucaaggaggagguccucgccuacgucguccagcucccccucuacggcgucaucgacacccccugcuggaagcuccacaccuccccccucugcaccaccaacaccaaggagggcuccaacaucugccucacccgcaccgaccgcggcugguacugcgacaacgccggcuccgucuccuucuucccccaggccgagaccugcaagguccaguccaaccgcgucuucugcgacaccaugaacucccucacccuccccuccgaggucaaccucugcaacaucgacaucuucaaccccaaguacgacugcaagaucaugaccuccaagaccgacgucuccuccuccgucaucaccucccucggcgccaucgucuccugcuacggcaagaccaagugcaccgccuccaacaagaaccgcggcaucaucaagaccuucuccaacggcugcgacuacgucuccaacaagggcgucgacaccgucuccgucggcaacacccucuacuacgucaacaagcaggagggcaagucccucuacgucaagggcgagcccaucaucaacuucuacgacccccucgucuuccccuccgacgaguucgacgccuccaucucccaggucaacgagaagaucaaccagucccucgccuucauccgcaaguccgacgagcuccuccacaacgucaacgucggcaaguccaccaccaacaucaugaucaccaccaucaucaucgucaucaucgucauccuccuccuccucaucgccgucggccucuuccucuacugcaaggcccgcuccacccccgucacccucuccaaggaccagcucuccggcaucaacaacaucgccuucuccaacugaggacuagugcaucacauuuaaaagcaucucagccuaccaugagaauaagagaaagaaaaugaagaucaauagcuuauucaucucuuuuucuuuuucguugguguaaagccaacacccugucuaaaaaacauaaauuucuuuaaucauuuugccucuuuucucugugcuucaauuaauaaaaaauggaaagaaccuagaucuaaaaaaaaaaaaaaaaaaaaaaaaaaaaaaaaaaaaaaaaaaaaaaaaaaaaaaaaaaaaaaaaugcaucccccccccccccccccccccccccccccccaaaggcucuuuucagagccaccagaauu

SEQ ID NO: 12082 - RNA, 2107 nt, Artificial Sequence
  mRNA product Design i-2 comprising derived and/or modified sequence from HRSV(Memphis-37)__AIY60640.1__F0 (opt3)
ggggcgcugccuacggagguggcagccaucuccuucucggcaucaagcuuaccauggagcugcccauccucaagaccaacgccauuacaacuauacuugcugcagugacgcugugcuucgccagcucccagaauaucaccgaagaguuuuaccaaucuacauguucagcggucaguaaaggcuauuugagcgcuuuaagaacugggugguacaccuccguuauuacaaucgaacugucuaacauuaaggagaauaaaugcaacggaaccgacgccaaggugaaacuaaucaagcaggaacucgauaaguauaaaaaugcaguaacugagcugcagcuucugaugcagucgaccccugccgcuaacaauagggcacggcgcgaguugccacgauucaugaacuacacacucaauaacacgaagaauaacaaugugacucugagcaaaaagcguaaaagaagguuucuggguuuccucuuaggcgucgggucagccauagcuaguggaaucgccguguccaagguucugcaccuugaaggcgaggugaacaagauuaaaaaugcguugcugucuaccaacaaggcagucgugagccuauccaacgguguaucaguucucacaaguaaagugcuggaccuuaagaauuauaucgauaaacaacuguugccgauugucaacaagcagagcuguucuaucuccaauauagaaacugugauugaguuucagcagaaaaacaaucggcuccuggagaucacccgcgaguucucagugaacgccggggucacaacccccguuagcacguacauguuaacuaauagugaacugcucucucuuauuaacgacaugccuaucacaaaugaucaaaagaagcugauguccaacaaugugcagaucguaagacagcagagcuauucgauuaugucuauaaucaaagaagagguguuggcuuacgucgugcaacuaccacuguacggaguuauugacacccccugcuggaagcuccauacuuccccucuguguacaaccaacacgaaagaaggcucaaauaucugccuuaccaggacagaucggggcugguauugugacaacgccgggagugugagcuuuuucccacaggcagagacuugcaagguccaguccaaucgcguguuuugugauaccaugaacucucugacauugcccagcgagguaaaccucugcaauauagacauuuucaacccuaaauacgauuguaagaucaugacuucaaagaccgacguuaguuccagcgugaucacaucucugggagcuauugucucaugcuaugguaaaaccaagugcacugccaguaauaaaaaccgaggcaucauuaagacguuuagcaaugggugugauuacguguccaacaaaggagucgacacagugucuguuggcaauaccuuauauuacgugaacaagcaagaagguaagucgcuguauguaaaaggggagccaauaaucaauuucuacgacccgcuagucuuucccagcgaugaguucgacgcguccauuucacaggugaacgaaaagaucaaucagagucucgccuucaucagaaaaucugaugaacugcuucacaacguuaaugugggaaagagcacuaccaacauuaugauaacaaccaucauuaucgucauuaucgugauauugcugcuccugaucgcaguaggccuuuuucuguacugcaaagcuagguccacuccugugacauugucaaaggaccagcucagcggcauuaauaacaucgccuucucuaacugaggacuagugcaucacauuuaaaagcaucucagccuaccaugagaauaagagaaagaaaaugaagaucaauagcuuauucaucucuuuuucuuuuucguugguguaaagccaacacccugucuaaaaaacauaaauuucuuuaaucauuuugccucuuuucucugugcuucaauuaauaaaaaauggaaagaaccuagaucuaaaaaaaaaaaaaaaaaaaaaaaaaaaaaaaaaaaaaaaaaaaaaaaaaaaaaaaaaaaaaaaaugcaucccccccccccccccccccccccccccccccaaaggcucuuuucagagccaccagaauu

SEQ ID NO: 12083 - RNA, 2107 nt, Artificial Sequence
  mRNA product Design i-2 comprising derived and/or modified sequence from HRSV(Memphis-37)__AIY60640.1__F0 (opt4)
ggggcgcugccuacggagguggcagccaucuccuucucggcaucaagcuuaccauggagcugcccauccugaagaccaacgccaucaccaccauccuggccgccgugacccugugcuucgccagcagccagaacaucaccgaggaguucuaccagagcaccugcagcgccgugagcaagggcuaccugagcgcccugagaaccggcugguacaccagcgugaucaccaucgagcugagcaacaucaaggagaacaagugcaacggcaccgacgccaaggugaagcugaucaagcaggagcuggacaaguacaagaacgccgugaccgagcugcagcugcugaugcagagcacccccgccgccaacaacagagccagaagagagcugcccagauucaugaacuacacccugaacaacaccaagaacaacaacgugacccugagcaagaagagaaagagaagauuccugggcuuccugcugggcgugggcagcgccaucgccagcggcaucgccgugagcaaggugcugcaccuggagggcgaggugaacaagaucaagaacgcccugcugagcaccaacaaggccguggugagccugagcaacggcgugagcgugcugaccagcaaggugcuggaccugaagaacuacaucgacaagcagcugcugcccaucgugaacaagcagagcugcagcaucagcaacaucgagaccgugaucgaguuccagcagaagaacaacagacugcuggagaucaccagagaguucagcgugaacgccggcgugaccacccccgugagcaccuacaugcugaccaacagcgagcugcugagccugaucaacgacaugcccaucaccaacgaccagaagaagcugaugagcaacaacgugcagaucgugagacagcagagcuacagcaucaugagcaucaucaaggaggaggugcuggccuacguggugcagcugccccuguacggcgugaucgacacccccugcuggaagcugcacaccagcccccugugcaccaccaacaccaaggagggcagcaacaucugccugaccagaaccgacagaggcugguacugcgacaacgccggcagcgugagcuucuucccccaggccgagaccugcaaggugcagagcaacagaguguucugcgacaccaugaacagccugacccugcccagcgaggugaaccugugcaacaucgacaucuucaaccccaaguacgacugcaagaucaugaccagcaagaccgacgugagcagcagcgugaucaccagccugggcgccaucgugagcugcuacggcaagaccaagugcaccgccagcaacaagaacagaggcaucaucaagaccuucagcaacggcugcgacuacgugagcaacaagggcguggacaccgugagcgugggcaacacccuguacuacgugaacaagcaggagggcaagagccuguacgugaagggcgagcccaucaucaacuucuacgacccccugguguuccccagcgacgaguucgacgccagcaucagccaggugaacgagaagaucaaccagagccuggccuucaucagaaagagcgacgagcugcugcacaacgugaacgugggcaagagcaccaccaacaucaugaucaccaccaucaucaucgugaucaucgugauccugcugcugcugaucgccgugggccuguuccuguacugcaaggccagaagcacccccgugacccugagcaaggaccagcugagcggcaucaacaacaucgccuucagcaacugaggacuagugcaucacauuuaaaagcaucucagccuaccaugagaauaagagaaagaaaaugaagaucaauagcuuauucaucucuuuuucuuuuucguugguguaaagccaacacccugucuaaaaaacauaaauuucuuuaaucauuuugccucuuuucucugugcuucaauuaauaaaaaauggaaagaaccuagaucuaaaaaaaaaaaaaaaaaaaaaaaaaaaaaaaaaaaaaaaaaaaaaaaaaaaaaaaaaaaaaaaaugcaucccccccccccccccccccccccccccccccaaaggcucuuuucagagccaccagaauu

SEQ ID NO: 12084 - RNA, 2107 nt, Artificial Sequence
  mRNA product Design i-2 comprising derived and/or modified sequence from HRSV(Memphis-37)__AIY60640.1__F0 (opt5)
ggggcgcugccuacggagguggcagccaucuccuucucggcaucaagcuuaccauggagcugcccauccucaagaccaacgccauuacaacgauccuggcugccgugacccuuugcuucgcgagcucccagaauauuacagaagaguuuuaccaaucuaccuguagcgcugucuccaaaggcuaucugucugcccucagaacagggugguacaccagcguuaucacaauugaacuguccaacaucaaggagaauaaaugcaacggaaccgacgccaaggugaaacuuaucaagcaggaacuggauaaguauaaaaaugcugugacggagcuccagcugcugaugcagucuaccccugccgcuaacaaucgggcccgcagagagcucccgcgguucaugaacuacacacugaauaacaccaagaauaacaaugucacacuuagcaaaaagcgcaaaagacgguuucugggcuuccuccugggggugggauccgcgauugccagcggcaucgcuguuucuaaggugcuucaccuggaaggggaggucaacaagauuaaaaaugcccuccuguccaccaacaaggcugugguuagccugucuaacggaguguccguccucacgagcaaagugcuggaccuuaagaauuauaucgauaaacaacugcuccccauugugaacaagcagucuuguuccaucagcaauauugaaacagucaucgaguuucagcagaaaaacaaucgccugcuugagaucaccagagaauuuuccguuaacgccggcgugacaaccccugugucuaccuacaugcugacaaauagcgagcuccugucccugauuaacgacaugcccaucacgaaugaucaaaagaagcucaugagcaacaauguccagauugugcggcagcagucuuauuccaucaugagcauuaucaaagaagagguucuggcguacgugguccaacuuccucuguacggcgugaucgacacccccugcuggaagcuccauacaucuccucuguguaccacaaacaccaaagaagggagcaauauuugccuuacgcgcacagauagaggaugguauugugacaacgccggcuccguuucuuucuucccgcaggcugagaccugcaaggugcagagcaaucgggucuuuugugauaccaugaacucccugacacuccccagcgaggugaaccugugcaauaucgacauuuucaacccuaaauacgauuguaagaucaugaccucuaagacagacgucuccagcucugugauuacgucccugggggccaucguuagcugcuauggaaaaaccaagugcacagcuuccaauaaaaaccgcggcaucauuaagaccuuuucuaaugggugugauuacgugagcaacaaaggagucgacacaguguccguuggcaauacccucuauuacgugaacaagcaagaaggcaagucucuguaugucaaaggggagcccaucauuaauuucuacgacccucuuguguuucccagcgaugaguucgacgccuccaucagccaggugaacgaaaagauuaaucagucucuggccuucaucagaaaauccgaugaacuccugcacaacguuaaugucggaaagagcacgaccaacauuaugaucacaaccaucauuaucgugauuaucgugauucugcuucuccugaucgcugucggccuguuucucuacugcaaagcgcggucuacaccggugacccuguccaaggaccagcuuagcgggaucaauaacauugccuucucuaacugaggacuagugcaucacauuuaaaagcaucucagccuaccaugagaauaagagaaagaaaaugaagaucaauagcuuauucaucucuuuuucuuuuucguugguguaaagccaacacccugucuaaaaaacauaaauuucuuuaaucauuuugccucuuuucucugugcuucaauuaauaaaaaauggaaagaaccuagaucuaaaaaaaaaaaaaaaaaaaaaaaaaaaaaaaaaaaaaaaaaaaaaaaaaaaaaaaaaaaaaaaaugcaucccccccccccccccccccccccccccccccaaaggcucuuuucagagccaccagaauu

SEQ ID NO: 12085 - RNA, 2107 nt, Artificial Sequence
  mRNA product Design i-2 comprising derived and/or modified sequence from HRSV(Memphis-37)__AIY60640.1__F0 (opt6)
ggggcgcugccuacggagguggcagccaucuccuucucggcaucaagcuuaccauggaacugccuauucuaaaaacaaaugccauaacaacaauucuugcagcaguaacauuauguuuugcaucaucacaaaacauuacagaagaauuuuaccaauccacuugcucagccguaucaaaaggauaccuaucagccuuaagaacagguugguacaccucaguaauaaccauagaacuaucaaacauaaaagaaaacaaaugcaaugguacugaugcaaaagucaaacuaaucaaacaagaacuggacaaauacaaaaaugcaguaaccgaacuacaacuccuaaugcaauccacaccugcagccaacaacagagcaagacgcgaacuaccaagauuuaugaauuacacauuaaacaacaccaagaacaacaauguaacucucucaaaaaaaagaaaaagacgcuuucuagguuuccuccuaggcgucggaucugcaauagccucaggaauagcaguaucaaaaguucuacaccuagaaggagaaguaaacaaaauuaaaaacgcauuacuaucaaccaacaaagcaguuguaucccuuucaaauggagucucuguacuuacaucaaaaguacucgaccuaaaaaacuauauagacaaacaacuacucccaauagucaauaagcaaucaugcagcauaucaaacauagaaacaguuauagaauuucaacaaaaaaacaacagacuacucgaaauaaccagagaauuuagcgucaacgcaggcguaaccacaccgguauccacauacaugcuuacaaacucagaacuccucucacuaauaaacgacaugccaauaacuaaugaccaaaaaaaacuaaugucaaacaauguccaaauaguccgucaacaaucauacucaauaaugucaauaauaaaagaagaaguauuagcauauguaguccaacuaccauuauacggcguuauagacacaccuuguuggaaacuucacacauccccacucuguacaaccaacacaaaagaagguuccaauauaugccuaacuagaaccgacagaggaugguauugcgacaacgcaggaucuguaucauucuuuccccaagcagaaacauguaaaguacaaaguaaccgcguauucugcgacaccaugaacucauuaacccucccauccgaaguuaauuuaugcaauauagacauauuuaauccuaaauacgacugcaaaauaaugacaucaaaaacagacguuaguuccuccguaaucacaucuuugggcgcaauagucucaugcuauggaaaaacaaaaugcacagccucaaacaaaaauagaggaauaauaaaaacauucagcaacggcugugauuauguauccaacaaaggaguagacacaguauccguaggcaauacccuuuacuacguuaauaaacaagaaggaaaaucauuauacgucaaaggagaaccuaucauaaauuucuacgacccauuaguauucccuucagacgaauuugaugccucaauaucccaagucaaugaaaaaaucaaccaaucacuagccuuuauccgcaaaucagacgaauuacuacacaacguaaacguaggcaaaucaacaacuaauauaaugauaacaacaauaauaauaguaauuauaguaauauuauuacuacuaaucgccguagguuuauucuuauacuguaaagcacgaucaacaccaguuacacucucaaaagaucaacuaucaggaauaaacaacauagcauuuuccaauuaaggacuagugcaucacauuuaaaagcaucucagccuaccaugagaauaagagaaagaaaaugaagaucaauagcuuauucaucucuuuuucuuuuucguugguguaaagccaacacccugucuaaaaaacauaaauuucuuuaaucauuuugccucuuuucucugugcuucaauuaauaaaaaauggaaagaaccuagaucuaaaaaaaaaaaaaaaaaaaaaaaaaaaaaaaaaaaaaaaaaaaaaaaaaaaaaaaaaaaaaaaaugcaucccccccccccccccccccccccccccccccaaaggcucuuuucagagccaccagaauu

SEQ ID NO: 12086 - RNA, 2107 nt, Artificial Sequence
  mRNA product Design i-2 comprising derived and/or modified sequence from HRSV(Memphis-37)__AIY60640.1__F0 (opt11)
ggggcgcugccuacggagguggcagccaucuccuucucggcaucaagcuuaccauggaacuccccauccucaaaacaaacgccauaaccacuauccucgccgccgucacccucugcuucgccuccucccaaaacaucacagaggaguucuaccaauccacaugcuccgccgucuccaaaggcuaccucagcgcccuacguaccggcugguacaccagcgucaucacaauagaacucuccaacaucaaggaaaacaaaugcaacggcaccgaugccaaaguaaaacucaucaaacaagaacucgauaaauacaaaaacgccgucaccgaacuacaacuccuaaugcaaagcacacccgccgccaacaacagagcacggcgcgaacugccccgcuucaugaacuacacccucaacaacaccaaaaauaacaacgucacccuauccaagaaacgcaaacgccgauuccucgguuuccuacucggcguaggaagcgccauagccucaggcaucgccgucuccaaaguccuccaucuggaaggcgaagucaacaaaaucaaaaacgcacucuuauccaccaacaaagccgucgucucccucucgaacggggucuccguccuuaccuccaaaguccucgaccuuaaaaacuacaucgacaaacaacuacuaccaauagucaauaaacaauccugcuccaucucaaacauagaaaccgucauagaguuccaacagaagaacaaucgccuccucgaaauaacucgcgaguucuccgucaacgcaggcgucacgaccccugucucaacauacaugcuaacuaacucagaacuccuaagccuaaucaacgacaugcccaucacaaacgaccaaaagaaacucaugagcaacaauguccagauagucagacagcaauccuauagcaucaugucuauaauaaaagaagaagugcucgccuacguaguccaacucccucuuuacggcgucauagacacacccugcuggaaacuccacacaucuccucucugcaccaccaacacaaaagaaggcagcaacaucugccugacccgaaccgaccgcggaugguacugcgacaacgcuggcuccgugucuuucuuuccccaagccgaaaccugcaaaguccaguccaaccgcgucuucugcgacacaaugaacucccucacccuacccuccgaaguuaaccucugcaacaucgacaucuucaauccaaaauacgacugcaaaaucaugaccucgaaaacggacguauccuccuccgucauaacaucacuuggagccaucguuagcugcuacggaaaaaccaaauguaccgccuccaacaaaaaccgcggaauaaucaaaacauucuccaacggcugcgacuacguaagcaacaaaggggucgauacugucuccguagguaacacccuauacuacgucaacaaacaagaaggaaaaucacuauacguuaaaggcgaacccauuaucaacuucuacgacccccucguuuucccauccgacgaguucgacgccuccauaagccaaguuaacgaaaagauaaaccaaucgcucgcauucauccgcaaauccgacgaacuccuacacaacgucaacgugggcaaauccacaacaaacaucaugaucaccaccaucauuaucgucauaauagucauccuccuccugcucaucgccgugggacuauuccuauacugcaaagcccgcucgacgcccgucacacuuuccaaagaccaacuaagcggaaucaacaacauagcguucagcaauuaaggacuagugcaucacauuuaaaagcaucucagccuaccaugagaauaagagaaagaaaaugaagaucaauagcuuauucaucucuuuuucuuuuucguugguguaaagccaacacccugucuaaaaaacauaaauuucuuuaaucauuuugccucuuuucucugugcuucaauuaauaaaaaauggaaagaaccuagaucuaaaaaaaaaaaaaaaaaaaaaaaaaaaaaaaaaaaaaaaaaaaaaaaaaaaaaaaaaaaaaaaaugcaucccccccccccccccccccccccccccccccaaaggcucuuuucagagccaccagaauu

SEQ ID NO: 12087 - RNA, 1942 nt, Artificial Sequence
  mRNA product Design i-3 comprising derived and/or modified sequence from HRSV(Memphis-37)__AIY60640.1__F0 (wt)
gggagaaagcuuaccauggaguugccaauccucaaaacaaaugcaauuaccacaauccuugcugcagucacacucuguuucgcuuccagucaaaacaucacugaagaauuuuaucaaucaacaugcagugcaguuagcaaaggcuaucuuagugcuuuaagaacugguugguauacuaguguuauaacuauagaauuaaguaauaucaaggaaaauaaguguaauggaacagaugcuaagguaaaauugauaaaacaagaauuagauaaauauaaaaaugcuguaacagaauugcaguugcucaugcaaagcacaccagcagccaacaaucgagccagaagagaacuaccaagguuuaugaauuauacacucaacaauaccaaaaauaacaauguaacauuaagcaagaaaaggaaaagaagauuucuuggcuuuuuguuagguguuggaucugcaaucgccaguggcauugcuguaucuaaaguccugcaccuagaaggggaagugaacaaaaucaaaaaugcucuacuauccacaaacaaggcuguagucagcuuaucaaauggaguuagugucuuaaccagcaaaguguuagaccucaaaaacuauauagauaaacaguuguuacccauugugaacaagcaaagcugcagcauaucaaacauugaaacugugauagaauuccaacaaaagaacaacagacuacuagagauuaccagggaauuuaguguuaaugcagguguaacuacaccuguaagcacuuauauguuaacaaauagugaauuauuaucauuaaucaaugauaugccuauaacaaaugaucagaaaaaguuaauguccaacaauguucaaauaguuagacagcaaaguuacucuaucauguccauaauaaaggaggaagucuuagcauauguaguucaauuaccacuauaugguguaauagauacaccuuguuggaaacuacacacauccccucuaugcacaaccaacacaaaggaaggguccaacaucuguuuaacaagaaccgacagaggaugguacugugacaaugcaggaucagugucuuucuucccacaagcugaaacaugcaaaguucaaucgaaucgaguauuuugugacacaaugaacagucuaacauuaccaagugaaguaaaucucugcaacauugacauauucaacccuaaauaugauugcaaaauuaugacuucaaaaacagaugugagcagcuccguuaucacaucucuaggagccauugugucaugcuauggcaaaacuaaauguacagcauccaauaaaaaucguggaaucauaaagacauuuucuaacgggugugauuauguaucaaauaaggggguggacacuguaucuguagguaauacauuauauuauguaaauaagcaagaaggaaaaagccucuauguaaaaggugaaccaauaauaaauuucuaugacccauuaguguucccuucugaugaauuugaugcaucaauaucucaagucaaugagaagauuaaccagagccuagcauuuauucguaaauccgaugaauuauuacauaauguaaauguugguaaauccaccacaaauaucaugauaacuacuauaauuauagugauuauaguaauauuguuauuauuaauugcaguugggcuguuccuauacugcaaggccagaagcacaccagucacacuaagcaaggaucaacugagugguauaaauaauauugcauuuaguaacugaggacuaguuauaagacugacuagcccgaugggccucccaacgggcccuccuccccuccuugcaccgagauuaauaaaaaaaaaaaaaaaaaaaaaaaaaaaaaaaaaaaaaaaaaaaaaaaaaaaaaaaaaaaaaaaaugcaucccccccccccccccccccccccccccccccaaaggcucuuuucagagccaccagaauu

SEQ ID NO: 12088 - RNA, 1942 nt, Artificial Sequence
  mRNA product Design i-3 comprising derived and/or modified sequence from HRSV(Memphis-37)__AIY60640.1__F0 (opt1)
gggagaaagcuuaccauggagcugcccauccucaagaccaacgccaucaccacgauccuggccgcggugacccugugcuucgccagcucccagaacaucaccgaggaguucuaccagagcacgugcuccgccgucagcaagggcuaccucuccgcccugcgcaccgggugguacaccagcgugaucaccaucgagcuguccaacaucaaggagaacaagugcaacggcaccgacgccaaggugaagcucaucaagcaggagcuggacaaguacaagaacgcggucacggagcugcagcuccugaugcagagcaccccggccgccaacaaccgggcccgccgggagcugccccgcuucaugaacuacacccucaacaacaccaagaacaacaacgugacgcuguccaagaagcggaagcgccgguuccugggguuccuccugggcguggggagcgcgaucgccuccggcaucgccgucagcaaggugcugcaccucgagggcgaggugaacaagaucaagaacgcccugcuguccaccaacaaggccgucgugagccucuccaacggggugagcguccugaccuccaaggugcuggaccucaagaacuacaucgacaagcagcugcugcccaucgugaacaagcagagcugcuccaucagcaacaucgagaccgucaucgaguuccagcagaagaacaaccgccuccuggagaucacgcgggaguucagcgugaacgcgggcgugaccacccccgucuccaccuacaugcugacgaacagcgagcuccugucccugaucaacgacaugccgaucaccaacgaccagaagaagcucaugagcaacaacgugcagaucgugcgccagcaguccuacagcaucauguccaucaucaaggaggagguccuggccuacguggugcagcugccccucuacggggucaucgacacccccugcuggaagcugcacaccagcccccugugcacgaccaacaccaaggagggcuccaacaucugccucacccggacggaccgcgggugguacugcgacaacgccggcagcguguccuucuucccgcaggccgagaccugcaagguccagagcaaccggguguucugcgacaccaugaacucccugacccugcccagcgaggugaaccucugcaacaucgacaucuucaaccccaaguacgacugcaagaucaugacguccaagaccgacgucagcuccagcgugaucaccucccugggcgccaucgugagcugcuacgggaagaccaagugcacggcgagcaacaagaaccgcggcaucaucaagaccuucuccaacgggugcgacuacgucagcaacaagggcguggacaccguguccgucggcaacacccuguacuacgugaacaagcaggagggcaagagccucuacgugaagggggagcccaucaucaacuucuacgacccgcuggucuuccccuccgacgaguucgacgccagcaucucccaggugaacgagaagaucaaccagagccuggccuucauccggaaguccgacgagcuccugcacaacgugaacgucggcaagagcaccacgaacaucaugaucaccaccaucaucaucgugaucaucgugauccugcugcuccugaucgccgucgggcuguuccucuacugcaaggcccgcuccacccccgugacgcugagcaaggaccagcuguccgggaucaacaacaucgcguucagcaacugaggacuaguuauaagacugacuagcccgaugggccucccaacgggcccuccuccccuccuugcaccgagauuaauaaaaaaaaaaaaaaaaaaaaaaaaaaaaaaaaaaaaaaaaaaaaaaaaaaaaaaaaaaaaaaaaugcaucccccccccccccccccccccccccccccccaaaggcucuuuucagagccaccagaauu

SEQ ID NO: 12089 - RNA, 1942 nt, Artificial Sequence
  mRNA product Design i-3 comprising derived and/or modified sequence from HRSV(Memphis-37)__AIY60640.1__F0 (opt2)
gggagaaagcuuaccauggagcuccccauccucaagaccaacgccaucaccaccauccucgccgccgucacccucugcuucgccuccucccagaacaucaccgaggaguucuaccaguccaccugcuccgccgucuccaagggcuaccucuccgcccuccgcaccggcugguacaccuccgucaucaccaucgagcucuccaacaucaaggagaacaagugcaacggcaccgacgccaaggucaagcucaucaagcaggagcucgacaaguacaagaacgccgucaccgagcuccagcuccucaugcaguccacccccgccgccaacaaccgcgcccgccgcgagcucccccgcuucaugaacuacacccucaacaacaccaagaacaacaacgucacccucuccaagaagcgcaagcgccgcuuccucggcuuccuccucggcgucggcuccgccaucgccuccggcaucgccgucuccaagguccuccaccucgagggcgaggucaacaagaucaagaacgcccuccucuccaccaacaaggccgucgucucccucuccaacggcgucuccguccucaccuccaagguccucgaccucaagaacuacaucgacaagcagcuccuccccaucgucaacaagcaguccugcuccaucuccaacaucgagaccgucaucgaguuccagcagaagaacaaccgccuccucgagaucacccgcgaguucuccgucaacgccggcgucaccacccccgucuccaccuacaugcucaccaacuccgagcuccucucccucaucaacgacaugcccaucaccaacgaccagaagaagcucauguccaacaacguccagaucguccgccagcaguccuacuccaucauguccaucaucaaggaggagguccucgccuacgucguccagcucccccucuacggcgucaucgacacccccugcuggaagcuccacaccuccccccucugcaccaccaacaccaaggagggcuccaacaucugccucacccgcaccgaccgcggcugguacugcgacaacgccggcuccgucuccuucuucccccaggccgagaccugcaagguccaguccaaccgcgucuucugcgacaccaugaacucccucacccuccccuccgaggucaaccucugcaacaucgacaucuucaaccccaaguacgacugcaagaucaugaccuccaagaccgacgucuccuccuccgucaucaccucccucggcgccaucgucuccugcuacggcaagaccaagugcaccgccuccaacaagaaccgcggcaucaucaagaccuucuccaacggcugcgacuacgucuccaacaagggcgucgacaccgucuccgucggcaacacccucuacuacgucaacaagcaggagggcaagucccucuacgucaagggcgagcccaucaucaacuucuacgacccccucgucuuccccuccgacgaguucgacgccuccaucucccaggucaacgagaagaucaaccagucccucgccuucauccgcaaguccgacgagcuccuccacaacgucaacgucggcaaguccaccaccaacaucaugaucaccaccaucaucaucgucaucaucgucauccuccuccuccucaucgccgucggccucuuccucuacugcaaggcccgcuccacccccgucacccucuccaaggaccagcucuccggcaucaacaacaucgccuucuccaacugaggacuaguuauaagacugacuagcccgaugggccucccaacgggcccuccuccccuccuugcaccgagauuaauaaaaaaaaaaaaaaaaaaaaaaaaaaaaaaaaaaaaaaaaaaaaaaaaaaaaaaaaaaaaaaaaugcaucccccccccccccccccccccccccccccccaaaggcucuuuucagagccaccagaauu

SEQ ID NO: 12090 - RNA, 1942 nt, Artificial Sequence
  mRNA product Design i-3 comprising derived and/or modified sequence from HRSV(Memphis-37)__AIY60640.1__F0 (opt3)
gggagaaagcuuaccauggagcugcccauccucaagaccaacgccauuacaacuauacuugcugcagugacgcugugcuucgccagcucccagaauaucaccgaagaguuuuaccaaucuacauguucagcggucaguaaaggcuauuugagcgcuuuaagaacugggugguacaccuccguuauuacaaucgaacugucuaacauuaaggagaauaaaugcaacggaaccgacgccaaggugaaacuaaucaagcaggaacucgauaaguauaaaaaugcaguaacugagcugcagcuucugaugcagucgaccccugccgcuaacaauagggcacggcgcgaguugccacgauucaugaacuacacacucaauaacacgaagaauaacaaugugacucugagcaaaaagcguaaaagaagguuucuggguuuccucuuaggcgucgggucagccauagcuaguggaaucgccguguccaagguucugcaccuugaaggcgaggugaacaagauuaaaaaugcguugcugucuaccaacaaggcagucgugagccuauccaacgguguaucaguucucacaaguaaagugcuggaccuuaagaauuauaucgauaaacaacuguugccgauugucaacaagcagagcuguucuaucuccaauauagaaacugugauugaguuucagcagaaaaacaaucggcuccuggagaucacccgcgaguucucagugaacgccggggucacaacccccguuagcacguacauguuaacuaauagugaacugcucucucuuauuaacgacaugccuaucacaaaugaucaaaagaagcugauguccaacaaugugcagaucguaagacagcagagcuauucgauuaugucuauaaucaaagaagagguguuggcuuacgucgugcaacuaccacuguacggaguuauugacacccccugcuggaagcuccauacuuccccucuguguacaaccaacacgaaagaaggcucaaauaucugccuuaccaggacagaucggggcugguauugugacaacgccgggagugugagcuuuuucccacaggcagagacuugcaagguccaguccaaucgcguguuuugugauaccaugaacucucugacauugcccagcgagguaaaccucugcaauauagacauuuucaacccuaaauacgauuguaagaucaugacuucaaagaccgacguuaguuccagcgugaucacaucucugggagcuauugucucaugcuaugguaaaaccaagugcacugccaguaauaaaaaccgaggcaucauuaagacguuuagcaaugggugugauuacguguccaacaaaggagucgacacagugucuguuggcaauaccuuauauuacgugaacaagcaagaagguaagucgcuguauguaaaaggggagccaauaaucaauuucuacgacccgcuagucuuucccagcgaugaguucgacgcguccauuucacaggugaacgaaaagaucaaucagagucucgccuucaucagaaaaucugaugaacugcuucacaacguuaaugugggaaagagcacuaccaacauuaugauaacaaccaucauuaucgucauuaucgugauauugcugcuccugaucgcaguaggccuuuuucuguacugcaaagcuagguccacuccugugacauugucaaaggaccagcucagcggcauuaauaacaucgccuucucuaacugaggacuaguuauaagacugacuagcccgaugggccucccaacgggcccuccuccccuccuugcaccgagauuaauaaaaaaaaaaaaaaaaaaaaaaaaaaaaaaaaaaaaaaaaaaaaaaaaaaaaaaaaaaaaaaaaugcaucccccccccccccccccccccccccccccccaaaggcucuuuucagagccaccagaauu

SEQ ID NO: 12091 - RNA, 1942 nt, Artificial Sequence
  mRNA product Design i-3 comprising derived and/or modified sequence from HRSV(Memphis-37)__AIY60640.1__F0 (opt4)
gggagaaagcuuaccauggagcugcccauccugaagaccaacgccaucaccaccauccuggccgccgugacccugugcuucgccagcagccagaacaucaccgaggaguucuaccagagcaccugcagcgccgugagcaagggcuaccugagcgcccugagaaccggcugguacaccagcgugaucaccaucgagcugagcaacaucaaggagaacaagugcaacggcaccgacgccaaggugaagcugaucaagcaggagcuggacaaguacaagaacgccgugaccgagcugcagcugcugaugcagagcacccccgccgccaacaacagagccagaagagagcugcccagauucaugaacuacacccugaacaacaccaagaacaacaacgugacccugagcaagaagagaaagagaagauuccugggcuuccugcugggcgugggcagcgccaucgccagcggcaucgccgugagcaaggugcugcaccuggagggcgaggugaacaagaucaagaacgcccugcugagcaccaacaaggccguggugagccugagcaacggcgugagcgugcugaccagcaaggugcuggaccugaagaacuacaucgacaagcagcugcugcccaucgugaacaagcagagcugcagcaucagcaacaucgagaccgugaucgaguuccagcagaagaacaacagacugcuggagaucaccagagaguucagcgugaacgccggcgugaccacccccgugagcaccuacaugcugaccaacagcgagcugcugagccugaucaacgacaugcccaucaccaacgaccagaagaagcugaugagcaacaacgugcagaucgugagacagcagagcuacagcaucaugagcaucaucaaggaggaggugcuggccuacguggugcagcugccccuguacggcgugaucgacacccccugcuggaagcugcacaccagcccccugugcaccaccaacaccaaggagggcagcaacaucugccugaccagaaccgacagaggcugguacugcgacaacgccggcagcgugagcuucuucccccaggccgagaccugcaaggugcagagcaacagaguguucugcgacaccaugaacagccugacccugcccagcgaggugaaccugugcaacaucgacaucuucaaccccaaguacgacugcaagaucaugaccagcaagaccgacgugagcagcagcgugaucaccagccugggcgccaucgugagcugcuacggcaagaccaagugcaccgccagcaacaagaacagaggcaucaucaagaccuucagcaacggcugcgacuacgugagcaacaagggcguggacaccgugagcgugggcaacacccuguacuacgugaacaagcaggagggcaagagccuguacgugaagggcgagcccaucaucaacuucuacgacccccugguguuccccagcgacgaguucgacgccagcaucagccaggugaacgagaagaucaaccagagccuggccuucaucagaaagagcgacgagcugcugcacaacgugaacgugggcaagagcaccaccaacaucaugaucaccaccaucaucaucgugaucaucgugauccugcugcugcugaucgccgugggccuguuccuguacugcaaggccagaagcacccccgugacccugagcaaggaccagcugagcggcaucaacaacaucgccuucagcaacugaggacuaguuauaagacugacuagcccgaugggccucccaacgggcccuccuccccuccuugcaccgagauuaauaaaaaaaaaaaaaaaaaaaaaaaaaaaaaaaaaaaaaaaaaaaaaaaaaaaaaaaaaaaaaaaaugcaucccccccccccccccccccccccccccccccaaaggcucuuuucagagccaccagaauu

SEQ ID NO: 12092 - RNA, 1942 nt, Artificial Sequence
  mRNA product Design i-3 comprising derived and/or modified sequence from HRSV(Memphis-37)__AIY60640.1__F0 (opt5)
gggagaaagcuuaccauggagcugcccauccucaagaccaacgccauuacaacgauccuggcugccgugacccuuugcuucgcgagcucccagaauauuacagaagaguuuuaccaaucuaccuguagcgcugucuccaaaggcuaucugucugcccucagaacagggugguacaccagcguuaucacaauugaacuguccaacaucaaggagaauaaaugcaacggaaccgacgccaaggugaaacuuaucaagcaggaacuggauaaguauaaaaaugcugugacggagcuccagcugcugaugcagucuaccccugccgcuaacaaucgggcccgcagagagcucccgcgguucaugaacuacacacugaauaacaccaagaauaacaaugucacacuuagcaaaaagcgcaaaagacgguuucugggcuuccuccugggggugggauccgcgauugccagcggcaucgcuguuucuaaggugcuucaccuggaaggggaggucaacaagauuaaaaaugcccuccuguccaccaacaaggcugugguuagccugucuaacggaguguccguccucacgagcaaagugcuggaccuuaagaauuauaucgauaaacaacugcuccccauugugaacaagcagucuuguuccaucagcaauauugaaacagucaucgaguuucagcagaaaaacaaucgccugcuugagaucaccagagaauuuuccguuaacgccggcgugacaaccccugugucuaccuacaugcugacaaauagcgagcuccugucccugauuaacgacaugcccaucacgaaugaucaaaagaagcucaugagcaacaauguccagauugugcggcagcagucuuauuccaucaugagcauuaucaaagaagagguucuggcguacgugguccaacuuccucuguacggcgugaucgacacccccugcuggaagcuccauacaucuccucuguguaccacaaacaccaaagaagggagcaauauuugccuuacgcgcacagauagaggaugguauugugacaacgccggcuccguuucuuucuucccgcaggcugagaccugcaaggugcagagcaaucgggucuuuugugauaccaugaacucccugacacuccccagcgaggugaaccugugcaauaucgacauuuucaacccuaaauacgauuguaagaucaugaccucuaagacagacgucuccagcucugugauuacgucccugggggccaucguuagcugcuauggaaaaaccaagugcacagcuuccaauaaaaaccgcggcaucauuaagaccuuuucuaaugggugugauuacgugagcaacaaaggagucgacacaguguccguuggcaauacccucuauuacgugaacaagcaagaaggcaagucucuguaugucaaaggggagcccaucauuaauuucuacgacccucuuguguuucccagcgaugaguucgacgccuccaucagccaggugaacgaaaagauuaaucagucucuggccuucaucagaaaauccgaugaacuccugcacaacguuaaugucggaaagagcacgaccaacauuaugaucacaaccaucauuaucgugauuaucgugauucugcuucuccugaucgcugucggccuguuucucuacugcaaagcgcggucuacaccggugacccuguccaaggaccagcuuagcgggaucaauaacauugccuucucuaacugaggacuaguuauaagacugacuagcccgaugggccucccaacgggcccuccuccccuccuugcaccgagauuaauaaaaaaaaaaaaaaaaaaaaaaaaaaaaaaaaaaaaaaaaaaaaaaaaaaaaaaaaaaaaaaaaugcaucccccccccccccccccccccccccccccccaaaggcucuuuucagagccaccagaauu

SEQ ID NO: 12093 - RNA, 1942 nt, Artificial Sequence
  mRNA product Design i-3 comprising derived and/or modified sequence from HRSV(Memphis-37)__AIY60640.1__F0 (opt6)
gggagaaagcuuaccauggaacugccuauucuaaaaacaaaugccauaacaacaauucuugcagcaguaacauuauguuuugcaucaucacaaaacauuacagaagaauuuuaccaauccacuugcucagccguaucaaaaggauaccuaucagccuuaagaacagguugguacaccucaguaauaaccauagaacuaucaaacauaaaagaaaacaaaugcaaugguacugaugcaaaagucaaacuaaucaaacaagaacuggacaaauacaaaaaugcaguaaccgaacuacaacuccuaaugcaauccacaccugcagccaacaacagagcaagacgcgaacuaccaagauuuaugaauuacacauuaaacaacaccaagaacaacaauguaacucucucaaaaaaaagaaaaagacgcuuucuagguuuccuccuaggcgucggaucugcaauagccucaggaauagcaguaucaaaaguucuacaccuagaaggagaaguaaacaaaauuaaaaacgcauuacuaucaaccaacaaagcaguuguaucccuuucaaauggagucucuguacuuacaucaaaaguacucgaccuaaaaaacuauauagacaaacaacuacucccaauagucaauaagcaaucaugcagcauaucaaacauagaaacaguuauagaauuucaacaaaaaaacaacagacuacucgaaauaaccagagaauuuagcgucaacgcaggcguaaccacaccgguauccacauacaugcuuacaaacucagaacuccucucacuaauaaacgacaugccaauaacuaaugaccaaaaaaaacuaaugucaaacaauguccaaauaguccgucaacaaucauacucaauaaugucaauaauaaaagaagaaguauuagcauauguaguccaacuaccauuauacggcguuauagacacaccuuguuggaaacuucacacauccccacucuguacaaccaacacaaaagaagguuccaauauaugccuaacuagaaccgacagaggaugguauugcgacaacgcaggaucuguaucauucuuuccccaagcagaaacauguaaaguacaaaguaaccgcguauucugcgacaccaugaacucauuaacccucccauccgaaguuaauuuaugcaauauagacauauuuaauccuaaauacgacugcaaaauaaugacaucaaaaacagacguuaguuccuccguaaucacaucuuugggcgcaauagucucaugcuauggaaaaacaaaaugcacagccucaaacaaaaauagaggaauaauaaaaacauucagcaacggcugugauuauguauccaacaaaggaguagacacaguauccguaggcaauacccuuuacuacguuaauaaacaagaaggaaaaucauuauacgucaaaggagaaccuaucauaaauuucuacgacccauuaguauucccuucagacgaauuugaugccucaauaucccaagucaaugaaaaaaucaaccaaucacuagccuuuauccgcaaaucagacgaauuacuacacaacguaaacguaggcaaaucaacaacuaauauaaugauaacaacaauaauaauaguaauuauaguaauauuauuacuacuaaucgccguagguuuauucuuauacuguaaagcacgaucaacaccaguuacacucucaaaagaucaacuaucaggaauaaacaacauagcauuuuccaauuaaggacuaguuauaagacugacuagcccgaugggccucccaacgggcccuccuccccuccuugcaccgagauuaauaaaaaaaaaaaaaaaaaaaaaaaaaaaaaaaaaaaaaaaaaaaaaaaaaaaaaaaaaaaaaaaaugcaucccccccccccccccccccccccccccccccaaaggcucuuuucagagccaccagaauu

SEQ ID NO: 12094 - RNA, 1942 nt, Artificial Sequence
  mRNA product Design i-3 comprising derived and/or modified sequence from HRSV(Memphis-37)__AIY60640.1__F0 (opt11)
gggagaaagcuuaccauggaacuccccauccucaaaacaaacgccauaaccacuauccucgccgccgucacccucugcuucgccuccucccaaaacaucacagaggaguucuaccaauccacaugcuccgccgucuccaaaggcuaccucagcgcccuacguaccggcugguacaccagcgucaucacaauagaacucuccaacaucaaggaaaacaaaugcaacggcaccgaugccaaaguaaaacucaucaaacaagaacucgauaaauacaaaaacgccgucaccgaacuacaacuccuaaugcaaagcacacccgccgccaacaacagagcacggcgcgaacugccccgcuucaugaacuacacccucaacaacaccaaaaauaacaacgucacccuauccaagaaacgcaaacgccgauuccucgguuuccuacucggcguaggaagcgccauagccucaggcaucgccgucuccaaaguccuccaucuggaaggcgaagucaacaaaaucaaaaacgcacucuuauccaccaacaaagccgucgucucccucucgaacggggucuccguccuuaccuccaaaguccucgaccuuaaaaacuacaucgacaaacaacuacuaccaauagucaauaaacaauccugcuccaucucaaacauagaaaccgucauagaguuccaacagaagaacaaucgccuccucgaaauaacucgcgaguucuccgucaacgcaggcgucacgaccccugucucaacauacaugcuaacuaacucagaacuccuaagccuaaucaacgacaugcccaucacaaacgaccaaaagaaacucaugagcaacaauguccagauagucagacagcaauccuauagcaucaugucuauaauaaaagaagaagugcucgccuacguaguccaacucccucuuuacggcgucauagacacacccugcuggaaacuccacacaucuccucucugcaccaccaacacaaaagaaggcagcaacaucugccugacccgaaccgaccgcggaugguacugcgacaacgcuggcuccgugucuuucuuuccccaagccgaaaccugcaaaguccaguccaaccgcgucuucugcgacacaaugaacucccucacccuacccuccgaaguuaaccucugcaacaucgacaucuucaauccaaaauacgacugcaaaaucaugaccucgaaaacggacguauccuccuccgucauaacaucacuuggagccaucguuagcugcuacggaaaaaccaaauguaccgccuccaacaaaaaccgcggaauaaucaaaacauucuccaacggcugcgacuacguaagcaacaaaggggucgauacugucuccguagguaacacccuauacuacgucaacaaacaagaaggaaaaucacuauacguuaaaggcgaacccauuaucaacuucuacgacccccucguuuucccauccgacgaguucgacgccuccauaagccaaguuaacgaaaagauaaaccaaucgcucgcauucauccgcaaauccgacgaacuccuacacaacgucaacgugggcaaauccacaacaaacaucaugaucaccaccaucauuaucgucauaauagucauccuccuccugcucaucgccgugggacuauuccuauacugcaaagcccgcucgacgcccgucacacuuuccaaagaccaacuaagcggaaucaacaacauagcguucagcaauuaaggacuaguuauaagacugacuagcccgaugggccucccaacgggcccuccuccccuccuugcaccgagauuaauaaaaaaaaaaaaaaaaaaaaaaaaaaaaaaaaaaaaaaaaaaaaaaaaaaaaaaaaaaaaaaaaugcaucccccccccccccccccccccccccccccccaaaggcucuuuucagagccaccagaauu

SEQ ID NO: 12095 - protein, 553 aa, Artificial Sequence; identical to SEQ ID NO: 9653
  derived and/or modified protein sequence (wt) from HRSV(Memphis-37)__AIY60640.1__F-del

SEQ ID NO: 12096 - RNA, 1662 nt, Artificial Sequence
  derived and/or modified CDS sequence (wt) from HRSV(Memphis-37)__AIY60640.1__F-del
auggaguugccaauccucaaaacaaaugcaauuaccacaauccuugcugcagucacacucuguuucgcuuccagucaaaacaucacugaagaauuuuaucaaucaacaugcagugcaguuagcaaaggcuaucuuagugcuuuaagaacugguugguauacuaguguuauaacuauagaauuaaguaauaucaaggaaaauaaguguaauggaacagaugcuaagguaaaauugauaaaacaagaauuagauaaauauaaaaaugcuguaacagaauugcaguugcucaugcaaagcacaccagcagccaacaaucgagccagaagagaacuaccaagguuuaugaauuauacacucaacaauaccaaaaauaacaauguaacauuaagcaagaaaaggaaaagaagauuucuuggcuuuuuguuagguguuggaucugcaaucgccaguggcauugcuguaucuaaaguccugcaccuagaaggggaagugaacaaaaucaaaaaugcucuacuauccacaaacaaggcuguagucagcuuaucaaauggaguuagugucuuaaccagcaaaguguuagaccucaaaaacuauauagauaaacaguuguuacccauugugaacaagcaaagcugcagcauaucaaacauugaaacugugauagaauuccaacaaaagaacaacagacuacuagagauuaccagggaauuuaguguuaaugcagguguaacuacaccuguaagcacuuauauguuaacaaauagugaauuauuaucauuaaucaaugauaugccuauaacaaaugaucagaaaaaguuaauguccaacaauguucaaauaguuagacagcaaaguuacucuaucauguccauaauaaaggaggaagucuuagcauauguaguucaauuaccacuauaugguguaauagauacaccuuguuggaaacuacacacauccccucuaugcacaaccaacacaaaggaaggguccaacaucuguuuaacaagaaccgacagaggaugguacugugacaaugcaggaucagugucuuucuucccacaagcugaaacaugcaaaguucaaucgaaucgaguauuuugugacacaaugaacagucuaacauuaccaagugaaguaaaucucugcaacauugacauauucaacccuaaauaugauugcaaaauuaugacuucaaaaacagaugugagcagcuccguuaucacaucucuaggagccauugugucaugcuauggcaaaacuaaauguacagcauccaauaaaaaucguggaaucauaaagacauuuucuaacgggugugauuauguaucaaauaaggggguggacacuguaucuguagguaauacauuauauuauguaaauaagcaagaaggaaaaagccucuauguaaaaggugaaccaauaauaaauuucuaugacccauuaguguucccuucugaugaauuugaugcaucaauaucucaagucaaugagaagauuaaccagagccuagcauuuauucguaaauccgaugaauuauuacauaauguaaauguugguaaauccaccacaaauaucaugauaacuacuauaauuauagugauuauaguaauauuguuauuauuaauugcaguugggcuguuccuauacugcaaggccagauga

SEQ ID NO: 12097 - RNA, 1662 nt, Artificial Sequence
  derived and/or modified CDS sequence (opt1) from HRSV(Memphis-37)__AIY60640.1__F-del
auggagcugcccauccucaagaccaacgccaucaccacgauccuggccgcggugacccugugcuucgccagcucccagaacaucaccgaggaguucuaccagagcacgugcuccgccgucagcaagggcuaccucuccgcccugcgcaccgggugguacaccagcgugaucaccaucgagcuguccaacaucaaggagaacaagugcaacggcaccgacgccaaggugaagcucaucaagcaggagcuggacaaguacaagaacgcggucacggagcugcagcuccugaugcagagcaccccggccgccaacaaccgggcccgccgggagcugccccgcuucaugaacuacacccucaacaacaccaagaacaacaacgugacgcuguccaagaagcggaagcgccgguuccugggguuccuccugggcguggggagcgcgaucgccuccggcaucgccgucagcaaggugcugcaccucgagggcgaggugaacaagaucaagaacgcccugcuguccaccaacaaggccgucgugagccucuccaacggggugagcguccugaccuccaaggugcuggaccucaagaacuacaucgacaagcagcugcugcccaucgugaacaagcagagcugcuccaucagcaacaucgagaccgucaucgaguuccagcagaagaacaaccgccuccuggagaucacgcgggaguucagcgugaacgcgggcgugaccacccccgucuccaccuacaugcugacgaacagcgagcuccugucccugaucaacgacaugccgaucaccaacgaccagaagaagcucaugagcaacaacgugcagaucgugcgccagcaguccuacagcaucauguccaucaucaaggaggagguccuggccuacguggugcagcugccccucuacggggucaucgacacccccugcuggaagcugcacaccagcccccugugcacgaccaacaccaaggagggcuccaacaucugccucacccggacggaccgcgggugguacugcgacaacgccggcagcguguccuucuucccgcaggccgagaccugcaagguccagagcaaccggguguucugcgacaccaugaacucccugacccugcccagcgaggugaaccucugcaacaucgacaucuucaaccccaaguacgacugcaagaucaugacguccaagaccgacgucagcuccagcgugaucaccucccugggcgccaucgugagcugcuacgggaagaccaagugcacggcgagcaacaagaaccgcggcaucaucaagaccuucuccaacgggugcgacuacgucagcaacaagggcguggacaccguguccgucggcaacacccuguacuacgugaacaagcaggagggcaagagccucuacgugaagggggagcccaucaucaacuucuacgacccgcuggucuuccccuccgacgaguucgacgccagcaucucccaggugaacgagaagaucaaccagagccuggccuucauccggaaguccgacgagcuccugcacaacgugaacgucggcaagagcaccacgaacaucaugaucaccaccaucaucaucgugaucaucgugauccugcugcuccugaucgccgucgggcuguuccucuacugcaaggcccgcuga

SEQ ID NO: 12098 - RNA, 1662 nt, Artificial Sequence
  derived and/or modified CDS sequence (opt2) from HRSV(Memphis-37)__AIY60640.1__F-del
auggagcuccccauccucaagaccaacgccaucaccaccauccucgccgccgucacccucugcuucgccuccucccagaacaucaccgaggaguucuaccaguccaccugcuccgccgucuccaagggcuaccucuccgcccuccgcaccggcugguacaccuccgucaucaccaucgagcucuccaacaucaaggagaacaagugcaacggcaccgacgccaaggucaagcucaucaagcaggagcucgacaaguacaagaacgccgucaccgagcuccagcuccucaugcaguccacccccgccgccaacaaccgcgcccgccgcgagcucccccgcuucaugaacuacacccucaacaacaccaagaacaacaacgucacccucuccaagaagcgcaagcgccgcuuccucggcuuccuccucggcgucggcuccgccaucgccuccggcaucgccgucuccaagguccuccaccucgagggcgaggucaacaagaucaagaacgcccuccucuccaccaacaaggccgucgucucccucuccaacggcgucuccguccucaccuccaagguccucgaccucaagaacuacaucgacaagcagcuccuccccaucgucaacaagcaguccugcuccaucuccaacaucgagaccgucaucgaguuccagcagaagaacaaccgccuccucgagaucacccgcgaguucuccgucaacgccggcgucaccacccccgucuccaccuacaugcucaccaacuccgagcuccucucccucaucaacgacaugcccaucaccaacgaccagaagaagcucauguccaacaacguccagaucguccgccagcaguccuacuccaucauguccaucaucaaggaggagguccucgccuacgucguccagcucccccucuacggcgucaucgacacccccugcuggaagcuccacaccuccccccucugcaccaccaacaccaaggagggcuccaacaucugccucacccgcaccgaccgcggcugguacugcgacaacgccggcuccgucuccuucuucccccaggccgagaccugcaagguccaguccaaccgcgucuucugcgacaccaugaacucccucacccuccccuccgaggucaaccucugcaacaucgacaucuucaaccccaaguacgacugcaagaucaugaccuccaagaccgacgucuccuccuccgucaucaccucccucggcgccaucgucuccugcuacggcaagaccaagugcaccgccuccaacaagaaccgcggcaucaucaagaccuucuccaacggcugcgacuacgucuccaacaagggcgucgacaccgucuccgucggcaacacccucuacuacgucaacaagcaggagggcaagucccucuacgucaagggcgagcccaucaucaacuucuacgacccccucgucuuccccuccgacgaguucgacgccuccaucucccaggucaacgagaagaucaaccagucccucgccuucauccgcaaguccgacgagcuccuccacaacgucaacgucggcaaguccaccaccaacaucaugaucaccaccaucaucaucgucaucaucgucauccuccuccuccucaucgccgucggccucuuccucuacugcaaggcccgcuga

SEQ ID NO: 12099 - RNA, 1662 nt, Artificial Sequence
  derived and/or modified CDS sequence (opt3) from HRSV(Memphis-37)__AIY60640.1__F-del
auggagcugcccauccucaagaccaacgccauuacaacuauacuugcugcagugacgcugugcuucgccagcucccagaauaucaccgaagaguuuuaccaaucuacauguucagcggucaguaaaggcuauuugagcgcuuuaagaacugggugguacaccuccguuauuacaaucgaacugucuaacauuaaggagaauaaaugcaacggaaccgacgccaaggugaaacuaaucaagcaggaacucgauaaguauaaaaaugcaguaacugagcugcagcuucugaugcagucgaccccugccgcuaacaauagggcacggcgcgaguugccacgauucaugaacuacacacucaauaacacgaagaauaacaaugugacucugagcaaaaagcguaaaagaagguuucuggguuuccucuuaggcgucgggucagccauagcuaguggaaucgccguguccaagguucugcaccuugaaggcgaggugaacaagauuaaaaaugcguugcugucuaccaacaaggcagucgugagccuauccaacgguguaucaguucucacaaguaaagugcuggaccuuaagaauuauaucgauaaacaacuguugccgauugucaacaagcagagcuguucuaucuccaauauagaaacugugauugaguuucagcagaaaaacaaucggcuccuggagaucacccgcgaguucucagugaacgccggggucacaacccccguuagcacguacauguuaacuaauagugaacugcucucucuuauuaacgacaugccuaucacaaaugaucaaaagaagcugauguccaacaaugugcagaucguaagacagcagagcuauucgauuaugucuauaaucaaagaagagguguuggcuuacgucgugcaacuaccacuguacggaguuauugacacccccugcuggaagcuccauacuuccccucuguguacaaccaacacgaaagaaggcucaaauaucugccuuaccaggacagaucggggcugguauugugacaacgccgggagugugagcuuuuucccacaggcagagacuugcaagguccaguccaaucgcguguuuugugauaccaugaacucucugacauugcccagcgagguaaaccucugcaauauagacauuuucaacccuaaauacgauuguaagaucaugacuucaaagaccgacguuaguuccagcgugaucacaucucugggagcuauugucucaugcuaugguaaaaccaagugcacugccaguaauaaaaaccgaggcaucauuaagacguuuagcaaugggugugauuacguguccaacaaaggagucgacacagugucuguuggcaauaccuuauauuacgugaacaagcaagaagguaagucgcuguauguaaaaggggagccaauaaucaauuucuacgacccgcuagucuuucccagcgaugaguucgacgcguccauuucacaggugaacgaaaagaucaaucagagucucgccuucaucagaaaaucugaugaacugcuucacaacguuaaugugggaaagagcacuaccaacauuaugauaacaaccaucauuaucgucauuaucgugauauugcugcuccugaucgcaguaggccuuuuucuguacugcaaagcuagguga

SEQ ID NO: 12100 - RNA, 1662 nt, Artificial Sequence
  derived and/or modified CDS sequence (opt4) from HRSV(Memphis-37)__AIY60640.1__F-del
auggagcugcccauccugaagaccaacgccaucaccaccauccuggccgccgugacccugugcuucgccagcagccagaacaucaccgaggaguucuaccagagcaccugcagcgccgugagcaagggcuaccugagcgcccugagaaccggcugguacaccagcgugaucaccaucgagcugagcaacaucaaggagaacaagugcaacggcaccgacgccaaggugaagcugaucaagcaggagcuggacaaguacaagaacgccgugaccgagcugcagcugcugaugcagagcacccccgccgccaacaacagagccagaagagagcugcccagauucaugaacuacacccugaacaacaccaagaacaacaacgugacccugagcaagaagagaaagagaagauuccugggcuuccugcugggcgugggcagcgccaucgccagcggcaucgccgugagcaaggugcugcaccuggagggcgaggugaacaagaucaagaacgcccugcugagcaccaacaaggccguggugagccugagcaacggcgugagcgugcugaccagcaaggugcuggaccugaagaacuacaucgacaagcagcugcugcccaucgugaacaagcagagcugcagcaucagcaacaucgagaccgugaucgaguuccagcagaagaacaacagacugcuggagaucaccagagaguucagcgugaacgccggcgugaccacccccgugagcaccuacaugcugaccaacagcgagcugcugagccugaucaacgacaugcccaucaccaacgaccagaagaagcugaugagcaacaacgugcagaucgugagacagcagagcuacagcaucaugagcaucaucaaggaggaggugcuggccuacguggugcagcugccccuguacggcgugaucgacacccccugcuggaagcugcacaccagcccccugugcaccaccaacaccaaggagggcagcaacaucugccugaccagaaccgacagaggcugguacugcgacaacgccggcagcgugagcuucuucccccaggccgagaccugcaaggugcagagcaacagaguguucugcgacaccaugaacagccugacccugcccagcgaggugaaccugugcaacaucgacaucuucaaccccaaguacgacugcaagaucaugaccagcaagaccgacgugagcagcagcgugaucaccagccugggcgccaucgugagcugcuacggcaagaccaagugcaccgccagcaacaagaacagaggcaucaucaagaccuucagcaacggcugcgacuacgugagcaacaagggcguggacaccgugagcgugggcaacacccuguacuacgugaacaagcaggagggcaagagccuguacgugaagggcgagcccaucaucaacuucuacgacccccugguguuccccagcgacgaguucgacgccagcaucagccaggugaacgagaagaucaaccagagccuggccuucaucagaaagagcgacgagcugcugcacaacgugaacgugggcaagagcaccaccaacaucaugaucaccaccaucaucaucgugaucaucgugauccugcugcugcugaucgccgugggccuguuccuguacugcaaggccagauga

SEQ ID NO: 12101 - RNA, 1662 nt, Artificial Sequence
  derived and/or modified CDS sequence (opt5) from HRSV(Memphis-37)__AIY60640.1__F-del
auggagcugcccauccucaagaccaacgccauuacaacgauccuggcugccgugacccuuugcuucgcgagcucccagaauauuacagaagaguuuuaccaaucuaccuguagcgcugucuccaaaggcuaucugucugcccucagaacagggugguacaccagcguuaucacaauugaacuguccaacaucaaggagaauaaaugcaacggaaccgacgccaaggugaaacuuaucaagcaggaacuggauaaguauaaaaaugcugugacggagcuccagcugcugaugcagucuaccccugccgcuaacaaucgggcccgcagagagcucccgcgguucaugaacuacacacugaauaacaccaagaauaacaaugucacacuuagcaaaaagcgcaaaagacgguuucugggcuuccuccugggggugggauccgcgauugccagcggcaucgcuguuucuaaggugcuucaccuggaaggggaggucaacaagauuaaaaaugcccuccuguccaccaacaaggcugugguuagccugucuaacggaguguccguccucacgagcaaagugcuggaccuuaagaauuauaucgauaaacaacugcuccccauugugaacaagcagucuuguuccaucagcaauauugaaacagucaucgaguuucagcagaaaaacaaucgccugcuugagaucaccagagaauuuuccguuaacgccggcgugacaaccccugugucuaccuacaugcugacaaauagcgagcuccugucccugauuaacgacaugcccaucacgaaugaucaaaagaagcucaugagcaacaauguccagauugugcggcagcagucuuauuccaucaugagcauuaucaaagaagagguucuggcguacgugguccaacuuccucuguacggcgugaucgacacccccugcuggaagcuccauacaucuccucuguguaccacaaacaccaaagaagggagcaauauuugccuuacgcgcacagauagaggaugguauugugacaacgccggcuccguuucuuucuucccgcaggcugagaccugcaaggugcagagcaaucgggucuuuugugauaccaugaacucccugacacuccccagcgaggugaaccugugcaauaucgacauuuucaacccuaaauacgauuguaagaucaugaccucuaagacagacgucuccagcucugugauuacgucccugggggccaucguuagcugcuauggaaaaaccaagugcacagcuuccaauaaaaaccgcggcaucauuaagaccuuuucuaaugggugugauuacgugagcaacaaaggagucgacacaguguccguuggcaauacccucuauuacgugaacaagcaagaaggcaagucucuguaugucaaaggggagcccaucauuaauuucuacgacccucuuguguuucccagcgaugaguucgacgccuccaucagccaggugaacgaaaagauuaaucagucucuggccuucaucagaaaauccgaugaacuccugcacaacguuaaugucggaaagagcacgaccaacauuaugaucacaaccaucauuaucgugauuaucgugauucugcuucuccugaucgcugucggccuguuucucuacugcaaagcgcgguga

SEQ ID NO: 12102 - RNA, 1662 nt, Artificial Sequence
  derived and/or modified CDS sequence (opt6) from HRSV(Memphis-37)__AIY60640.1__F-del
auggaacucccaauauuaaaaacuaacgcaaucacaaccauauuagcagccgucacucuaugcuuugccuccucacaaaauauaacagaagaauuuuaccaauccacaugcucagccguuagcaaaggauaucuaucagcccuaagaacaggcugguauacuucaguaauaacaauagaacuaucaaauauaaaagaaaacaaaugcaacggaaccgacgcuaaaguaaagcucauaaaacaagaauuagacaaauacaaaaaugcaguaacagaacuacaacuccuaaugcaaucaaccccagccgccaauaacagagcuagacgagaacuaccccgauucaugaauuacacacuaaacaacacaaaaaacaacaauguaacacucucaaaaaaaagaaaacgaagauucuuagguuuucuccugggaguaggaucagcaaucgcuuccggaaucgcagucaguaaaguccuucaccuugaaggcgaaguaaacaaaauaaaaaaugcacuacuaucuacaaauaaagcaguaguaucccuauccaauggcgucucaguauuaaccucaaaaguacucgaccuuaaaaauuauauagacaaacaauuacuacccauagucaauaaacaauccuguuccauaucaaacauagaaacaguaaucgaauuucaacaaaaaaacaacagauuacuagaaauaacacgcgaauuuucagucaacgccggaguaaccacacccgucucaacauacaugcuaaccaacuccgaacuacuaucacuuaucaacgacaugccaauaacaaaugaccaaaaaaaacucaugucaaacaacguacaaauaguccgccaacaaucauacucuauaaugucuauuaucaaagaagaaguucucgcauacguaguacaacuaccacuauauggugucauagacacaccauguuggaaacuccauacaucacccuuauguacaaccaauacaaaagaaggcucaaacaucugccuaacucgaacagaccgaggaugguacugcgacaaugcaggaucugucucauucuucccucaagcagaaacauguaaaguucaaucuaauagaguuuucugcgauacaaugaacucacuaacucuaccaucagaaguaaaucucuguaauauugacauauucaacccaaaauacgauugcaagaucaugacaucaaaaacugacguaucauccucagucaucaccucauuaggagcaaucguaagcuguuacgggaaaacaaaaugcaccgcuucuaacaaaaauagaggaauaauuaaaaccuucucaaacggaugcgauuacgucuccaauaaaggaguagauacaguaagcguaggaaauacucuauacuacgucaauaaacaagaaggaaaaucacuuuaugucaaaggagaacccauaauaaauuucuacgacccauuagucuucccaucagaugaauuugacgcauccauaucccaagucaacgaaaaaaucaaucaaucacuagcauucauacgaaaaucagacgaacuacuacacaacguuaacguaggaaaaucaacaaccaacaucaugauaaccacuauaauaaucgucauaauagucauccuauuauuacuaauagccguaggccuuuuccuauacuguaaagcuagauaa

SEQ ID NO: 12103 - RNA, 1662 nt, Artificial Sequence
  derived and/or modified CDS sequence (opt11) from HRSV(Memphis-37)__AIY60640.1__F-del
auggaacucccgauccucaaaaccaacgccaucaccacuauccucgccgccguaacccucugcuucgccucaucccaaaacaucaccgaagaauuuuaccaauccacaugcuccgccgucuccaaagguuaccucucagcccuccgcaccggcugguacaccuccguuaucaccaucgaacuuuccaacauaaaagagaacaagugcaacggcaccgacgcaaaaguaaaacuaaucaaacaagaacuagacaaauacaaaaacgccgucaccgaacuccagcuccucaugcaaucgacgcccgccgccaacaaccgagcaaggcgcgaacuuccacgcuucaugaacuacacccucaacaacacuaaaaacaacaacgugacccuauccaaaaagcguaaacgccgauuccuagguuuccuucucggugucggcuccgccauugccuccggcaucgcuguuuccaaaguccuccaccucgaaggcgaaguaaacaagauaaaaaacgcccuccucucuacaaacaaggccgugguaucgcucucuaacggcgucucuguacucaccuccaaaguccucgaccucaaaaacuacaucgacaagcaacuccucccuaucgucaauaaacaauccugcuccauuuccaacaucgaaacagugaucgaauuucaacaaaaaaacaaccgauuacuagaaaucacccgcgaauuuucagucaacgccggcgucacaacgccagucucaaccuacaugcucaccaacucagaacucuuaucacucaucaacgacaugcccaucacuaacgaccagaaaaaacugauguccaacaacgugcaaauaguccgccaacaguccuacuccaucauguccauaaucaaggaggaggugcucgccuacguaguccaacucccccucuacggagucauugacaccccuugcuggaaacuacacaccuccccucucugcaccaccaacaccaaagaaggcagcaacaucugccuaaccaggacggaccgaggaugguacugcgacaaugcaggcuccgucagcuucuucccacaagccgaaacaugcaaaguucaaucaaaccguguauucugcgacaccaugaacucacucacccuccccucagaaguaaaccuaugcaacauagauaucuucaaccccaaauacgacugcaaaauuaugaccuccaaaaccgaugucuccagcuccguuaucacgucacucggcgccaucgucuccugcuacggcaagaccaaaugcaccgccuccaacaaaaaccgcggaauaaucaaaacauucucuaacggcugcgacuacgucuccaauaaaggcgucgacaccgucuccgugggcaacacgcuguacuacgucaacaaacaagaaggcaaaucucuuuacgucaaaggugaaccaaucaucaacuucuacgacccccucguauuccccuccgacgaauuugacgcgagcaucucccaagucaacgaaaagaucaaccaaucccucgccuucauccgaaaaagcgacgaacuccuccacaacgucaacgucggcaaaaguaccacaaacauuaugaucaccaccaucaucauagucaucaucgucauccugcuccuacuaauagccgucggccucuucuuguacugcaaggcacgauga

SEQ ID NO: 12104 - RNA, 1938 nt, Artificial Sequence
  mRNA product Design a-1 comprising derived and/or modified sequence from HRSV(Memphis-37)__AIY60640.1__F-del (wt)
gggagagucccgcagucggcguccagcggcucugcuuguucgugugugugucguugcaggccuuauucaagcuuaccauggaguugccaauccucaaaacaaaugcaauuaccacaauccuugcugcagucacacucuguuucgcuuccagucaaaacaucacugaagaauuuuaucaaucaacaugcagugcaguuagcaaaggcuaucuuagugcuuuaagaacugguugguauacuaguguuauaacuauagaauuaaguaauaucaaggaaaauaaguguaauggaacagaugcuaagguaaaauugauaaaacaagaauuagauaaauauaaaaaugcuguaacagaauugcaguugcucaugcaaagcacaccagcagccaacaaucgagccagaagagaacuaccaagguuuaugaauuauacacucaacaauaccaaaaauaacaauguaacauuaagcaagaaaaggaaaagaagauuucuuggcuuuuuguuagguguuggaucugcaaucgccaguggcauugcuguaucuaaaguccugcaccuagaaggggaagugaacaaaaucaaaaaugcucuacuauccacaaacaaggcuguagucagcuuaucaaauggaguuagugucuuaaccagcaaaguguuagaccucaaaaacuauauagauaaacaguuguuacccauugugaacaagcaaagcugcagcauaucaaacauugaaacugugauagaauuccaacaaaagaacaacagacuacuagagauuaccagggaauuuaguguuaaugcagguguaacuacaccuguaagcacuuauauguuaacaaauagugaauuauuaucauuaaucaaugauaugccuauaacaaaugaucagaaaaaguuaauguccaacaauguucaaauaguuagacagcaaaguuacucuaucauguccauaauaaaggaggaagucuuagcauauguaguucaauuaccacuauaugguguaauagauacaccuuguuggaaacuacacacauccccucuaugcacaaccaacacaaaggaaggguccaacaucuguuuaacaagaaccgacagaggaugguacugugacaaugcaggaucagugucuuucuucccacaagcugaaacaugcaaaguucaaucgaaucgaguauuuugugacacaaugaacagucuaacauuaccaagugaaguaaaucucugcaacauugacauauucaacccuaaauaugauugcaaaauuaugacuucaaaaacagaugugagcagcuccguuaucacaucucuaggagccauugugucaugcuauggcaaaacuaaauguacagcauccaauaaaaaucguggaaucauaaagacauuuucuaacgggugugauuauguaucaaauaaggggguggacacuguaucuguagguaauacauuauauuauguaaauaagcaagaaggaaaaagccucuauguaaaaggugaaccaauaauaaauuucuaugacccauuaguguucccuucugaugaauuugaugcaucaauaucucaagucaaugagaagauuaaccagagccuagcauuuauucguaaauccgaugaauuauuacauaauguaaauguugguaaauccaccacaaauaucaugauaacuacuauaauuauagugauuauaguaauauuguuauuauuaauugcaguugggcuguuccuauacugcaaggccagaugaggacuagucccuguucccagagcccacuuuuuuuucuuuuuuugaaauaaaauagccugucuuucagaucuaaaaaaaaaaaaaaaaaaaaaaaaaaaaaaaaaaaaaaaaaaaaaaaaaaaaaaaaaaaaaaaaugcaucccccccccccccccccccccccccccccccaaaggcucuuuucagagccaccagaauu

SEQ ID NO: 12105 - RNA, 1938 nt, Artificial Sequence
  mRNA product Design a-1 comprising derived and/or modified sequence from HRSV(Memphis-37)__AIY60640.1__F-del (opt1)
gggagagucccgcagucggcguccagcggcucugcuuguucgugugugugucguugcaggccuuauucaagcuuaccauggagcugcccauccucaagaccaacgccaucaccacgauccuggccgcggugacccugugcuucgccagcucccagaacaucaccgaggaguucuaccagagcacgugcuccgccgucagcaagggcuaccucuccgcccugcgcaccgggugguacaccagcgugaucaccaucgagcuguccaacaucaaggagaacaagugcaacggcaccgacgccaaggugaagcucaucaagcaggagcuggacaaguacaagaacgcggucacggagcugcagcuccugaugcagagcaccccggccgccaacaaccgggcccgccgggagcugccccgcuucaugaacuacacccucaacaacaccaagaacaacaacgugacgcuguccaagaagcggaagcgccgguuccugggguuccuccugggcguggggagcgcgaucgccuccggcaucgccgucagcaaggugcugcaccucgagggcgaggugaacaagaucaagaacgcccugcuguccaccaacaaggccgucgugagccucuccaacggggugagcguccugaccuccaaggugcuggaccucaagaacuacaucgacaagcagcugcugcccaucgugaacaagcagagcugcuccaucagcaacaucgagaccgucaucgaguuccagcagaagaacaaccgccuccuggagaucacgcgggaguucagcgugaacgcgggcgugaccacccccgucuccaccuacaugcugacgaacagcgagcuccugucccugaucaacgacaugccgaucaccaacgaccagaagaagcucaugagcaacaacgugcagaucgugcgccagcaguccuacagcaucauguccaucaucaaggaggagguccuggccuacguggugcagcugccccucuacggggucaucgacacccccugcuggaagcugcacaccagcccccugugcacgaccaacaccaaggagggcuccaacaucugccucacccggacggaccgcgggugguacugcgacaacgccggcagcguguccuucuucccgcaggccgagaccugcaagguccagagcaaccggguguucugcgacaccaugaacucccugacccugcccagcgaggugaaccucugcaacaucgacaucuucaaccccaaguacgacugcaagaucaugacguccaagaccgacgucagcuccagcgugaucaccucccugggcgccaucgugagcugcuacgggaagaccaagugcacggcgagcaacaagaaccgcggcaucaucaagaccuucuccaacgggugcgacuacgucagcaacaagggcguggacaccguguccgucggcaacacccuguacuacgugaacaagcaggagggcaagagccucuacgugaagggggagcccaucaucaacuucuacgacccgcuggucuuccccuccgacgaguucgacgccagcaucucccaggugaacgagaagaucaaccagagccuggccuucauccggaaguccgacgagcuccugcacaacgugaacgucggcaagagcaccacgaacaucaugaucaccaccaucaucaucgugaucaucgugauccugcugcuccugaucgccgucgggcuguuccucuacugcaaggcccgcugaggacuagucccuguucccagagcccacuuuuuuuucuuuuuuugaaauaaaauagccugucuuucagaucuaaaaaaaaaaaaaaaaaaaaaaaaaaaaaaaaaaaaaaaaaaaaaaaaaaaaaaaaaaaaaaaaugcaucccccccccccccccccccccccccccccccaaaggcucuuuucagagccaccagaauu

SEQ ID NO: 12106 - RNA, 1938 nt, Artificial Sequence
  mRNA product Design a-1 comprising derived and/or modified sequence from HRSV(Memphis-37)__AIY60640.1__F-del (opt2)
gggagagucccgcagucggcguccagcggcucugcuuguucgugugugugucguugcaggccuuauucaagcuuaccauggagcuccccauccucaagaccaacgccaucaccaccauccucgccgccgucacccucugcuucgccuccucccagaacaucaccgaggaguucuaccaguccaccugcuccgccgucuccaagggcuaccucuccgcccuccgcaccggcugguacaccuccgucaucaccaucgagcucuccaacaucaaggagaacaagugcaacggcaccgacgccaaggucaagcucaucaagcaggagcucgacaaguacaagaacgccgucaccgagcuccagcuccucaugcaguccacccccgccgccaacaaccgcgcccgccgcgagcucccccgcuucaugaacuacacccucaacaacaccaagaacaacaacgucacccucuccaagaagcgcaagcgccgcuuccucggcuuccuccucggcgucggcuccgccaucgccuccggcaucgccgucuccaagguccuccaccucgagggcgaggucaacaagaucaagaacgcccuccucuccaccaacaaggccgucgucucccucuccaacggcgucuccguccucaccuccaagguccucgaccucaagaacuacaucgacaagcagcuccuccccaucgucaacaagcaguccugcuccaucuccaacaucgagaccgucaucgaguuccagcagaagaacaaccgccuccucgagaucacccgcgaguucuccgucaacgccggcgucaccacccccgucuccaccuacaugcucaccaacuccgagcuccucucccucaucaacgacaugcccaucaccaacgaccagaagaagcucauguccaacaacguccagaucguccgccagcaguccuacuccaucauguccaucaucaaggaggagguccucgccuacgucguccagcucccccucuacggcgucaucgacacccccugcuggaagcuccacaccuccccccucugcaccaccaacaccaaggagggcuccaacaucugccucacccgcaccgaccgcggcugguacugcgacaacgccggcuccgucuccuucuucccccaggccgagaccugcaagguccaguccaaccgcgucuucugcgacaccaugaacucccucacccuccccuccgaggucaaccucugcaacaucgacaucuucaaccccaaguacgacugcaagaucaugaccuccaagaccgacgucuccuccuccgucaucaccucccucggcgccaucgucuccugcuacggcaagaccaagugcaccgccuccaacaagaaccgcggcaucaucaagaccuucuccaacggcugcgacuacgucuccaacaagggcgucgacaccgucuccgucggcaacacccucuacuacgucaacaagcaggagggcaagucccucuacgucaagggcgagcccaucaucaacuucuacgacccccucgucuuccccuccgacgaguucgacgccuccaucucccaggucaacgagaagaucaaccagucccucgccuucauccgcaaguccgacgagcuccuccacaacgucaacgucggcaaguccaccaccaacaucaugaucaccaccaucaucaucgucaucaucgucauccuccuccuccucaucgccgucggccucuuccucuacugcaaggcccgcugaggacuagucccuguucccagagcccacuuuuuuuucuuuuuuugaaauaaaauagccugucuuucagaucuaaaaaaaaaaaaaaaaaaaaaaaaaaaaaaaaaaaaaaaaaaaaaaaaaaaaaaaaaaaaaaaaugcaucccccccccccccccccccccccccccccccaaaggcucuuuucagagccaccagaauu

SEQ ID NO: 12107 - RNA, 1938 nt, Artificial Sequence
  mRNA product Design a-1 comprising derived and/or modified sequence from HRSV(Memphis-37)__AIY60640.1__F-del (opt3)
gggagagucccgcagucggcguccagcggcucugcuuguucgugugugugucguugcaggccuuauucaagcuuaccauggagcugcccauccucaagaccaacgccauuacaacuauacuugcugcagugacgcugugcuucgccagcucccagaauaucaccgaagaguuuuaccaaucuacauguucagcggucaguaaaggcuauuugagcgcuuuaagaacugggugguacaccuccguuauuacaaucgaacugucuaacauuaaggagaauaaaugcaacggaaccgacgccaaggugaaacuaaucaagcaggaacucgauaaguauaaaaaugcaguaacugagcugcagcuucugaugcagucgaccccugccgcuaacaauagggcacggcgcgaguugccacgauucaugaacuacacacucaauaacacgaagaauaacaaugugacucugagcaaaaagcguaaaagaagguuucuggguuuccucuuaggcgucgggucagccauagcuaguggaaucgccguguccaagguucugcaccuugaaggcgaggugaacaagauuaaaaaugcguugcugucuaccaacaaggcagucgugagccuauccaacgguguaucaguucucacaaguaaagugcuggaccuuaagaauuauaucgauaaacaacuguugccgauugucaacaagcagagcuguucuaucuccaauauagaaacugugauugaguuucagcagaaaaacaaucggcuccuggagaucacccgcgaguucucagugaacgccggggucacaacccccguuagcacguacauguuaacuaauagugaacugcucucucuuauuaacgacaugccuaucacaaaugaucaaaagaagcugauguccaacaaugugcagaucguaagacagcagagcuauucgauuaugucuauaaucaaagaagagguguuggcuuacgucgugcaacuaccacuguacggaguuauugacacccccugcuggaagcuccauacuuccccucuguguacaaccaacacgaaagaaggcucaaauaucugccuuaccaggacagaucggggcugguauugugacaacgccgggagugugagcuuuuucccacaggcagagacuugcaagguccaguccaaucgcguguuuugugauaccaugaacucucugacauugcccagcgagguaaaccucugcaauauagacauuuucaacccuaaauacgauuguaagaucaugacuucaaagaccgacguuaguuccagcgugaucacaucucugggagcuauugucucaugcuaugguaaaaccaagugcacugccaguaauaaaaaccgaggcaucauuaagacguuuagcaaugggugugauuacguguccaacaaaggagucgacacagugucuguuggcaauaccuuauauuacgugaacaagcaagaagguaagucgcuguauguaaaaggggagccaauaaucaauuucuacgacccgcuagucuuucccagcgaugaguucgacgcguccauuucacaggugaacgaaaagaucaaucagagucucgccuucaucagaaaaucugaugaacugcuucacaacguuaaugugggaaagagcacuaccaacauuaugauaacaaccaucauuaucgucauuaucgugauauugcugcuccugaucgcaguaggccuuuuucuguacugcaaagcuaggugaggacuagucccuguucccagagcccacuuuuuuuucuuuuuuugaaauaaaauagccugucuuucagaucuaaaaaaaaaaaaaaaaaaaaaaaaaaaaaaaaaaaaaaaaaaaaaaaaaaaaaaaaaaaaaaaaugcaucccccccccccccccccccccccccccccccaaaggcucuuuucagagccaccagaauu

SEQ ID NO: 12108 - RNA, 1938 nt, Artificial Sequence
  mRNA product Design a-1 comprising derived and/or modified sequence from HRSV(Memphis-37)__AIY60640.1__F-del (opt4)
gggagagucccgcagucggcguccagcggcucugcuuguucgugugugugucguugcaggccuuauucaagcuuaccauggagcugcccauccugaagaccaacgccaucaccaccauccuggccgccgugacccugugcuucgccagcagccagaacaucaccgaggaguucuaccagagcaccugcagcgccgugagcaagggcuaccugagcgcccugagaaccggcugguacaccagcgugaucaccaucgagcugagcaacaucaaggagaacaagugcaacggcaccgacgccaaggugaagcugaucaagcaggagcuggacaaguacaagaacgccgugaccgagcugcagcugcugaugcagagcacccccgccgccaacaacagagccagaagagagcugcccagauucaugaacuacacccugaacaacaccaagaacaacaacgugacccugagcaagaagagaaagagaagauuccugggcuuccugcugggcgugggcagcgccaucgccagcggcaucgccgugagcaaggugcugcaccuggagggcgaggugaacaagaucaagaacgcccugcugagcaccaacaaggccguggugagccugagcaacggcgugagcgugcugaccagcaaggugcuggaccugaagaacuacaucgacaagcagcugcugcccaucgugaacaagcagagcugcagcaucagcaacaucgagaccgugaucgaguuccagcagaagaacaacagacugcuggagaucaccagagaguucagcgugaacgccggcgugaccacccccgugagcaccuacaugcugaccaacagcgagcugcugagccugaucaacgacaugcccaucaccaacgaccagaagaagcugaugagcaacaacgugcagaucgugagacagcagagcuacagcaucaugagcaucaucaaggaggaggugcuggccuacguggugcagcugccccuguacggcgugaucgacacccccugcuggaagcugcacaccagcccccugugcaccaccaacaccaaggagggcagcaacaucugccugaccagaaccgacagaggcugguacugcgacaacgccggcagcgugagcuucuucccccaggccgagaccugcaaggugcagagcaacagaguguucugcgacaccaugaacagccugacccugcccagcgaggugaaccugugcaacaucgacaucuucaaccccaaguacgacugcaagaucaugaccagcaagaccgacgugagcagcagcgugaucaccagccugggcgccaucgugagcugcuacggcaagaccaagugcaccgccagcaacaagaacagaggcaucaucaagaccuucagcaacggcugcgacuacgugagcaacaagggcguggacaccgugagcgugggcaacacccuguacuacgugaacaagcaggagggcaagagccuguacgugaagggcgagcccaucaucaacuucuacgacccccugguguuccccagcgacgaguucgacgccagcaucagccaggugaacgagaagaucaaccagagccuggccuucaucagaaagagcgacgagcugcugcacaacgugaacgugggcaagagcaccaccaacaucaugaucaccaccaucaucaucgugaucaucgugauccugcugcugcugaucgccgugggccuguuccuguacugcaaggccagaugaggacuagucccuguucccagagcccacuuuuuuuucuuuuuuugaaauaaaauagccugucuuucagaucuaaaaaaaaaaaaaaaaaaaaaaaaaaaaaaaaaaaaaaaaaaaaaaaaaaaaaaaaaaaaaaaaugcaucccccccccccccccccccccccccccccccaaaggcucuuuucagagccaccagaauu

SEQ ID NO: 12109 - RNA, 1938 nt, Artificial Sequence
  mRNA product Design a-1 comprising derived and/or modified sequence from HRSV(Memphis-37)__AIY60640.1__F-del (opt5)
gggagagucccgcagucggcguccagcggcucugcuuguucgugugugugucguugcaggccuuauucaagcuuaccauggagcugcccauccucaagaccaacgccauuacaacgauccuggcugccgugacccuuugcuucgcgagcucccagaauauuacagaagaguuuuaccaaucuaccuguagcgcugucuccaaaggcuaucugucugcccucagaacagggugguacaccagcguuaucacaauugaacuguccaacaucaaggagaauaaaugcaacggaaccgacgccaaggugaaacuuaucaagcaggaacuggauaaguauaaaaaugcugugacggagcuccagcugcugaugcagucuaccccugccgcuaacaaucgggcccgcagagagcucccgcgguucaugaacuacacacugaauaacaccaagaauaacaaugucacacuuagcaaaaagcgcaaaagacgguuucugggcuuccuccugggggugggauccgcgauugccagcggcaucgcuguuucuaaggugcuucaccuggaaggggaggucaacaagauuaaaaaugcccuccuguccaccaacaaggcugugguuagccugucuaacggaguguccguccucacgagcaaagugcuggaccuuaagaauuauaucgauaaacaacugcuccccauugugaacaagcagucuuguuccaucagcaauauugaaacagucaucgaguuucagcagaaaaacaaucgccugcuugagaucaccagagaauuuuccguuaacgccggcgugacaaccccugugucuaccuacaugcugacaaauagcgagcuccugucccugauuaacgacaugcccaucacgaaugaucaaaagaagcucaugagcaacaauguccagauugugcggcagcagucuuauuccaucaugagcauuaucaaagaagagguucuggcguacgugguccaacuuccucuguacggcgugaucgacacccccugcuggaagcuccauacaucuccucuguguaccacaaacaccaaagaagggagcaauauuugccuuacgcgcacagauagaggaugguauugugacaacgccggcuccguuucuuucuucccgcaggcugagaccugcaaggugcagagcaaucgggucuuuugugauaccaugaacucccugacacuccccagcgaggugaaccugugcaauaucgacauuuucaacccuaaauacgauuguaagaucaugaccucuaagacagacgucuccagcucugugauuacgucccugggggccaucguuagcugcuauggaaaaaccaagugcacagcuuccaauaaaaaccgcggcaucauuaagaccuuuucuaaugggugugauuacgugagcaacaaaggagucgacacaguguccguuggcaauacccucuauuacgugaacaagcaagaaggcaagucucuguaugucaaaggggagcccaucauuaauuucuacgacccucuuguguuucccagcgaugaguucgacgccuccaucagccaggugaacgaaaagauuaaucagucucuggccuucaucagaaaauccgaugaacuccugcacaacguuaaugucggaaagagcacgaccaacauuaugaucacaaccaucauuaucgugauuaucgugauucugcuucuccugaucgcugucggccuguuucucuacugcaaagcgcggugaggacuagucccuguucccagagcccacuuuuuuuucuuuuuuugaaauaaaauagccugucuuucagaucuaaaaaaaaaaaaaaaaaaaaaaaaaaaaaaaaaaaaaaaaaaaaaaaaaaaaaaaaaaaaaaaaugcaucccccccccccccccccccccccccccccccaaaggcucuuuucagagccaccagaauu

SEQ ID NO: 12110 - RNA, 1938 nt, Artificial Sequence
  mRNA product Design a-1 comprising derived and/or modified sequence from HRSV(Memphis-37)__AIY60640.1__F-del (opt6)
gggagagucccgcagucggcguccagcggcucugcuuguucgugugugugucguugcaggccuuauucaagcuuaccauggaacucccaauauuaaaaacuaacgcaaucacaaccauauuagcagccgucacucuaugcuuugccuccucacaaaauauaacagaagaauuuuaccaauccacaugcucagccguuagcaaaggauaucuaucagcccuaagaacaggcugguauacuucaguaauaacaauagaacuaucaaauauaaaagaaaacaaaugcaacggaaccgacgcuaaaguaaagcucauaaaacaagaauuagacaaauacaaaaaugcaguaacagaacuacaacuccuaaugcaaucaaccccagccgccaauaacagagcuagacgagaacuaccccgauucaugaauuacacacuaaacaacacaaaaaacaacaauguaacacucucaaaaaaaagaaaacgaagauucuuagguuuucuccugggaguaggaucagcaaucgcuuccggaaucgcagucaguaaaguccuucaccuugaaggcgaaguaaacaaaauaaaaaaugcacuacuaucuacaaauaaagcaguaguaucccuauccaauggcgucucaguauuaaccucaaaaguacucgaccuuaaaaauuauauagacaaacaauuacuacccauagucaauaaacaauccuguuccauaucaaacauagaaacaguaaucgaauuucaacaaaaaaacaacagauuacuagaaauaacacgcgaauuuucagucaacgccggaguaaccacacccgucucaacauacaugcuaaccaacuccgaacuacuaucacuuaucaacgacaugccaauaacaaaugaccaaaaaaaacucaugucaaacaacguacaaauaguccgccaacaaucauacucuauaaugucuauuaucaaagaagaaguucucgcauacguaguacaacuaccacuauauggugucauagacacaccauguuggaaacuccauacaucacccuuauguacaaccaauacaaaagaaggcucaaacaucugccuaacucgaacagaccgaggaugguacugcgacaaugcaggaucugucucauucuucccucaagcagaaacauguaaaguucaaucuaauagaguuuucugcgauacaaugaacucacuaacucuaccaucagaaguaaaucucuguaauauugacauauucaacccaaaauacgauugcaagaucaugacaucaaaaacugacguaucauccucagucaucaccucauuaggagcaaucguaagcuguuacgggaaaacaaaaugcaccgcuucuaacaaaaauagaggaauaauuaaaaccuucucaaacggaugcgauuacgucuccaauaaaggaguagauacaguaagcguaggaaauacucuauacuacgucaauaaacaagaaggaaaaucacuuuaugucaaaggagaacccauaauaaauuucuacgacccauuagucuucccaucagaugaauuugacgcauccauaucccaagucaacgaaaaaaucaaucaaucacuagcauucauacgaaaaucagacgaacuacuacacaacguuaacguaggaaaaucaacaaccaacaucaugauaaccacuauaauaaucgucauaauagucauccuauuauuacuaauagccguaggccuuuuccuauacuguaaagcuagauaaggacuagucccuguucccagagcccacuuuuuuuucuuuuuuugaaauaaaauagccugucuuucagaucuaaaaaaaaaaaaaaaaaaaaaaaaaaaaaaaaaaaaaaaaaaaaaaaaaaaaaaaaaaaaaaaaugcaucccccccccccccccccccccccccccccccaaaggcucuuuucagagccaccagaauu

SEQ ID NO: 12111 - RNA, 1938 nt, Artificial Sequence
  mRNA product Design a-1 comprising derived and/or modified sequence from HRSV(Memphis-37)__AIY60640.1__F-del (opt11)
gggagagucccgcagucggcguccagcggcucugcuuguucgugugugugucguugcaggccuuauucaagcuuaccauggaacucccgauccucaaaaccaacgccaucaccacuauccucgccgccguaacccucugcuucgccucaucccaaaacaucaccgaagaauuuuaccaauccacaugcuccgccgucuccaaagguuaccucucagcccuccgcaccggcugguacaccuccguuaucaccaucgaacuuuccaacauaaaagagaacaagugcaacggcaccgacgcaaaaguaaaacuaaucaaacaagaacuagacaaauacaaaaacgccgucaccgaacuccagcuccucaugcaaucgacgcccgccgccaacaaccgagcaaggcgcgaacuuccacgcuucaugaacuacacccucaacaacacuaaaaacaacaacgugacccuauccaaaaagcguaaacgccgauuccuagguuuccuucucggugucggcuccgccauugccuccggcaucgcuguuuccaaaguccuccaccucgaaggcgaaguaaacaagauaaaaaacgcccuccucucuacaaacaaggccgugguaucgcucucuaacggcgucucuguacucaccuccaaaguccucgaccucaaaaacuacaucgacaagcaacuccucccuaucgucaauaaacaauccugcuccauuuccaacaucgaaacagugaucgaauuucaacaaaaaaacaaccgauuacuagaaaucacccgcgaauuuucagucaacgccggcgucacaacgccagucucaaccuacaugcucaccaacucagaacucuuaucacucaucaacgacaugcccaucacuaacgaccagaaaaaacugauguccaacaacgugcaaauaguccgccaacaguccuacuccaucauguccauaaucaaggaggaggugcucgccuacguaguccaacucccccucuacggagucauugacaccccuugcuggaaacuacacaccuccccucucugcaccaccaacaccaaagaaggcagcaacaucugccuaaccaggacggaccgaggaugguacugcgacaaugcaggcuccgucagcuucuucccacaagccgaaacaugcaaaguucaaucaaaccguguauucugcgacaccaugaacucacucacccuccccucagaaguaaaccuaugcaacauagauaucuucaaccccaaauacgacugcaaaauuaugaccuccaaaaccgaugucuccagcuccguuaucacgucacucggcgccaucgucuccugcuacggcaagaccaaaugcaccgccuccaacaaaaaccgcggaauaaucaaaacauucucuaacggcugcgacuacgucuccaauaaaggcgucgacaccgucuccgugggcaacacgcuguacuacgucaacaaacaagaaggcaaaucucuuuacgucaaaggugaaccaaucaucaacuucuacgacccccucguauuccccuccgacgaauuugacgcgagcaucucccaagucaacgaaaagaucaaccaaucccucgccuucauccgaaaaagcgacgaacuccuccacaacgucaacgucggcaaaaguaccacaaacauuaugaucaccaccaucaucauagucaucaucgucauccugcuccuacuaauagccgucggccucuucuuguacugcaaggcacgaugaggacuagucccuguucccagagcccacuuuuuuuucuuuuuuugaaauaaaauagccugucuuucagaucuaaaaaaaaaaaaaaaaaaaaaaaaaaaaaaaaaaaaaaaaaaaaaaaaaaaaaaaaaaaaaaaaugcaucccccccccccccccccccccccccccccccaaaggcucuuuucagagccaccagaauu

SEQ ID NO: 12112 - RNA, 1957 nt, Artificial Sequence
  mRNA product Design a-2 comprising derived and/or modified sequence from HRSV(Memphis-37)__AIY60640.1__F-del (wt)
gggagaguccgcucagccagguugcagaagcggcuuagcguguguccuaaucuucucucugcguguagguaggccugugccgcaaacaagcuuaccauggaguugccaauccucaaaacaaaugcaauuaccacaauccuugcugcagucacacucuguuucgcuuccagucaaaacaucacugaagaauuuuaucaaucaacaugcagugcaguuagcaaaggcuaucuuagugcuuuaagaacugguugguauacuaguguuauaacuauagaauuaaguaauaucaaggaaaauaaguguaauggaacagaugcuaagguaaaauugauaaaacaagaauuagauaaauauaaaaaugcuguaacagaauugcaguugcucaugcaaagcacaccagcagccaacaaucgagccagaagagaacuaccaagguuuaugaauuauacacucaacaauaccaaaaauaacaauguaacauuaagcaagaaaaggaaaagaagauuucuuggcuuuuuguuagguguuggaucugcaaucgccaguggcauugcuguaucuaaaguccugcaccuagaaggggaagugaacaaaaucaaaaaugcucuacuauccacaaacaaggcuguagucagcuuaucaaauggaguuagugucuuaaccagcaaaguguuagaccucaaaaacuauauagauaaacaguuguuacccauugugaacaagcaaagcugcagcauaucaaacauugaaacugugauagaauuccaacaaaagaacaacagacuacuagagauuaccagggaauuuaguguuaaugcagguguaacuacaccuguaagcacuuauauguuaacaaauagugaauuauuaucauuaaucaaugauaugccuauaacaaaugaucagaaaaaguuaauguccaacaauguucaaauaguuagacagcaaaguuacucuaucauguccauaauaaaggaggaagucuuagcauauguaguucaauuaccacuauaugguguaauagauacaccuuguuggaaacuacacacauccccucuaugcacaaccaacacaaaggaaggguccaacaucuguuuaacaagaaccgacagaggaugguacugugacaaugcaggaucagugucuuucuucccacaagcugaaacaugcaaaguucaaucgaaucgaguauuuugugacacaaugaacagucuaacauuaccaagugaaguaaaucucugcaacauugacauauucaacccuaaauaugauugcaaaauuaugacuucaaaaacagaugugagcagcuccguuaucacaucucuaggagccauugugucaugcuauggcaaaacuaaauguacagcauccaauaaaaaucguggaaucauaaagacauuuucuaacgggugugauuauguaucaaauaaggggguggacacuguaucuguagguaauacauuauauuauguaaauaagcaagaaggaaaaagccucuauguaaaaggugaaccaauaauaaauuucuaugacccauuaguguucccuucugaugaauuugaugcaucaauaucucaagucaaugagaagauuaaccagagccuagcauuuauucguaaauccgaugaauuauuacauaauguaaauguugguaaauccaccacaaauaucaugauaacuacuauaauuauagugauuauaguaauauuguuauuauuaauugcaguugggcuguuccuauacugcaaggccagaugaggacuagucccuguucccagagcccacuuuuuuuucuuuuuuugaaauaaaauagccugucuuucagaucuaaaaaaaaaaaaaaaaaaaaaaaaaaaaaaaaaaaaaaaaaaaaaaaaaaaaaaaaaaaaaaaaugcaucccccccccccccccccccccccccccccccaaaggcucuuuucagagccaccagaauu

SEQ ID NO: 12113 - RNA, 1957 nt, Artificial Sequence
  mRNA product Design a-2 comprising derived and/or modified sequence from HRSV(Memphis-37)__AIY60640.1__F-del (opt1)
gggagaguccgcucagccagguugcagaagcggcuuagcguguguccuaaucuucucucugcguguagguaggccugugccgcaaacaagcuuaccauggagcugcccauccucaagaccaacgccaucaccacgauccuggccgcggugacccugugcuucgccagcucccagaacaucaccgaggaguucuaccagagcacgugcuccgccgucagcaagggcuaccucuccgcccugcgcaccgggugguacaccagcgugaucaccaucgagcuguccaacaucaaggagaacaagugcaacggcaccgacgccaaggugaagcucaucaagcaggagcuggacaaguacaagaacgcggucacggagcugcagcuccugaugcagagcaccccggccgccaacaaccgggcccgccgggagcugccccgcuucaugaacuacacccucaacaacaccaagaacaacaacgugacgcuguccaagaagcggaagcgccgguuccugggguuccuccugggcguggggagcgcgaucgccuccggcaucgccgucagcaaggugcugcaccucgagggcgaggugaacaagaucaagaacgcccugcuguccaccaacaaggccgucgugagccucuccaacggggugagcguccugaccuccaaggugcuggaccucaagaacuacaucgacaagcagcugcugcccaucgugaacaagcagagcugcuccaucagcaacaucgagaccgucaucgaguuccagcagaagaacaaccgccuccuggagaucacgcgggaguucagcgugaacgcgggcgugaccacccccgucuccaccuacaugcugacgaacagcgagcuccugucccugaucaacgacaugccgaucaccaacgaccagaagaagcucaugagcaacaacgugcagaucgugcgccagcaguccuacagcaucauguccaucaucaaggaggagguccuggccuacguggugcagcugccccucuacggggucaucgacacccccugcuggaagcugcacaccagcccccugugcacgaccaacaccaaggagggcuccaacaucugccucacccggacggaccgcgggugguacugcgacaacgccggcagcguguccuucuucccgcaggccgagaccugcaagguccagagcaaccggguguucugcgacaccaugaacucccugacccugcccagcgaggugaaccucugcaacaucgacaucuucaaccccaaguacgacugcaagaucaugacguccaagaccgacgucagcuccagcgugaucaccucccugggcgccaucgugagcugcuacgggaagaccaagugcacggcgagcaacaagaaccgcggcaucaucaagaccuucuccaacgggugcgacuacgucagcaacaagggcguggacaccguguccgucggcaacacccuguacuacgugaacaagcaggagggcaagagccucuacgugaagggggagcccaucaucaacuucuacgacccgcuggucuuccccuccgacgaguucgacgccagcaucucccaggugaacgagaagaucaaccagagccuggccuucauccggaaguccgacgagcuccugcacaacgugaacgucggcaagagcaccacgaacaucaugaucaccaccaucaucaucgugaucaucgugauccugcugcuccugaucgccgucgggcuguuccucuacugcaaggcccgcugaggacuagucccuguucccagagcccacuuuuuuuucuuuuuuugaaauaaaauagccugucuuucagaucuaaaaaaaaaaaaaaaaaaaaaaaaaaaaaaaaaaaaaaaaaaaaaaaaaaaaaaaaaaaaaaaaugcaucccccccccccccccccccccccccccccccaaaggcucuuuucagagccaccagaauu

SEQ ID NO: 12114 - RNA, 1957 nt, Artificial Sequence
  mRNA product Design a-2 comprising derived and/or modified sequence from HRSV(Memphis-37)__AIY60640.1__F-del (opt2)
gggagaguccgcucagccagguugcagaagcggcuuagcguguguccuaaucuucucucugcguguagguaggccugugccgcaaacaagcuuaccauggagcuccccauccucaagaccaacgccaucaccaccauccucgccgccgucacccucugcuucgccuccucccagaacaucaccgaggaguucuaccaguccaccugcuccgccgucuccaagggcuaccucuccgcccuccgcaccggcugguacaccuccgucaucaccaucgagcucuccaacaucaaggagaacaagugcaacggcaccgacgccaaggucaagcucaucaagcaggagcucgacaaguacaagaacgccgucaccgagcuccagcuccucaugcaguccacccccgccgccaacaaccgcgcccgccgcgagcucccccgcuucaugaacuacacccucaacaacaccaagaacaacaacgucacccucuccaagaagcgcaagcgccgcuuccucggcuuccuccucggcgucggcuccgccaucgccuccggcaucgccgucuccaagguccuccaccucgagggcgaggucaacaagaucaagaacgcccuccucuccaccaacaaggccgucgucucccucuccaacggcgucuccguccucaccuccaagguccucgaccucaagaacuacaucgacaagcagcuccuccccaucgucaacaagcaguccugcuccaucuccaacaucgagaccgucaucgaguuccagcagaagaacaaccgccuccucgagaucacccgcgaguucuccgucaacgccggcgucaccacccccgucuccaccuacaugcucaccaacuccgagcuccucucccucaucaacgacaugcccaucaccaacgaccagaagaagcucauguccaacaacguccagaucguccgccagcaguccuacuccaucauguccaucaucaaggaggagguccucgccuacgucguccagcucccccucuacggcgucaucgacacccccugcuggaagcuccacaccuccccccucugcaccaccaacaccaaggagggcuccaacaucugccucacccgcaccgaccgcggcugguacugcgacaacgccggcuccgucuccuucuucccccaggccgagaccugcaagguccaguccaaccgcgucuucugcgacaccaugaacucccucacccuccccuccgaggucaaccucugcaacaucgacaucuucaaccccaaguacgacugcaagaucaugaccuccaagaccgacgucuccuccuccgucaucaccucccucggcgccaucgucuccugcuacggcaagaccaagugcaccgccuccaacaagaaccgcggcaucaucaagaccuucuccaacggcugcgacuacgucuccaacaagggcgucgacaccgucuccgucggcaacacccucuacuacgucaacaagcaggagggcaagucccucuacgucaagggcgagcccaucaucaacuucuacgacccccucgucuuccccuccgacgaguucgacgccuccaucucccaggucaacgagaagaucaaccagucccucgccuucauccgcaaguccgacgagcuccuccacaacgucaacgucggcaaguccaccaccaacaucaugaucaccaccaucaucaucgucaucaucgucauccuccuccuccucaucgccgucggccucuuccucuacugcaaggcccgcugaggacuagucccuguucccagagcccacuuuuuuuucuuuuuuugaaauaaaauagccugucuuucagaucuaaaaaaaaaaaaaaaaaaaaaaaaaaaaaaaaaaaaaaaaaaaaaaaaaaaaaaaaaaaaaaaaugcaucccccccccccccccccccccccccccccccaaaggcucuuuucagagccaccagaauu

SEQ ID NO: 12115 - RNA, 1957 nt, Artificial Sequence
  mRNA product Design a-2 comprising derived and/or modified sequence from HRSV(Memphis-37)__AIY60640.1__F-del (opt3)
gggagaguccgcucagccagguugcagaagcggcuuagcguguguccuaaucuucucucugcguguagguaggccugugccgcaaacaagcuuaccauggagcugcccauccucaagaccaacgccauuacaacuauacuugcugcagugacgcugugcuucgccagcucccagaauaucaccgaagaguuuuaccaaucuacauguucagcggucaguaaaggcuauuugagcgcuuuaagaacugggugguacaccuccguuauuacaaucgaacugucuaacauuaaggagaauaaaugcaacggaaccgacgccaaggugaaacuaaucaagcaggaacucgauaaguauaaaaaugcaguaacugagcugcagcuucugaugcagucgaccccugccgcuaacaauagggcacggcgcgaguugccacgauucaugaacuacacacucaauaacacgaagaauaacaaugugacucugagcaaaaagcguaaaagaagguuucuggguuuccucuuaggcgucgggucagccauagcuaguggaaucgccguguccaagguucugcaccuugaaggcgaggugaacaagauuaaaaaugcguugcugucuaccaacaaggcagucgugagccuauccaacgguguaucaguucucacaaguaaagugcuggaccuuaagaauuauaucgauaaacaacuguugccgauugucaacaagcagagcuguucuaucuccaauauagaaacugugauugaguuucagcagaaaaacaaucggcuccuggagaucacccgcgaguucucagugaacgccggggucacaacccccguuagcacguacauguuaacuaauagugaacugcucucucuuauuaacgacaugccuaucacaaaugaucaaaagaagcugauguccaacaaugugcagaucguaagacagcagagcuauucgauuaugucuauaaucaaagaagagguguuggcuuacgucgugcaacuaccacuguacggaguuauugacacccccugcuggaagcuccauacuuccccucuguguacaaccaacacgaaagaaggcucaaauaucugccuuaccaggacagaucggggcugguauugugacaacgccgggagugugagcuuuuucccacaggcagagacuugcaagguccaguccaaucgcguguuuugugauaccaugaacucucugacauugcccagcgagguaaaccucugcaauauagacauuuucaacccuaaauacgauuguaagaucaugacuucaaagaccgacguuaguuccagcgugaucacaucucugggagcuauugucucaugcuaugguaaaaccaagugcacugccaguaauaaaaaccgaggcaucauuaagacguuuagcaaugggugugauuacguguccaacaaaggagucgacacagugucuguuggcaauaccuuauauuacgugaacaagcaagaagguaagucgcuguauguaaaaggggagccaauaaucaauuucuacgacccgcuagucuuucccagcgaugaguucgacgcguccauuucacaggugaacgaaaagaucaaucagagucucgccuucaucagaaaaucugaugaacugcuucacaacguuaaugugggaaagagcacuaccaacauuaugauaacaaccaucauuaucgucauuaucgugauauugcugcuccugaucgcaguaggccuuuuucuguacugcaaagcuaggugaggacuagucccuguucccagagcccacuuuuuuuucuuuuuuugaaauaaaauagccugucuuucagaucuaaaaaaaaaaaaaaaaaaaaaaaaaaaaaaaaaaaaaaaaaaaaaaaaaaaaaaaaaaaaaaaaugcaucccccccccccccccccccccccccccccccaaaggcucuuuucagagccaccagaauu

SEQ ID NO: 12116 - RNA, 1957 nt, Artificial Sequence
  mRNA product Design a-2 comprising derived and/or modified sequence from HRSV(Memphis-37)__AIY60640.1__F-del (opt4)
gggagaguccgcucagccagguugcagaagcggcuuagcguguguccuaaucuucucucugcguguagguaggccugugccgcaaacaagcuuaccauggagcugcccauccugaagaccaacgccaucaccaccauccuggccgccgugacccugugcuucgccagcagccagaacaucaccgaggaguucuaccagagcaccugcagcgccgugagcaagggcuaccugagcgcccugagaaccggcugguacaccagcgugaucaccaucgagcugagcaacaucaaggagaacaagugcaacggcaccgacgccaaggugaagcugaucaagcaggagcuggacaaguacaagaacgccgugaccgagcugcagcugcugaugcagagcacccccgccgccaacaacagagccagaagagagcugcccagauucaugaacuacacccugaacaacaccaagaacaacaacgugacccugagcaagaagagaaagagaagauuccugggcuuccugcugggcgugggcagcgccaucgccagcggcaucgccgugagcaaggugcugcaccuggagggcgaggugaacaagaucaagaacgcccugcugagcaccaacaaggccguggugagccugagcaacggcgugagcgugcugaccagcaaggugcuggaccugaagaacuacaucgacaagcagcugcugcccaucgugaacaagcagagcugcagcaucagcaacaucgagaccgugaucgaguuccagcagaagaacaacagacugcuggagaucaccagagaguucagcgugaacgccggcgugaccacccccgugagcaccuacaugcugaccaacagcgagcugcugagccugaucaacgacaugcccaucaccaacgaccagaagaagcugaugagcaacaacgugcagaucgugagacagcagagcuacagcaucaugagcaucaucaaggaggaggugcuggccuacguggugcagcugccccuguacggcgugaucgacacccccugcuggaagcugcacaccagcccccugugcaccaccaacaccaaggagggcagcaacaucugccugaccagaaccgacagaggcugguacugcgacaacgccggcagcgugagcuucuucccccaggccgagaccugcaaggugcagagcaacagaguguucugcgacaccaugaacagccugacccugcccagcgaggugaaccugugcaacaucgacaucuucaaccccaaguacgacugcaagaucaugaccagcaagaccgacgugagcagcagcgugaucaccagccugggcgccaucgugagcugcuacggcaagaccaagugcaccgccagcaacaagaacagaggcaucaucaagaccuucagcaacggcugcgacuacgugagcaacaagggcguggacaccgugagcgugggcaacacccuguacuacgugaacaagcaggagggcaagagccuguacgugaagggcgagcccaucaucaacuucuacgacccccugguguuccccagcgacgaguucgacgccagcaucagccaggugaacgagaagaucaaccagagccuggccuucaucagaaagagcgacgagcugcugcacaacgugaacgugggcaagagcaccaccaacaucaugaucaccaccaucaucaucgugaucaucgugauccugcugcugcugaucgccgugggccuguuccuguacugcaaggccagaugaggacuagucccuguucccagagcccacuuuuuuuucuuuuuuugaaauaaaauagccugucuuucagaucuaaaaaaaaaaaaaaaaaaaaaaaaaaaaaaaaaaaaaaaaaaaaaaaaaaaaaaaaaaaaaaaaugcaucccccccccccccccccccccccccccccccaaaggcucuuuucagagccaccagaauu

SEQ ID NO: 12117 - RNA, 1957 nt, Artificial Sequence
  mRNA product Design a-2 comprising derived and/or modified sequence from HRSV(Memphis-37)__AIY60640.1__F-del (opt5)
gggagaguccgcucagccagguugcagaagcggcuuagcguguguccuaaucuucucucugcguguagguaggccugugccgcaaacaagcuuaccauggagcugcccauccucaagaccaacgccauuacaacgauccuggcugccgugacccuuugcuucgcgagcucccagaauauuacagaagaguuuuaccaaucuaccuguagcgcugucuccaaaggcuaucugucugcccucagaacagggugguacaccagcguuaucacaauugaacuguccaacaucaaggagaauaaaugcaacggaaccgacgccaaggugaaacuuaucaagcaggaacuggauaaguauaaaaaugcugugacggagcuccagcugcugaugcagucuaccccugccgcuaacaaucgggcccgcagagagcucccgcgguucaugaacuacacacugaauaacaccaagaauaacaaugucacacuuagcaaaaagcgcaaaagacgguuucugggcuuccuccugggggugggauccgcgauugccagcggcaucgcuguuucuaaggugcuucaccuggaaggggaggucaacaagauuaaaaaugcccuccuguccaccaacaaggcugugguuagccugucuaacggaguguccguccucacgagcaaagugcuggaccuuaagaauuauaucgauaaacaacugcuccccauugugaacaagcagucuuguuccaucagcaauauugaaacagucaucgaguuucagcagaaaaacaaucgccugcuugagaucaccagagaauuuuccguuaacgccggcgugacaaccccugugucuaccuacaugcugacaaauagcgagcuccugucccugauuaacgacaugcccaucacgaaugaucaaaagaagcucaugagcaacaauguccagauugugcggcagcagucuuauuccaucaugagcauuaucaaagaagagguucuggcguacgugguccaacuuccucuguacggcgugaucgacacccccugcuggaagcuccauacaucuccucuguguaccacaaacaccaaagaagggagcaauauuugccuuacgcgcacagauagaggaugguauugugacaacgccggcuccguuucuuucuucccgcaggcugagaccugcaaggugcagagcaaucgggucuuuugugauaccaugaacucccugacacuccccagcgaggugaaccugugcaauaucgacauuuucaacccuaaauacgauuguaagaucaugaccucuaagacagacgucuccagcucugugauuacgucccugggggccaucguuagcugcuauggaaaaaccaagugcacagcuuccaauaaaaaccgcggcaucauuaagaccuuuucuaaugggugugauuacgugagcaacaaaggagucgacacaguguccguuggcaauacccucuauuacgugaacaagcaagaaggcaagucucuguaugucaaaggggagcccaucauuaauuucuacgacccucuuguguuucccagcgaugaguucgacgccuccaucagccaggugaacgaaaagauuaaucagucucuggccuucaucagaaaauccgaugaacuccugcacaacguuaaugucggaaagagcacgaccaacauuaugaucacaaccaucauuaucgugauuaucgugauucugcuucuccugaucgcugucggccuguuucucuacugcaaagcgcggugaggacuagucccuguucccagagcccacuuuuuuuucuuuuuuugaaauaaaauagccugucuuucagaucuaaaaaaaaaaaaaaaaaaaaaaaaaaaaaaaaaaaaaaaaaaaaaaaaaaaaaaaaaaaaaaaaugcaucccccccccccccccccccccccccccccccaaaggcucuuuucagagccaccagaauu

SEQ ID NO: 12118 - RNA, 1957 nt, Artificial Sequence
  mRNA product Design a-2 comprising derived and/or modified sequence from HRSV(Memphis-37)__AIY60640.1__F-del (opt6)
gggagaguccgcucagccagguugcagaagcggcuuagcguguguccuaaucuucucucugcguguagguaggccugugccgcaaacaagcuuaccauggaacucccaauauuaaaaacuaacgcaaucacaaccauauuagcagccgucacucuaugcuuugccuccucacaaaauauaacagaagaauuuuaccaauccacaugcucagccguuagcaaaggauaucuaucagcccuaagaacaggcugguauacuucaguaauaacaauagaacuaucaaauauaaaagaaaacaaaugcaacggaaccgacgcuaaaguaaagcucauaaaacaagaauuagacaaauacaaaaaugcaguaacagaacuacaacuccuaaugcaaucaaccccagccgccaauaacagagcuagacgagaacuaccccgauucaugaauuacacacuaaacaacacaaaaaacaacaauguaacacucucaaaaaaaagaaaacgaagauucuuagguuuucuccugggaguaggaucagcaaucgcuuccggaaucgcagucaguaaaguccuucaccuugaaggcgaaguaaacaaaauaaaaaaugcacuacuaucuacaaauaaagcaguaguaucccuauccaauggcgucucaguauuaaccucaaaaguacucgaccuuaaaaauuauauagacaaacaauuacuacccauagucaauaaacaauccuguuccauaucaaacauagaaacaguaaucgaauuucaacaaaaaaacaacagauuacuagaaauaacacgcgaauuuucagucaacgccggaguaaccacacccgucucaacauacaugcuaaccaacuccgaacuacuaucacuuaucaacgacaugccaauaacaaaugaccaaaaaaaacucaugucaaacaacguacaaauaguccgccaacaaucauacucuauaaugucuauuaucaaagaagaaguucucgcauacguaguacaacuaccacuauauggugucauagacacaccauguuggaaacuccauacaucacccuuauguacaaccaauacaaaagaaggcucaaacaucugccuaacucgaacagaccgaggaugguacugcgacaaugcaggaucugucucauucuucccucaagcagaaacauguaaaguucaaucuaauagaguuuucugcgauacaaugaacucacuaacucuaccaucagaaguaaaucucuguaauauugacauauucaacccaaaauacgauugcaagaucaugacaucaaaaacugacguaucauccucagucaucaccucauuaggagcaaucguaagcuguuacgggaaaacaaaaugcaccgcuucuaacaaaaauagaggaauaauuaaaaccuucucaaacggaugcgauuacgucuccaauaaaggaguagauacaguaagcguaggaaauacucuauacuacgucaauaaacaagaaggaaaaucacuuuaugucaaaggagaacccauaauaaauuucuacgacccauuagucuucccaucagaugaauuugacgcauccauaucccaagucaacgaaaaaaucaaucaaucacuagcauucauacgaaaaucagacgaacuacuacacaacguuaacguaggaaaaucaacaaccaacaucaugauaaccacuauaauaaucgucauaauagucauccuauuauuacuaauagccguaggccuuuuccuauacuguaaagcuagauaaggacuagucccuguucccagagcccacuuuuuuuucuuuuuuugaaauaaaauagccugucuuucagaucuaaaaaaaaaaaaaaaaaaaaaaaaaaaaaaaaaaaaaaaaaaaaaaaaaaaaaaaaaaaaaaaaugcaucccccccccccccccccccccccccccccccaaaggcucuuuucagagccaccagaauu

SEQ ID NO: 12119 - RNA, 1957 nt, Artificial Sequence
  mRNA product Design a-2 comprising derived and/or modified sequence from HRSV(Memphis-37)__AIY60640.1__F-del (opt11)
gggagaguccgcucagccagguugcagaagcggcuuagcguguguccuaaucuucucucugcguguagguaggccugugccgcaaacaagcuuaccauggaacucccgauccucaaaaccaacgccaucaccacuauccucgccgccguaacccucugcuucgccucaucccaaaacaucaccgaagaauuuuaccaauccacaugcuccgccgucuccaaagguuaccucucagcccuccgcaccggcugguacaccuccguuaucaccaucgaacuuuccaacauaaaagagaacaagugcaacggcaccgacgcaaaaguaaaacuaaucaaacaagaacuagacaaauacaaaaacgccgucaccgaacuccagcuccucaugcaaucgacgcccgccgccaacaaccgagcaaggcgcgaacuuccacgcuucaugaacuacacccucaacaacacuaaaaacaacaacgugacccuauccaaaaagcguaaacgccgauuccuagguuuccuucucggugucggcuccgccauugccuccggcaucgcuguuuccaaaguccuccaccucgaaggcgaaguaaacaagauaaaaaacgcccuccucucuacaaacaaggccgugguaucgcucucuaacggcgucucuguacucaccuccaaaguccucgaccucaaaaacuacaucgacaagcaacuccucccuaucgucaauaaacaauccugcuccauuuccaacaucgaaacagugaucgaauuucaacaaaaaaacaaccgauuacuagaaaucacccgcgaauuuucagucaacgccggcgucacaacgccagucucaaccuacaugcucaccaacucagaacucuuaucacucaucaacgacaugcccaucacuaacgaccagaaaaaacugauguccaacaacgugcaaauaguccgccaacaguccuacuccaucauguccauaaucaaggaggaggugcucgccuacguaguccaacucccccucuacggagucauugacaccccuugcuggaaacuacacaccuccccucucugcaccaccaacaccaaagaaggcagcaacaucugccuaaccaggacggaccgaggaugguacugcgacaaugcaggcuccgucagcuucuucccacaagccgaaacaugcaaaguucaaucaaaccguguauucugcgacaccaugaacucacucacccuccccucagaaguaaaccuaugcaacauagauaucuucaaccccaaauacgacugcaaaauuaugaccuccaaaaccgaugucuccagcuccguuaucacgucacucggcgccaucgucuccugcuacggcaagaccaaaugcaccgccuccaacaaaaaccgcggaauaaucaaaacauucucuaacggcugcgacuacgucuccaauaaaggcgucgacaccgucuccgugggcaacacgcuguacuacgucaacaaacaagaaggcaaaucucuuuacgucaaaggugaaccaaucaucaacuucuacgacccccucguauuccccuccgacgaauuugacgcgagcaucucccaagucaacgaaaagaucaaccaaucccucgccuucauccgaaaaagcgacgaacuccuccacaacgucaacgucggcaaaaguaccacaaacauuaugaucaccaccaucaucauagucaucaucgucauccugcuccuacuaauagccgucggccucuucuuguacugcaaggcacgaugaggacuagucccuguucccagagcccacuuuuuuuucuuuuuuugaaauaaaauagccugucuuucagaucuaaaaaaaaaaaaaaaaaaaaaaaaaaaaaaaaaaaaaaaaaaaaaaaaaaaaaaaaaaaaaaaaugcaucccccccccccccccccccccccccccccccaaaggcucuuuucagagccaccagaauu

SEQ ID NO: 12120 - RNA, 2035 nt, Artificial Sequence
  mRNA product Design a-3 comprising derived and/or modified sequence from HRSV(Memphis-37)__AIY60640.1__F-del (wt)
gggagagggcgcuuggcuugcaaggacccugagcugcggcauugaagcacacccaacccaacucgacugaagucagccucacugaaccggaucugagaaucuucucucucugggcuugccagggcucuccgaaccuagcuagcauccucuucaauuccaacuagaaagcuuaccauggaguugccaauccucaaaacaaaugcaauuaccacaauccuugcugcagucacacucuguuucgcuuccagucaaaacaucacugaagaauuuuaucaaucaacaugcagugcaguuagcaaaggcuaucuuagugcuuuaagaacugguugguauacuaguguuauaacuauagaauuaaguaauaucaaggaaaauaaguguaauggaacagaugcuaagguaaaauugauaaaacaagaauuagauaaauauaaaaaugcuguaacagaauugcaguugcucaugcaaagcacaccagcagccaacaaucgagccagaagagaacuaccaagguuuaugaauuauacacucaacaauaccaaaaauaacaauguaacauuaagcaagaaaaggaaaagaagauuucuuggcuuuuuguuagguguuggaucugcaaucgccaguggcauugcuguaucuaaaguccugcaccuagaaggggaagugaacaaaaucaaaaaugcucuacuauccacaaacaaggcuguagucagcuuaucaaauggaguuagugucuuaaccagcaaaguguuagaccucaaaaacuauauagauaaacaguuguuacccauugugaacaagcaaagcugcagcauaucaaacauugaaacugugauagaauuccaacaaaagaacaacagacuacuagagauuaccagggaauuuaguguuaaugcagguguaacuacaccuguaagcacuuauauguuaacaaauagugaauuauuaucauuaaucaaugauaugccuauaacaaaugaucagaaaaaguuaauguccaacaauguucaaauaguuagacagcaaaguuacucuaucauguccauaauaaaggaggaagucuuagcauauguaguucaauuaccacuauaugguguaauagauacaccuuguuggaaacuacacacauccccucuaugcacaaccaacacaaaggaaggguccaacaucuguuuaacaagaaccgacagaggaugguacugugacaaugcaggaucagugucuuucuucccacaagcugaaacaugcaaaguucaaucgaaucgaguauuuugugacacaaugaacagucuaacauuaccaagugaaguaaaucucugcaacauugacauauucaacccuaaauaugauugcaaaauuaugacuucaaaaacagaugugagcagcuccguuaucacaucucuaggagccauugugucaugcuauggcaaaacuaaauguacagcauccaauaaaaaucguggaaucauaaagacauuuucuaacgggugugauuauguaucaaauaaggggguggacacuguaucuguagguaauacauuauauuauguaaauaagcaagaaggaaaaagccucuauguaaaaggugaaccaauaauaaauuucuaugacccauuaguguucccuucugaugaauuugaugcaucaauaucucaagucaaugagaagauuaaccagagccuagcauuuauucguaaauccgaugaauuauuacauaauguaaauguugguaaauccaccacaaauaucaugauaacuacuauaauuauagugauuauaguaauauuguuauuauuaauugcaguugggcuguuccuauacugcaaggccagaugaggacuagucccuguucccagagcccacuuuuuuuucuuuuuuugaaauaaaauagccugucuuucagaucuaaaaaaaaaaaaaaaaaaaaaaaaaaaaaaaaaaaaaaaaaaaaaaaaaaaaaaaaaaaaaaaaugcaucccccccccccccccccccccccccccccccaaaggcucuuuucagagccaccagaauu

SEQ ID NO: 12121 - RNA, 2035 nt, Artificial Sequence
  mRNA product Design a-3 comprising derived and/or modified sequence from HRSV(Memphis-37)__AIY60640.1__F-del (opt1)
gggagagggcgcuuggcuugcaaggacccugagcugcggcauugaagcacacccaacccaacucgacugaagucagccucacugaaccggaucugagaaucuucucucucugggcuugccagggcucuccgaaccuagcuagcauccucuucaauuccaacuagaaagcuuaccauggagcugcccauccucaagaccaacgccaucaccacgauccuggccgcggugacccugugcuucgccagcucccagaacaucaccgaggaguucuaccagagcacgugcuccgccgucagcaagggcuaccucuccgcccugcgcaccgggugguacaccagcgugaucaccaucgagcuguccaacaucaaggagaacaagugcaacggcaccgacgccaaggugaagcucaucaagcaggagcuggacaaguacaagaacgcggucacggagcugcagcuccugaugcagagcaccccggccgccaacaaccgggcccgccgggagcugccccgcuucaugaacuacacccucaacaacaccaagaacaacaacgugacgcuguccaagaagcggaagcgccgguuccugggguuccuccugggcguggggagcgcgaucgccuccggcaucgccgucagcaaggugcugcaccucgagggcgaggugaacaagaucaagaacgcccugcuguccaccaacaaggccgucgugagccucuccaacggggugagcguccugaccuccaaggugcuggaccucaagaacuacaucgacaagcagcugcugcccaucgugaacaagcagagcugcuccaucagcaacaucgagaccgucaucgaguuccagcagaagaacaaccgccuccuggagaucacgcgggaguucagcgugaacgcgggcgugaccacccccgucuccaccuacaugcugacgaacagcgagcuccugucccugaucaacgacaugccgaucaccaacgaccagaagaagcucaugagcaacaacgugcagaucgugcgccagcaguccuacagcaucauguccaucaucaaggaggagguccuggccuacguggugcagcugccccucuacggggucaucgacacccccugcuggaagcugcacaccagcccccugugcacgaccaacaccaaggagggcuccaacaucugccucacccggacggaccgcgggugguacugcgacaacgccggcagcguguccuucuucccgcaggccgagaccugcaagguccagagcaaccggguguucugcgacaccaugaacucccugacccugcccagcgaggugaaccucugcaacaucgacaucuucaaccccaaguacgacugcaagaucaugacguccaagaccgacgucagcuccagcgugaucaccucccugggcgccaucgugagcugcuacgggaagaccaagugcacggcgagcaacaagaaccgcggcaucaucaagaccuucuccaacgggugcgacuacgucagcaacaagggcguggacaccguguccgucggcaacacccuguacuacgugaacaagcaggagggcaagagccucuacgugaagggggagcccaucaucaacuucuacgacccgcuggucuuccccuccgacgaguucgacgccagcaucucccaggugaacgagaagaucaaccagagccuggccuucauccggaaguccgacgagcuccugcacaacgugaacgucggcaagagcaccacgaacaucaugaucaccaccaucaucaucgugaucaucgugauccugcugcuccugaucgccgucgggcuguuccucuacugcaaggcccgcugaggacuagucccuguucccagagcccacuuuuuuuucuuuuuuugaaauaaaauagccugucuuucagaucuaaaaaaaaaaaaaaaaaaaaaaaaaaaaaaaaaaaaaaaaaaaaaaaaaaaaaaaaaaaaaaaaugcaucccccccccccccccccccccccccccccccaaaggcucuuuucagagccaccagaauu

SEQ ID NO: 12122 - RNA, 2035 nt, Artificial Sequence
  mRNA product Design a-3 comprising derived and/or modified sequence from HRSV(Memphis-37)__AIY60640.1__F-del (opt2)
gggagagggcgcuuggcuugcaaggacccugagcugcggcauugaagcacacccaacccaacucgacugaagucagccucacugaaccggaucugagaaucuucucucucugggcuugccagggcucuccgaaccuagcuagcauccucuucaauuccaacuagaaagcuuaccauggagcuccccauccucaagaccaacgccaucaccaccauccucgccgccgucacccucugcuucgccuccucccagaacaucaccgaggaguucuaccaguccaccugcuccgccgucuccaagggcuaccucuccgcccuccgcaccggcugguacaccuccgucaucaccaucgagcucuccaacaucaaggagaacaagugcaacggcaccgacgccaaggucaagcucaucaagcaggagcucgacaaguacaagaacgccgucaccgagcuccagcuccucaugcaguccacccccgccgccaacaaccgcgcccgccgcgagcucccccgcuucaugaacuacacccucaacaacaccaagaacaacaacgucacccucuccaagaagcgcaagcgccgcuuccucggcuuccuccucggcgucggcuccgccaucgccuccggcaucgccgucuccaagguccuccaccucgagggcgaggucaacaagaucaagaacgcccuccucuccaccaacaaggccgucgucucccucuccaacggcgucuccguccucaccuccaagguccucgaccucaagaacuacaucgacaagcagcuccuccccaucgucaacaagcaguccugcuccaucuccaacaucgagaccgucaucgaguuccagcagaagaacaaccgccuccucgagaucacccgcgaguucuccgucaacgccggcgucaccacccccgucuccaccuacaugcucaccaacuccgagcuccucucccucaucaacgacaugcccaucaccaacgaccagaagaagcucauguccaacaacguccagaucguccgccagcaguccuacuccaucauguccaucaucaaggaggagguccucgccuacgucguccagcucccccucuacggcgucaucgacacccccugcuggaagcuccacaccuccccccucugcaccaccaacaccaaggagggcuccaacaucugccucacccgcaccgaccgcggcugguacugcgacaacgccggcuccgucuccuucuucccccaggccgagaccugcaagguccaguccaaccgcgucuucugcgacaccaugaacucccucacccuccccuccgaggucaaccucugcaacaucgacaucuucaaccccaaguacgacugcaagaucaugaccuccaagaccgacgucuccuccuccgucaucaccucccucggcgccaucgucuccugcuacggcaagaccaagugcaccgccuccaacaagaaccgcggcaucaucaagaccuucuccaacggcugcgacuacgucuccaacaagggcgucgacaccgucuccgucggcaacacccucuacuacgucaacaagcaggagggcaagucccucuacgucaagggcgagcccaucaucaacuucuacgacccccucgucuuccccuccgacgaguucgacgccuccaucucccaggucaacgagaagaucaaccagucccucgccuucauccgcaaguccgacgagcuccuccacaacgucaacgucggcaaguccaccaccaacaucaugaucaccaccaucaucaucgucaucaucgucauccuccuccuccucaucgccgucggccucuuccucuacugcaaggcccgcugaggacuagucccuguucccagagcccacuuuuuuuucuuuuuuugaaauaaaauagccugucuuucagaucuaaaaaaaaaaaaaaaaaaaaaaaaaaaaaaaaaaaaaaaaaaaaaaaaaaaaaaaaaaaaaaaaugcaucccccccccccccccccccccccccccccccaaaggcucuuuucagagccaccagaauu

SEQ ID NO: 12123 - RNA, 2035 nt, Artificial Sequence
  mRNA product Design a-3 comprising derived and/or modified sequence from HRSV(Memphis-37)__AIY60640.1__F-del (opt3)
gggagagggcgcuuggcuugcaaggacccugagcugcggcauugaagcacacccaacccaacucgacugaagucagccucacugaaccggaucugagaaucuucucucucugggcuugccagggcucuccgaaccuagcuagcauccucuucaauuccaacuagaaagcuuaccauggagcugcccauccucaagaccaacgccauuacaacuauacuugcugcagugacgcugugcuucgccagcucccagaauaucaccgaagaguuuuaccaaucuacauguucagcggucaguaaaggcuauuugagcgcuuuaagaacugggugguacaccuccguuauuacaaucgaacugucuaacauuaaggagaauaaaugcaacggaaccgacgccaaggugaaacuaaucaagcaggaacucgauaaguauaaaaaugcaguaacugagcugcagcuucugaugcagucgaccccugccgcuaacaauagggcacggcgcgaguugccacgauucaugaacuacacacucaauaacacgaagaauaacaaugugacucugagcaaaaagcguaaaagaagguuucuggguuuccucuuaggcgucgggucagccauagcuaguggaaucgccguguccaagguucugcaccuugaaggcgaggugaacaagauuaaaaaugcguugcugucuaccaacaaggcagucgugagccuauccaacgguguaucaguucucacaaguaaagugcuggaccuuaagaauuauaucgauaaacaacuguugccgauugucaacaagcagagcuguucuaucuccaauauagaaacugugauugaguuucagcagaaaaacaaucggcuccuggagaucacccgcgaguucucagugaacgccggggucacaacccccguuagcacguacauguuaacuaauagugaacugcucucucuuauuaacgacaugccuaucacaaaugaucaaaagaagcugauguccaacaaugugcagaucguaagacagcagagcuauucgauuaugucuauaaucaaagaagagguguuggcuuacgucgugcaacuaccacuguacggaguuauugacacccccugcuggaagcuccauacuuccccucuguguacaaccaacacgaaagaaggcucaaauaucugccuuaccaggacagaucggggcugguauugugacaacgccgggagugugagcuuuuucccacaggcagagacuugcaagguccaguccaaucgcguguuuugugauaccaugaacucucugacauugcccagcgagguaaaccucugcaauauagacauuuucaacccuaaauacgauuguaagaucaugacuucaaagaccgacguuaguuccagcgugaucacaucucugggagcuauugucucaugcuaugguaaaaccaagugcacugccaguaauaaaaaccgaggcaucauuaagacguuuagcaaugggugugauuacguguccaacaaaggagucgacacagugucuguuggcaauaccuuauauuacgugaacaagcaagaagguaagucgcuguauguaaaaggggagccaauaaucaauuucuacgacccgcuagucuuucccagcgaugaguucgacgcguccauuucacaggugaacgaaaagaucaaucagagucucgccuucaucagaaaaucugaugaacugcuucacaacguuaaugugggaaagagcacuaccaacauuaugauaacaaccaucauuaucgucauuaucgugauauugcugcuccugaucgcaguaggccuuuuucuguacugcaaagcuaggugaggacuagucccuguucccagagcccacuuuuuuuucuuuuuuugaaauaaaauagccugucuuucagaucuaaaaaaaaaaaaaaaaaaaaaaaaaaaaaaaaaaaaaaaaaaaaaaaaaaaaaaaaaaaaaaaaugcaucccccccccccccccccccccccccccccccaaaggcucuuuucagagccaccagaauu

SEQ ID NO: 12124 - RNA, 2035 nt, Artificial Sequence
  mRNA product Design a-3 comprising derived and/or modified sequence from HRSV(Memphis-37)__AIY60640.1__F-del (opt4)
gggagagggcgcuuggcuugcaaggacccugagcugcggcauugaagcacacccaacccaacucgacugaagucagccucacugaaccggaucugagaaucuucucucucugggcuugccagggcucuccgaaccuagcuagcauccucuucaauuccaacuagaaagcuuaccauggagcugcccauccugaagaccaacgccaucaccaccauccuggccgccgugacccugugcuucgccagcagccagaacaucaccgaggaguucuaccagagcaccugcagcgccgugagcaagggcuaccugagcgcccugagaaccggcugguacaccagcgugaucaccaucgagcugagcaacaucaaggagaacaagugcaacggcaccgacgccaaggugaagcugaucaagcaggagcuggacaaguacaagaacgccgugaccgagcugcagcugcugaugcagagcacccccgccgccaacaacagagccagaagagagcugcccagauucaugaacuacacccugaacaacaccaagaacaacaacgugacccugagcaagaagagaaagagaagauuccugggcuuccugcugggcgugggcagcgccaucgccagcggcaucgccgugagcaaggugcugcaccuggagggcgaggugaacaagaucaagaacgcccugcugagcaccaacaaggccguggugagccugagcaacggcgugagcgugcugaccagcaaggugcuggaccugaagaacuacaucgacaagcagcugcugcccaucgugaacaagcagagcugcagcaucagcaacaucgagaccgugaucgaguuccagcagaagaacaacagacugcuggagaucaccagagaguucagcgugaacgccggcgugaccacccccgugagcaccuacaugcugaccaacagcgagcugcugagccugaucaacgacaugcccaucaccaacgaccagaagaagcugaugagcaacaacgugcagaucgugagacagcagagcuacagcaucaugagcaucaucaaggaggaggugcuggccuacguggugcagcugccccuguacggcgugaucgacacccccugcuggaagcugcacaccagcccccugugcaccaccaacaccaaggagggcagcaacaucugccugaccagaaccgacagaggcugguacugcgacaacgccggcagcgugagcuucuucccccaggccgagaccugcaaggugcagagcaacagaguguucugcgacaccaugaacagccugacccugcccagcgaggugaaccugugcaacaucgacaucuucaaccccaaguacgacugcaagaucaugaccagcaagaccgacgugagcagcagcgugaucaccagccugggcgccaucgugagcugcuacggcaagaccaagugcaccgccagcaacaagaacagaggcaucaucaagaccuucagcaacggcugcgacuacgugagcaacaagggcguggacaccgugagcgugggcaacacccuguacuacgugaacaagcaggagggcaagagccuguacgugaagggcgagcccaucaucaacuucuacgacccccugguguuccccagcgacgaguucgacgccagcaucagccaggugaacgagaagaucaaccagagccuggccuucaucagaaagagcgacgagcugcugcacaacgugaacgugggcaagagcaccaccaacaucaugaucaccaccaucaucaucgugaucaucgugauccugcugcugcugaucgccgugggccuguuccuguacugcaaggccagaugaggacuagucccuguucccagagcccacuuuuuuuucuuuuuuugaaauaaaauagccugucuuucagaucuaaaaaaaaaaaaaaaaaaaaaaaaaaaaaaaaaaaaaaaaaaaaaaaaaaaaaaaaaaaaaaaaugcaucccccccccccccccccccccccccccccccaaaggcucuuuucagagccaccagaauu

SEQ ID NO: 12125 - RNA, 2035 nt, Artificial Sequence
  mRNA product Design a-3 comprising derived and/or modified sequence from HRSV(Memphis-37)__AIY60640.1__F-del (opt5)
gggagagggcgcuuggcuugcaaggacccugagcugcggcauugaagcacacccaacccaacucgacugaagucagccucacugaaccggaucugagaaucuucucucucugggcuugccagggcucuccgaaccuagcuagcauccucuucaauuccaacuagaaagcuuaccauggagcugcccauccucaagaccaacgccauuacaacgauccuggcugccgugacccuuugcuucgcgagcucccagaauauuacagaagaguuuuaccaaucuaccuguagcgcugucuccaaaggcuaucugucugcccucagaacagggugguacaccagcguuaucacaauugaacuguccaacaucaaggagaauaaaugcaacggaaccgacgccaaggugaaacuuaucaagcaggaacuggauaaguauaaaaaugcugugacggagcuccagcugcugaugcagucuaccccugccgcuaacaaucgggcccgcagagagcucccgcgguucaugaacuacacacugaauaacaccaagaauaacaaugucacacuuagcaaaaagcgcaaaagacgguuucugggcuuccuccugggggugggauccgcgauugccagcggcaucgcuguuucuaaggugcuucaccuggaaggggaggucaacaagauuaaaaaugcccuccuguccaccaacaaggcugugguuagccugucuaacggaguguccguccucacgagcaaagugcuggaccuuaagaauuauaucgauaaacaacugcuccccauugugaacaagcagucuuguuccaucagcaauauugaaacagucaucgaguuucagcagaaaaacaaucgccugcuugagaucaccagagaauuuuccguuaacgccggcgugacaaccccugugucuaccuacaugcugacaaauagcgagcuccugucccugauuaacgacaugcccaucacgaaugaucaaaagaagcucaugagcaacaauguccagauugugcggcagcagucuuauuccaucaugagcauuaucaaagaagagguucuggcguacgugguccaacuuccucuguacggcgugaucgacacccccugcuggaagcuccauacaucuccucuguguaccacaaacaccaaagaagggagcaauauuugccuuacgcgcacagauagaggaugguauugugacaacgccggcuccguuucuuucuucccgcaggcugagaccugcaaggugcagagcaaucgggucuuuugugauaccaugaacucccugacacuccccagcgaggugaaccugugcaauaucgacauuuucaacccuaaauacgauuguaagaucaugaccucuaagacagacgucuccagcucugugauuacgucccugggggccaucguuagcugcuauggaaaaaccaagugcacagcuuccaauaaaaaccgcggcaucauuaagaccuuuucuaaugggugugauuacgugagcaacaaaggagucgacacaguguccguuggcaauacccucuauuacgugaacaagcaagaaggcaagucucuguaugucaaaggggagcccaucauuaauuucuacgacccucuuguguuucccagcgaugaguucgacgccuccaucagccaggugaacgaaaagauuaaucagucucuggccuucaucagaaaauccgaugaacuccugcacaacguuaaugucggaaagagcacgaccaacauuaugaucacaaccaucauuaucgugauuaucgugauucugcuucuccugaucgcugucggccuguuucucuacugcaaagcgcggugaggacuagucccuguucccagagcccacuuuuuuuucuuuuuuugaaauaaaauagccugucuuucagaucuaaaaaaaaaaaaaaaaaaaaaaaaaaaaaaaaaaaaaaaaaaaaaaaaaaaaaaaaaaaaaaaaugcaucccccccccccccccccccccccccccccccaaaggcucuuuucagagccaccagaauu

SEQ ID NO: 12126 - RNA, 2035 nt, Artificial Sequence
  mRNA product Design a-3 comprising derived and/or modified sequence from HRSV(Memphis-37)__AIY60640.1__F-del (opt6)
gggagagggcgcuuggcuugcaaggacccugagcugcggcauugaagcacacccaacccaacucgacugaagucagccucacugaaccggaucugagaaucuucucucucugggcuugccagggcucuccgaaccuagcuagcauccucuucaauuccaacuagaaagcuuaccauggaacucccaauauuaaaaacuaacgcaaucacaaccauauuagcagccgucacucuaugcuuugccuccucacaaaauauaacagaagaauuuuaccaauccacaugcucagccguuagcaaaggauaucuaucagcccuaagaacaggcugguauacuucaguaauaacaauagaacuaucaaauauaaaagaaaacaaaugcaacggaaccgacgcuaaaguaaagcucauaaaacaagaauuagacaaauacaaaaaugcaguaacagaacuacaacuccuaaugcaaucaaccccagccgccaauaacagagcuagacgagaacuaccccgauucaugaauuacacacuaaacaacacaaaaaacaacaauguaacacucucaaaaaaaagaaaacgaagauucuuagguuuucuccugggaguaggaucagcaaucgcuuccggaaucgcagucaguaaaguccuucaccuugaaggcgaaguaaacaaaauaaaaaaugcacuacuaucuacaaauaaagcaguaguaucccuauccaauggcgucucaguauuaaccucaaaaguacucgaccuuaaaaauuauauagacaaacaauuacuacccauagucaauaaacaauccuguuccauaucaaacauagaaacaguaaucgaauuucaacaaaaaaacaacagauuacuagaaauaacacgcgaauuuucagucaacgccggaguaaccacacccgucucaacauacaugcuaaccaacuccgaacuacuaucacuuaucaacgacaugccaauaacaaaugaccaaaaaaaacucaugucaaacaacguacaaauaguccgccaacaaucauacucuauaaugucuauuaucaaagaagaaguucucgcauacguaguacaacuaccacuauauggugucauagacacaccauguuggaaacuccauacaucacccuuauguacaaccaauacaaaagaaggcucaaacaucugccuaacucgaacagaccgaggaugguacugcgacaaugcaggaucugucucauucuucccucaagcagaaacauguaaaguucaaucuaauagaguuuucugcgauacaaugaacucacuaacucuaccaucagaaguaaaucucuguaauauugacauauucaacccaaaauacgauugcaagaucaugacaucaaaaacugacguaucauccucagucaucaccucauuaggagcaaucguaagcuguuacgggaaaacaaaaugcaccgcuucuaacaaaaauagaggaauaauuaaaaccuucucaaacggaugcgauuacgucuccaauaaaggaguagauacaguaagcguaggaaauacucuauacuacgucaauaaacaagaaggaaaaucacuuuaugucaaaggagaacccauaauaaauuucuacgacccauuagucuucccaucagaugaauuugacgcauccauaucccaagucaacgaaaaaaucaaucaaucacuagcauucauacgaaaaucagacgaacuacuacacaacguuaacguaggaaaaucaacaaccaacaucaugauaaccacuauaauaaucgucauaauagucauccuauuauuacuaauagccguaggccuuuuccuauacuguaaagcuagauaaggacuagucccuguucccagagcccacuuuuuuuucuuuuuuugaaauaaaauagccugucuuucagaucuaaaaaaaaaaaaaaaaaaaaaaaaaaaaaaaaaaaaaaaaaaaaaaaaaaaaaaaaaaaaaaaaugcaucccccccccccccccccccccccccccccccaaaggcucuuuucagagccaccagaauu

SEQ ID NO: 12127 - RNA, 2035 nt, Artificial Sequence
  mRNA product Design a-3 comprising derived and/or modified sequence from HRSV(Memphis-37)__AIY60640.1__F-del (opt11)
gggagagggcgcuuggcuugcaaggacccugagcugcggcauugaagcacacccaacccaacucgacugaagucagccucacugaaccggaucugagaaucuucucucucugggcuugccagggcucuccgaaccuagcuagcauccucuucaauuccaacuagaaagcuuaccauggaacucccgauccucaaaaccaacgccaucaccacuauccucgccgccguaacccucugcuucgccucaucccaaaacaucaccgaagaauuuuaccaauccacaugcuccgccgucuccaaagguuaccucucagcccuccgcaccggcugguacaccuccguuaucaccaucgaacuuuccaacauaaaagagaacaagugcaacggcaccgacgcaaaaguaaaacuaaucaaacaagaacuagacaaauacaaaaacgccgucaccgaacuccagcuccucaugcaaucgacgcccgccgccaacaaccgagcaaggcgcgaacuuccacgcuucaugaacuacacccucaacaacacuaaaaacaacaacgugacccuauccaaaaagcguaaacgccgauuccuagguuuccuucucggugucggcuccgccauugccuccggcaucgcuguuuccaaaguccuccaccucgaaggcgaaguaaacaagauaaaaaacgcccuccucucuacaaacaaggccgugguaucgcucucuaacggcgucucuguacucaccuccaaaguccucgaccucaaaaacuacaucgacaagcaacuccucccuaucgucaauaaacaauccugcuccauuuccaacaucgaaacagugaucgaauuucaacaaaaaaacaaccgauuacuagaaaucacccgcgaauuuucagucaacgccggcgucacaacgccagucucaaccuacaugcucaccaacucagaacucuuaucacucaucaacgacaugcccaucacuaacgaccagaaaaaacugauguccaacaacgugcaaauaguccgccaacaguccuacuccaucauguccauaaucaaggaggaggugcucgccuacguaguccaacucccccucuacggagucauugacaccccuugcuggaaacuacacaccuccccucucugcaccaccaacaccaaagaaggcagcaacaucugccuaaccaggacggaccgaggaugguacugcgacaaugcaggcuccgucagcuucuucccacaagccgaaacaugcaaaguucaaucaaaccguguauucugcgacaccaugaacucacucacccuccccucagaaguaaaccuaugcaacauagauaucuucaaccccaaauacgacugcaaaauuaugaccuccaaaaccgaugucuccagcuccguuaucacgucacucggcgccaucgucuccugcuacggcaagaccaaaugcaccgccuccaacaaaaaccgcggaauaaucaaaacauucucuaacggcugcgacuacgucuccaauaaaggcgucgacaccgucuccgugggcaacacgcuguacuacgucaacaaacaagaaggcaaaucucuuuacgucaaaggugaaccaaucaucaacuucuacgacccccucguauuccccuccgacgaauuugacgcgagcaucucccaagucaacgaaaagaucaaccaaucccucgccuucauccgaaaaagcgacgaacuccuccacaacgucaacgucggcaaaaguaccacaaacauuaugaucaccaccaucaucauagucaucaucgucauccugcuccuacuaauagccgucggccucuucuuguacugcaaggcacgaugaggacuagucccuguucccagagcccacuuuuuuuucuuuuuuugaaauaaaauagccugucuuucagaucuaaaaaaaaaaaaaaaaaaaaaaaaaaaaaaaaaaaaaaaaaaaaaaaaaaaaaaaaaaaaaaaaugcaucccccccccccccccccccccccccccccccaaaggcucuuuucagagccaccagaauu

SEQ ID NO: 12128 - RNA, 1984 nt, Artificial Sequence
  mRNA product Design a-4 comprising derived and/or modified sequence from HRSV(Memphis-37)__AIY60640.1__F-del (wt)
gggagacuccugucgggcggaaguaggaggaguagaguuuaaaaacaguacucuuuuuccgguucgggacguaguugaagcaacgacaagccggauaaccgcucuugagacaggaagcuuaccauggaguugccaauccucaaaacaaaugcaauuaccacaauccuugcugcagucacacucuguuucgcuuccagucaaaacaucacugaagaauuuuaucaaucaacaugcagugcaguuagcaaaggcuaucuuagugcuuuaagaacugguugguauacuaguguuauaacuauagaauuaaguaauaucaaggaaaauaaguguaauggaacagaugcuaagguaaaauugauaaaacaagaauuagauaaauauaaaaaugcuguaacagaauugcaguugcucaugcaaagcacaccagcagccaacaaucgagccagaagagaacuaccaagguuuaugaauuauacacucaacaauaccaaaaauaacaauguaacauuaagcaagaaaaggaaaagaagauuucuuggcuuuuuguuagguguuggaucugcaaucgccaguggcauugcuguaucuaaaguccugcaccuagaaggggaagugaacaaaaucaaaaaugcucuacuauccacaaacaaggcuguagucagcuuaucaaauggaguuagugucuuaaccagcaaaguguuagaccucaaaaacuauauagauaaacaguuguuacccauugugaacaagcaaagcugcagcauaucaaacauugaaacugugauagaauuccaacaaaagaacaacagacuacuagagauuaccagggaauuuaguguuaaugcagguguaacuacaccuguaagcacuuauauguuaacaaauagugaauuauuaucauuaaucaaugauaugccuauaacaaaugaucagaaaaaguuaauguccaacaauguucaaauaguuagacagcaaaguuacucuaucauguccauaauaaaggaggaagucuuagcauauguaguucaauuaccacuauaugguguaauagauacaccuuguuggaaacuacacacauccccucuaugcacaaccaacacaaaggaaggguccaacaucuguuuaacaagaaccgacagaggaugguacugugacaaugcaggaucagugucuuucuucccacaagcugaaacaugcaaaguucaaucgaaucgaguauuuugugacacaaugaacagucuaacauuaccaagugaaguaaaucucugcaacauugacauauucaacccuaaauaugauugcaaaauuaugacuucaaaaacagaugugagcagcuccguuaucacaucucuaggagccauugugucaugcuauggcaaaacuaaauguacagcauccaauaaaaaucguggaaucauaaagacauuuucuaacgggugugauuauguaucaaauaaggggguggacacuguaucuguagguaauacauuauauuauguaaauaagcaagaaggaaaaagccucuauguaaaaggugaaccaauaauaaauuucuaugacccauuaguguucccuucugaugaauuugaugcaucaauaucucaagucaaugagaagauuaaccagagccuagcauuuauucguaaauccgaugaauuauuacauaauguaaauguugguaaauccaccacaaauaucaugauaacuacuauaauuauagugauuauaguaauauuguuauuauuaauugcaguugggcuguuccuauacugcaaggccagaugaggacuagucccuguucccagagcccacuuuuuuuucuuuuuuugaaauaaaauagccugucuuucagaucuaaaaaaaaaaaaaaaaaaaaaaaaaaaaaaaaaaaaaaaaaaaaaaaaaaaaaaaaaaaaaaaaugcaucccccccccccccccccccccccccccccccaaaggcucuuuucagagccaccagaauu

SEQ ID NO: 12129 - RNA, 1984 nt, Artificial Sequence
  mRNA product Design a-4 comprising derived and/or modified sequence from HRSV(Memphis-37)__AIY60640.1__F-del (opt1)
gggagacuccugucgggcggaaguaggaggaguagaguuuaaaaacaguacucuuuuuccgguucgggacguaguugaagcaacgacaagccggauaaccgcucuugagacaggaagcuuaccauggagcugcccauccucaagaccaacgccaucaccacgauccuggccgcggugacccugugcuucgccagcucccagaacaucaccgaggaguucuaccagagcacgugcuccgccgucagcaagggcuaccucuccgcccugcgcaccgggugguacaccagcgugaucaccaucgagcuguccaacaucaaggagaacaagugcaacggcaccgacgccaaggugaagcucaucaagcaggagcuggacaaguacaagaacgcggucacggagcugcagcuccugaugcagagcaccccggccgccaacaaccgggcccgccgggagcugccccgcuucaugaacuacacccucaacaacaccaagaacaacaacgugacgcuguccaagaagcggaagcgccgguuccugggguuccuccugggcguggggagcgcgaucgccuccggcaucgccgucagcaaggugcugcaccucgagggcgaggugaacaagaucaagaacgcccugcuguccaccaacaaggccgucgugagccucuccaacggggugagcguccugaccuccaaggugcuggaccucaagaacuacaucgacaagcagcugcugcccaucgugaacaagcagagcugcuccaucagcaacaucgagaccgucaucgaguuccagcagaagaacaaccgccuccuggagaucacgcgggaguucagcgugaacgcgggcgugaccacccccgucuccaccuacaugcugacgaacagcgagcuccugucccugaucaacgacaugccgaucaccaacgaccagaagaagcucaugagcaacaacgugcagaucgugcgccagcaguccuacagcaucauguccaucaucaaggaggagguccuggccuacguggugcagcugccccucuacggggucaucgacacccccugcuggaagcugcacaccagcccccugugcacgaccaacaccaaggagggcuccaacaucugccucacccggacggaccgcgggugguacugcgacaacgccggcagcguguccuucuucccgcaggccgagaccugcaagguccagagcaaccggguguucugcgacaccaugaacucccugacccugcccagcgaggugaaccucugcaacaucgacaucuucaaccccaaguacgacugcaagaucaugacguccaagaccgacgucagcuccagcgugaucaccucccugggcgccaucgugagcugcuacgggaagaccaagugcacggcgagcaacaagaaccgcggcaucaucaagaccuucuccaacgggugcgacuacgucagcaacaagggcguggacaccguguccgucggcaacacccuguacuacgugaacaagcaggagggcaagagccucuacgugaagggggagcccaucaucaacuucuacgacccgcuggucuuccccuccgacgaguucgacgccagcaucucccaggugaacgagaagaucaaccagagccuggccuucauccggaaguccgacgagcuccugcacaacgugaacgucggcaagagcaccacgaacaucaugaucaccaccaucaucaucgugaucaucgugauccugcugcuccugaucgccgucgggcuguuccucuacugcaaggcccgcugaggacuagucccuguucccagagcccacuuuuuuuucuuuuuuugaaauaaaauagccugucuuucagaucuaaaaaaaaaaaaaaaaaaaaaaaaaaaaaaaaaaaaaaaaaaaaaaaaaaaaaaaaaaaaaaaaugcaucccccccccccccccccccccccccccccccaaaggcucuuuucagagccaccagaauu

SEQ ID NO: 12130 - RNA, 1984 nt, Artificial Sequence
  mRNA product Design a-4 comprising derived and/or modified sequence from HRSV(Memphis-37)__AIY60640.1__F-del (opt2)
gggagacuccugucgggcggaaguaggaggaguagaguuuaaaaacaguacucuuuuuccgguucgggacguaguugaagcaacgacaagccggauaaccgcucuugagacaggaagcuuaccauggagcuccccauccucaagaccaacgccaucaccaccauccucgccgccgucacccucugcuucgccuccucccagaacaucaccgaggaguucuaccaguccaccugcuccgccgucuccaagggcuaccucuccgcccuccgcaccggcugguacaccuccgucaucaccaucgagcucuccaacaucaaggagaacaagugcaacggcaccgacgccaaggucaagcucaucaagcaggagcucgacaaguacaagaacgccgucaccgagcuccagcuccucaugcaguccacccccgccgccaacaaccgcgcccgccgcgagcucccccgcuucaugaacuacacccucaacaacaccaagaacaacaacgucacccucuccaagaagcgcaagcgccgcuuccucggcuuccuccucggcgucggcuccgccaucgccuccggcaucgccgucuccaagguccuccaccucgagggcgaggucaacaagaucaagaacgcccuccucuccaccaacaaggccgucgucucccucuccaacggcgucuccguccucaccuccaagguccucgaccucaagaacuacaucgacaagcagcuccuccccaucgucaacaagcaguccugcuccaucuccaacaucgagaccgucaucgaguuccagcagaagaacaaccgccuccucgagaucacccgcgaguucuccgucaacgccggcgucaccacccccgucuccaccuacaugcucaccaacuccgagcuccucucccucaucaacgacaugcccaucaccaacgaccagaagaagcucauguccaacaacguccagaucguccgccagcaguccuacuccaucauguccaucaucaaggaggagguccucgccuacgucguccagcucccccucuacggcgucaucgacacccccugcuggaagcuccacaccuccccccucugcaccaccaacaccaaggagggcuccaacaucugccucacccgcaccgaccgcggcugguacugcgacaacgccggcuccgucuccuucuucccccaggccgagaccugcaagguccaguccaaccgcgucuucugcgacaccaugaacucccucacccuccccuccgaggucaaccucugcaacaucgacaucuucaaccccaaguacgacugcaagaucaugaccuccaagaccgacgucuccuccuccgucaucaccucccucggcgccaucgucuccugcuacggcaagaccaagugcaccgccuccaacaagaaccgcggcaucaucaagaccuucuccaacggcugcgacuacgucuccaacaagggcgucgacaccgucuccgucggcaacacccucuacuacgucaacaagcaggagggcaagucccucuacgucaagggcgagcccaucaucaacuucuacgacccccucgucuuccccuccgacgaguucgacgccuccaucucccaggucaacgagaagaucaaccagucccucgccuucauccgcaaguccgacgagcuccuccacaacgucaacgucggcaaguccaccaccaacaucaugaucaccaccaucaucaucgucaucaucgucauccuccuccuccucaucgccgucggccucuuccucuacugcaaggcccgcugaggacuagucccuguucccagagcccacuuuuuuuucuuuuuuugaaauaaaauagccugucuuucagaucuaaaaaaaaaaaaaaaaaaaaaaaaaaaaaaaaaaaaaaaaaaaaaaaaaaaaaaaaaaaaaaaaugcaucccccccccccccccccccccccccccccccaaaggcucuuuucagagccaccagaauu

SEQ ID NO: 12131 - RNA, 1984 nt, Artificial Sequence
  mRNA product Design a-4 comprising derived and/or modified sequence from HRSV(Memphis-37)__AIY60640.1__F-del (opt3)
gggagacuccugucgggcggaaguaggaggaguagaguuuaaaaacaguacucuuuuuccgguucgggacguaguugaagcaacgacaagccggauaaccgcucuugagacaggaagcuuaccauggagcugcccauccucaagaccaacgccauuacaacuauacuugcugcagugacgcugugcuucgccagcucccagaauaucaccgaagaguuuuaccaaucuacauguucagcggucaguaaaggcuauuugagcgcuuuaagaacugggugguacaccuccguuauuacaaucgaacugucuaacauuaaggagaauaaaugcaacggaaccgacgccaaggugaaacuaaucaagcaggaacucgauaaguauaaaaaugcaguaacugagcugcagcuucugaugcagucgaccccugccgcuaacaauagggcacggcgcgaguugccacgauucaugaacuacacacucaauaacacgaagaauaacaaugugacucugagcaaaaagcguaaaagaagguuucuggguuuccucuuaggcgucgggucagccauagcuaguggaaucgccguguccaagguucugcaccuugaaggcgaggugaacaagauuaaaaaugcguugcugucuaccaacaaggcagucgugagccuauccaacgguguaucaguucucacaaguaaagugcuggaccuuaagaauuauaucgauaaacaacuguugccgauugucaacaagcagagcuguucuaucuccaauauagaaacugugauugaguuucagcagaaaaacaaucggcuccuggagaucacccgcgaguucucagugaacgccggggucacaacccccguuagcacguacauguuaacuaauagugaacugcucucucuuauuaacgacaugccuaucacaaaugaucaaaagaagcugauguccaacaaugugcagaucguaagacagcagagcuauucgauuaugucuauaaucaaagaagagguguuggcuuacgucgugcaacuaccacuguacggaguuauugacacccccugcuggaagcuccauacuuccccucuguguacaaccaacacgaaagaaggcucaaauaucugccuuaccaggacagaucggggcugguauugugacaacgccgggagugugagcuuuuucccacaggcagagacuugcaagguccaguccaaucgcguguuuugugauaccaugaacucucugacauugcccagcgagguaaaccucugcaauauagacauuuucaacccuaaauacgauuguaagaucaugacuucaaagaccgacguuaguuccagcgugaucacaucucugggagcuauugucucaugcuaugguaaaaccaagugcacugccaguaauaaaaaccgaggcaucauuaagacguuuagcaaugggugugauuacguguccaacaaaggagucgacacagugucuguuggcaauaccuuauauuacgugaacaagcaagaagguaagucgcuguauguaaaaggggagccaauaaucaauuucuacgacccgcuagucuuucccagcgaugaguucgacgcguccauuucacaggugaacgaaaagaucaaucagagucucgccuucaucagaaaaucugaugaacugcuucacaacguuaaugugggaaagagcacuaccaacauuaugauaacaaccaucauuaucgucauuaucgugauauugcugcuccugaucgcaguaggccuuuuucuguacugcaaagcuaggugaggacuagucccuguucccagagcccacuuuuuuuucuuuuuuugaaauaaaauagccugucuuucagaucuaaaaaaaaaaaaaaaaaaaaaaaaaaaaaaaaaaaaaaaaaaaaaaaaaaaaaaaaaaaaaaaaugcaucccccccccccccccccccccccccccccccaaaggcucuuuucagagccaccagaauu

SEQ ID NO: 12132 - RNA, 1984 nt, Artificial Sequence
  mRNA product Design a-4 comprising derived and/or modified sequence from HRSV(Memphis-37)__AIY60640.1__F-del (opt4)
gggagacuccugucgggcggaaguaggaggaguagaguuuaaaaacaguacucuuuuuccgguucgggacguaguugaagcaacgacaagccggauaaccgcucuugagacaggaagcuuaccauggagcugcccauccugaagaccaacgccaucaccaccauccuggccgccgugacccugugcuucgccagcagccagaacaucaccgaggaguucuaccagagcaccugcagcgccgugagcaagggcuaccugagcgcccugagaaccggcugguacaccagcgugaucaccaucgagcugagcaacaucaaggagaacaagugcaacggcaccgacgccaaggugaagcugaucaagcaggagcuggacaaguacaagaacgccgugaccgagcugcagcugcugaugcagagcacccccgccgccaacaacagagccagaagagagcugcccagauucaugaacuacacccugaacaacaccaagaacaacaacgugacccugagcaagaagagaaagagaagauuccugggcuuccugcugggcgugggcagcgccaucgccagcggcaucgccgugagcaaggugcugcaccuggagggcgaggugaacaagaucaagaacgcccugcugagcaccaacaaggccguggugagccugagcaacggcgugagcgugcugaccagcaaggugcuggaccugaagaacuacaucgacaagcagcugcugcccaucgugaacaagcagagcugcagcaucagcaacaucgagaccgugaucgaguuccagcagaagaacaacagacugcuggagaucaccagagaguucagcgugaacgccggcgugaccacccccgugagcaccuacaugcugaccaacagcgagcugcugagccugaucaacgacaugcccaucaccaacgaccagaagaagcugaugagcaacaacgugcagaucgugagacagcagagcuacagcaucaugagcaucaucaaggaggaggugcuggccuacguggugcagcugccccuguacggcgugaucgacacccccugcuggaagcugcacaccagcccccugugcaccaccaacaccaaggagggcagcaacaucugccugaccagaaccgacagaggcugguacugcgacaacgccggcagcgugagcuucuucccccaggccgagaccugcaaggugcagagcaacagaguguucugcgacaccaugaacagccugacccugcccagcgaggugaaccugugcaacaucgacaucuucaaccccaaguacgacugcaagaucaugaccagcaagaccgacgugagcagcagcgugaucaccagccugggcgccaucgugagcugcuacggcaagaccaagugcaccgccagcaacaagaacagaggcaucaucaagaccuucagcaacggcugcgacuacgugagcaacaagggcguggacaccgugagcgugggcaacacccuguacuacgugaacaagcaggagggcaagagccuguacgugaagggcgagcccaucaucaacuucuacgacccccugguguuccccagcgacgaguucgacgccagcaucagccaggugaacgagaagaucaaccagagccuggccuucaucagaaagagcgacgagcugcugcacaacgugaacgugggcaagagcaccaccaacaucaugaucaccaccaucaucaucgugaucaucgugauccugcugcugcugaucgccgugggccuguuccuguacugcaaggccagaugaggacuagucccuguucccagagcccacuuuuuuuucuuuuuuugaaauaaaauagccugucuuucagaucuaaaaaaaaaaaaaaaaaaaaaaaaaaaaaaaaaaaaaaaaaaaaaaaaaaaaaaaaaaaaaaaaugcaucccccccccccccccccccccccccccccccaaaggcucuuuucagagccaccagaauu

SEQ ID NO: 12133 - RNA, 1984 nt, Artificial Sequence
  mRNA product Design a-4 comprising derived and/or modified sequence from HRSV(Memphis-37)__AIY60640.1__F-del (opt5)
gggagacuccugucgggcggaaguaggaggaguagaguuuaaaaacaguacucuuuuuccgguucgggacguaguugaagcaacgacaagccggauaaccgcucuugagacaggaagcuuaccauggagcugcccauccucaagaccaacgccauuacaacgauccuggcugccgugacccuuugcuucgcgagcucccagaauauuacagaagaguuuuaccaaucuaccuguagcgcugucuccaaaggcuaucugucugcccucagaacagggugguacaccagcguuaucacaauugaacuguccaacaucaaggagaauaaaugcaacggaaccgacgccaaggugaaacuuaucaagcaggaacuggauaaguauaaaaaugcugugacggagcuccagcugcugaugcagucuaccccugccgcuaacaaucgggcccgcagagagcucccgcgguucaugaacuacacacugaauaacaccaagaauaacaaugucacacuuagcaaaaagcgcaaaagacgguuucugggcuuccuccugggggugggauccgcgauugccagcggcaucgcuguuucuaaggugcuucaccuggaaggggaggucaacaagauuaaaaaugcccuccuguccaccaacaaggcugugguuagccugucuaacggaguguccguccucacgagcaaagugcuggaccuuaagaauuauaucgauaaacaacugcuccccauugugaacaagcagucuuguuccaucagcaauauugaaacagucaucgaguuucagcagaaaaacaaucgccugcuugagaucaccagagaauuuuccguuaacgccggcgugacaaccccugugucuaccuacaugcugacaaauagcgagcuccugucccugauuaacgacaugcccaucacgaaugaucaaaagaagcucaugagcaacaauguccagauugugcggcagcagucuuauuccaucaugagcauuaucaaagaagagguucuggcguacgugguccaacuuccucuguacggcgugaucgacacccccugcuggaagcuccauacaucuccucuguguaccacaaacaccaaagaagggagcaauauuugccuuacgcgcacagauagaggaugguauugugacaacgccggcuccguuucuuucuucccgcaggcugagaccugcaaggugcagagcaaucgggucuuuugugauaccaugaacucccugacacuccccagcgaggugaaccugugcaauaucgacauuuucaacccuaaauacgauuguaagaucaugaccucuaagacagacgucuccagcucugugauuacgucccugggggccaucguuagcugcuauggaaaaaccaagugcacagcuuccaauaaaaaccgcggcaucauuaagaccuuuucuaaugggugugauuacgugagcaacaaaggagucgacacaguguccguuggcaauacccucuauuacgugaacaagcaagaaggcaagucucuguaugucaaaggggagcccaucauuaauuucuacgacccucuuguguuucccagcgaugaguucgacgccuccaucagccaggugaacgaaaagauuaaucagucucuggccuucaucagaaaauccgaugaacuccugcacaacguuaaugucggaaagagcacgaccaacauuaugaucacaaccaucauuaucgugauuaucgugauucugcuucuccugaucgcugucggccuguuucucuacugcaaagcgcggugaggacuagucccuguucccagagcccacuuuuuuuucuuuuuuugaaauaaaauagccugucuuucagaucuaaaaaaaaaaaaaaaaaaaaaaaaaaaaaaaaaaaaaaaaaaaaaaaaaaaaaaaaaaaaaaaaugcaucccccccccccccccccccccccccccccccaaaggcucuuuucagagccaccagaauu

SEQ ID NO: 12134 - RNA, 1984 nt, Artificial Sequence
  mRNA product Design a-4 comprising derived and/or modified sequence from HRSV(Memphis-37)__AIY60640.1__F-del (opt6)
gggagacuccugucgggcggaaguaggaggaguagaguuuaaaaacaguacucuuuuuccgguucgggacguaguugaagcaacgacaagccggauaaccgcucuugagacaggaagcuuaccauggaacucccaauauuaaaaacuaacgcaaucacaaccauauuagcagccgucacucuaugcuuugccuccucacaaaauauaacagaagaauuuuaccaauccacaugcucagccguuagcaaaggauaucuaucagcccuaagaacaggcugguauacuucaguaauaacaauagaacuaucaaauauaaaagaaaacaaaugcaacggaaccgacgcuaaaguaaagcucauaaaacaagaauuagacaaauacaaaaaugcaguaacagaacuacaacuccuaaugcaaucaaccccagccgccaauaacagagcuagacgagaacuaccccgauucaugaauuacacacuaaacaacacaaaaaacaacaauguaacacucucaaaaaaaagaaaacgaagauucuuagguuuucuccugggaguaggaucagcaaucgcuuccggaaucgcagucaguaaaguccuucaccuugaaggcgaaguaaacaaaauaaaaaaugcacuacuaucuacaaauaaagcaguaguaucccuauccaauggcgucucaguauuaaccucaaaaguacucgaccuuaaaaauuauauagacaaacaauuacuacccauagucaauaaacaauccuguuccauaucaaacauagaaacaguaaucgaauuucaacaaaaaaacaacagauuacuagaaauaacacgcgaauuuucagucaacgccggaguaaccacacccgucucaacauacaugcuaaccaacuccgaacuacuaucacuuaucaacgacaugccaauaacaaaugaccaaaaaaaacucaugucaaacaacguacaaauaguccgccaacaaucauacucuauaaugucuauuaucaaagaagaaguucucgcauacguaguacaacuaccacuauauggugucauagacacaccauguuggaaacuccauacaucacccuuauguacaaccaauacaaaagaaggcucaaacaucugccuaacucgaacagaccgaggaugguacugcgacaaugcaggaucugucucauucuucccucaagcagaaacauguaaaguucaaucuaauagaguuuucugcgauacaaugaacucacuaacucuaccaucagaaguaaaucucuguaauauugacauauucaacccaaaauacgauugcaagaucaugacaucaaaaacugacguaucauccucagucaucaccucauuaggagcaaucguaagcuguuacgggaaaacaaaaugcaccgcuucuaacaaaaauagaggaauaauuaaaaccuucucaaacggaugcgauuacgucuccaauaaaggaguagauacaguaagcguaggaaauacucuauacuacgucaauaaacaagaaggaaaaucacuuuaugucaaaggagaacccauaauaaauuucuacgacccauuagucuucccaucagaugaauuugacgcauccauaucccaagucaacgaaaaaaucaaucaaucacuagcauucauacgaaaaucagacgaacuacuacacaacguuaacguaggaaaaucaacaaccaacaucaugauaaccacuauaauaaucgucauaauagucauccuauuauuacuaauagccguaggccuuuuccuauacuguaaagcuagauaaggacuagucccuguucccagagcccacuuuuuuuucuuuuuuugaaauaaaauagccugucuuucagaucuaaaaaaaaaaaaaaaaaaaaaaaaaaaaaaaaaaaaaaaaaaaaaaaaaaaaaaaaaaaaaaaaugcaucccccccccccccccccccccccccccccccaaaggcucuuuucagagccaccagaauu

SEQ ID NO: 12135 - RNA, 1984 nt, Artificial Sequence
  mRNA product Design a-4 comprising derived and/or modified sequence from HRSV(Memphis-37)__AIY60640.1__F-del (opt11)
gggagacuccugucgggcggaaguaggaggaguagaguuuaaaaacaguacucuuuuuccgguucgggacguaguugaagcaacgacaagccggauaaccgcucuugagacaggaagcuuaccauggaacucccgauccucaaaaccaacgccaucaccacuauccucgccgccguaacccucugcuucgccucaucccaaaacaucaccgaagaauuuuaccaauccacaugcuccgccgucuccaaagguuaccucucagcccuccgcaccggcugguacaccuccguuaucaccaucgaacuuuccaacauaaaagagaacaagugcaacggcaccgacgcaaaaguaaaacuaaucaaacaagaacuagacaaauacaaaaacgccgucaccgaacuccagcuccucaugcaaucgacgcccgccgccaacaaccgagcaaggcgcgaacuuccacgcuucaugaacuacacccucaacaacacuaaaaacaacaacgugacccuauccaaaaagcguaaacgccgauuccuagguuuccuucucggugucggcuccgccauugccuccggcaucgcuguuuccaaaguccuccaccucgaaggcgaaguaaacaagauaaaaaacgcccuccucucuacaaacaaggccgugguaucgcucucuaacggcgucucuguacucaccuccaaaguccucgaccucaaaaacuacaucgacaagcaacuccucccuaucgucaauaaacaauccugcuccauuuccaacaucgaaacagugaucgaauuucaacaaaaaaacaaccgauuacuagaaaucacccgcgaauuuucagucaacgccggcgucacaacgccagucucaaccuacaugcucaccaacucagaacucuuaucacucaucaacgacaugcccaucacuaacgaccagaaaaaacugauguccaacaacgugcaaauaguccgccaacaguccuacuccaucauguccauaaucaaggaggaggugcucgccuacguaguccaacucccccucuacggagucauugacaccccuugcuggaaacuacacaccuccccucucugcaccaccaacaccaaagaaggcagcaacaucugccuaaccaggacggaccgaggaugguacugcgacaaugcaggcuccgucagcuucuucccacaagccgaaacaugcaaaguucaaucaaaccguguauucugcgacaccaugaacucacucacccuccccucagaaguaaaccuaugcaacauagauaucuucaaccccaaauacgacugcaaaauuaugaccuccaaaaccgaugucuccagcuccguuaucacgucacucggcgccaucgucuccugcuacggcaagaccaaaugcaccgccuccaacaaaaaccgcggaauaaucaaaacauucucuaacggcugcgacuacgucuccaauaaaggcgucgacaccgucuccgugggcaacacgcuguacuacgucaacaaacaagaaggcaaaucucuuuacgucaaaggugaaccaaucaucaacuucuacgacccccucguauuccccuccgacgaauuugacgcgagcaucucccaagucaacgaaaagaucaaccaaucccucgccuucauccgaaaaagcgacgaacuccuccacaacgucaacgucggcaaaaguaccacaaacauuaugaucaccaccaucaucauagucaucaucgucauccugcuccuacuaauagccgucggccucuucuuguacugcaaggcacgaugaggacuagucccuguucccagagcccacuuuuuuuucuuuuuuugaaauaaaauagccugucuuucagaucuaaaaaaaaaaaaaaaaaaaaaaaaaaaaaaaaaaaaaaaaaaaaaaaaaaaaaaaaaaaaaaaaugcaucccccccccccccccccccccccccccccccaaaggcucuuuucagagccaccagaauu

SEQ ID NO: 12136 - RNA, 1930 nt, Artificial Sequence
  mRNA product Design a-5 comprising derived and/or modified sequence from HRSV(Memphis-37)__AIY60640.1__F-del (wt)
gggagacuuucccauucuguagcagaauuugguguugccuguggucuuggucccgcggagaagcuuaccauggaguugccaauccucaaaacaaaugcaauuaccacaauccuugcugcagucacacucuguuucgcuuccagucaaaacaucacugaagaauuuuaucaaucaacaugcagugcaguuagcaaaggcuaucuuagugcuuuaagaacugguugguauacuaguguuauaacuauagaauuaaguaauaucaaggaaaauaaguguaauggaacagaugcuaagguaaaauugauaaaacaagaauuagauaaauauaaaaaugcuguaacagaauugcaguugcucaugcaaagcacaccagcagccaacaaucgagccagaagagaacuaccaagguuuaugaauuauacacucaacaauaccaaaaauaacaauguaacauuaagcaagaaaaggaaaagaagauuucuuggcuuuuuguuagguguuggaucugcaaucgccaguggcauugcuguaucuaaaguccugcaccuagaaggggaagugaacaaaaucaaaaaugcucuacuauccacaaacaaggcuguagucagcuuaucaaauggaguuagugucuuaaccagcaaaguguuagaccucaaaaacuauauagauaaacaguuguuacccauugugaacaagcaaagcugcagcauaucaaacauugaaacugugauagaauuccaacaaaagaacaacagacuacuagagauuaccagggaauuuaguguuaaugcagguguaacuacaccuguaagcacuuauauguuaacaaauagugaauuauuaucauuaaucaaugauaugccuauaacaaaugaucagaaaaaguuaauguccaacaauguucaaauaguuagacagcaaaguuacucuaucauguccauaauaaaggaggaagucuuagcauauguaguucaauuaccacuauaugguguaauagauacaccuuguuggaaacuacacacauccccucuaugcacaaccaacacaaaggaaggguccaacaucuguuuaacaagaaccgacagaggaugguacugugacaaugcaggaucagugucuuucuucccacaagcugaaacaugcaaaguucaaucgaaucgaguauuuugugacacaaugaacagucuaacauuaccaagugaaguaaaucucugcaacauugacauauucaacccuaaauaugauugcaaaauuaugacuucaaaaacagaugugagcagcuccguuaucacaucucuaggagccauugugucaugcuauggcaaaacuaaauguacagcauccaauaaaaaucguggaaucauaaagacauuuucuaacgggugugauuauguaucaaauaaggggguggacacuguaucuguagguaauacauuauauuauguaaauaagcaagaaggaaaaagccucuauguaaaaggugaaccaauaauaaauuucuaugacccauuaguguucccuucugaugaauuugaugcaucaauaucucaagucaaugagaagauuaaccagagccuagcauuuauucguaaauccgaugaauuauuacauaauguaaauguugguaaauccaccacaaauaucaugauaacuacuauaauuauagugauuauaguaauauuguuauuauuaauugcaguugggcuguuccuauacugcaaggccagaugaggacuagucccuguucccagagcccacuuuuuuuucuuuuuuugaaauaaaauagccugucuuucagaucuaaaaaaaaaaaaaaaaaaaaaaaaaaaaaaaaaaaaaaaaaaaaaaaaaaaaaaaaaaaaaaaaugcaucccccccccccccccccccccccccccccccaaaggcucuuuucagagccaccagaauu

SEQ ID NO: 12137 - RNA, 1930 nt, Artificial Sequence
  mRNA product Design a-5 comprising derived and/or modified sequence from HRSV(Memphis-37)__AIY60640.1__F-del (opt1)
gggagacuuucccauucuguagcagaauuugguguugccuguggucuuggucccgcggagaagcuuaccauggagcugcccauccucaagaccaacgccaucaccacgauccuggccgcggugacccugugcuucgccagcucccagaacaucaccgaggaguucuaccagagcacgugcuccgccgucagcaagggcuaccucuccgcccugcgcaccgggugguacaccagcgugaucaccaucgagcuguccaacaucaaggagaacaagugcaacggcaccgacgccaaggugaagcucaucaagcaggagcuggacaaguacaagaacgcggucacggagcugcagcuccugaugcagagcaccccggccgccaacaaccgggcccgccgggagcugccccgcuucaugaacuacacccucaacaacaccaagaacaacaacgugacgcuguccaagaagcggaagcgccgguuccugggguuccuccugggcguggggagcgcgaucgccuccggcaucgccgucagcaaggugcugcaccucgagggcgaggugaacaagaucaagaacgcccugcuguccaccaacaaggccgucgugagccucuccaacggggugagcguccugaccuccaaggugcuggaccucaagaacuacaucgacaagcagcugcugcccaucgugaacaagcagagcugcuccaucagcaacaucgagaccgucaucgaguuccagcagaagaacaaccgccuccuggagaucacgcgggaguucagcgugaacgcgggcgugaccacccccgucuccaccuacaugcugacgaacagcgagcuccugucccugaucaacgacaugccgaucaccaacgaccagaagaagcucaugagcaacaacgugcagaucgugcgccagcaguccuacagcaucauguccaucaucaaggaggagguccuggccuacguggugcagcugccccucuacggggucaucgacacccccugcuggaagcugcacaccagcccccugugcacgaccaacaccaaggagggcuccaacaucugccucacccggacggaccgcgggugguacugcgacaacgccggcagcguguccuucuucccgcaggccgagaccugcaagguccagagcaaccggguguucugcgacaccaugaacucccugacccugcccagcgaggugaaccucugcaacaucgacaucuucaaccccaaguacgacugcaagaucaugacguccaagaccgacgucagcuccagcgugaucaccucccugggcgccaucgugagcugcuacgggaagaccaagugcacggcgagcaacaagaaccgcggcaucaucaagaccuucuccaacgggugcgacuacgucagcaacaagggcguggacaccguguccgucggcaacacccuguacuacgugaacaagcaggagggcaagagccucuacgugaagggggagcccaucaucaacuucuacgacccgcuggucuuccccuccgacgaguucgacgccagcaucucccaggugaacgagaagaucaaccagagccuggccuucauccggaaguccgacgagcuccugcacaacgugaacgucggcaagagcaccacgaacaucaugaucaccaccaucaucaucgugaucaucgugauccugcugcuccugaucgccgucgggcuguuccucuacugcaaggcccgcugaggacuagucccuguucccagagcccacuuuuuuuucuuuuuuugaaauaaaauagccugucuuucagaucuaaaaaaaaaaaaaaaaaaaaaaaaaaaaaaaaaaaaaaaaaaaaaaaaaaaaaaaaaaaaaaaaugcaucccccccccccccccccccccccccccccccaaaggcucuuuucagagccaccagaauu

SEQ ID NO: 12138 - RNA, 1930 nt, Artificial Sequence
  mRNA product Design a-5 comprising derived and/or modified sequence from HRSV(Memphis-37)__AIY60640.1__F-del (opt2)
gggagacuuucccauucuguagcagaauuugguguugccuguggucuuggucccgcggagaagcuuaccauggagcuccccauccucaagaccaacgccaucaccaccauccucgccgccgucacccucugcuucgccuccucccagaacaucaccgaggaguucuaccaguccaccugcuccgccgucuccaagggcuaccucuccgcccuccgcaccggcugguacaccuccgucaucaccaucgagcucuccaacaucaaggagaacaagugcaacggcaccgacgccaaggucaagcucaucaagcaggagcucgacaaguacaagaacgccgucaccgagcuccagcuccucaugcaguccacccccgccgccaacaaccgcgcccgccgcgagcucccccgcuucaugaacuacacccucaacaacaccaagaacaacaacgucacccucuccaagaagcgcaagcgccgcuuccucggcuuccuccucggcgucggcuccgccaucgccuccggcaucgccgucuccaagguccuccaccucgagggcgaggucaacaagaucaagaacgcccuccucuccaccaacaaggccgucgucucccucuccaacggcgucuccguccucaccuccaagguccucgaccucaagaacuacaucgacaagcagcuccuccccaucgucaacaagcaguccugcuccaucuccaacaucgagaccgucaucgaguuccagcagaagaacaaccgccuccucgagaucacccgcgaguucuccgucaacgccggcgucaccacccccgucuccaccuacaugcucaccaacuccgagcuccucucccucaucaacgacaugcccaucaccaacgaccagaagaagcucauguccaacaacguccagaucguccgccagcaguccuacuccaucauguccaucaucaaggaggagguccucgccuacgucguccagcucccccucuacggcgucaucgacacccccugcuggaagcuccacaccuccccccucugcaccaccaacaccaaggagggcuccaacaucugccucacccgcaccgaccgcggcugguacugcgacaacgccggcuccgucuccuucuucccccaggccgagaccugcaagguccaguccaaccgcgucuucugcgacaccaugaacucccucacccuccccuccgaggucaaccucugcaacaucgacaucuucaaccccaaguacgacugcaagaucaugaccuccaagaccgacgucuccuccuccgucaucaccucccucggcgccaucgucuccugcuacggcaagaccaagugcaccgccuccaacaagaaccgcggcaucaucaagaccuucuccaacggcugcgacuacgucuccaacaagggcgucgacaccgucuccgucggcaacacccucuacuacgucaacaagcaggagggcaagucccucuacgucaagggcgagcccaucaucaacuucuacgacccccucgucuuccccuccgacgaguucgacgccuccaucucccaggucaacgagaagaucaaccagucccucgccuucauccgcaaguccgacgagcuccuccacaacgucaacgucggcaaguccaccaccaacaucaugaucaccaccaucaucaucgucaucaucgucauccuccuccuccucaucgccgucggccucuuccucuacugcaaggcccgcugaggacuagucccuguucccagagcccacuuuuuuuucuuuuuuugaaauaaaauagccugucuuucagaucuaaaaaaaaaaaaaaaaaaaaaaaaaaaaaaaaaaaaaaaaaaaaaaaaaaaaaaaaaaaaaaaaugcaucccccccccccccccccccccccccccccccaaaggcucuuuucagagccaccagaauu

SEQ ID NO: 12139 - RNA, 1930 nt, Artificial Sequence
  mRNA product Design a-5 comprising derived and/or modified sequence from HRSV(Memphis-37)__AIY60640.1__F-del (opt3)
gggagacuuucccauucuguagcagaauuugguguugccuguggucuuggucccgcggagaagcuuaccauggagcugcccauccucaagaccaacgccauuacaacuauacuugcugcagugacgcugugcuucgccagcucccagaauaucaccgaagaguuuuaccaaucuacauguucagcggucaguaaaggcuauuugagcgcuuuaagaacugggugguacaccuccguuauuacaaucgaacugucuaacauuaaggagaauaaaugcaacggaaccgacgccaaggugaaacuaaucaagcaggaacucgauaaguauaaaaaugcaguaacugagcugcagcuucugaugcagucgaccccugccgcuaacaauagggcacggcgcgaguugccacgauucaugaacuacacacucaauaacacgaagaauaacaaugugacucugagcaaaaagcguaaaagaagguuucuggguuuccucuuaggcgucgggucagccauagcuaguggaaucgccguguccaagguucugcaccuugaaggcgaggugaacaagauuaaaaaugcguugcugucuaccaacaaggcagucgugagccuauccaacgguguaucaguucucacaaguaaagugcuggaccuuaagaauuauaucgauaaacaacuguugccgauugucaacaagcagagcuguucuaucuccaauauagaaacugugauugaguuucagcagaaaaacaaucggcuccuggagaucacccgcgaguucucagugaacgccggggucacaacccccguuagcacguacauguuaacuaauagugaacugcucucucuuauuaacgacaugccuaucacaaaugaucaaaagaagcugauguccaacaaugugcagaucguaagacagcagagcuauucgauuaugucuauaaucaaagaagagguguuggcuuacgucgugcaacuaccacuguacggaguuauugacacccccugcuggaagcuccauacuuccccucuguguacaaccaacacgaaagaaggcucaaauaucugccuuaccaggacagaucggggcugguauugugacaacgccgggagugugagcuuuuucccacaggcagagacuugcaagguccaguccaaucgcguguuuugugauaccaugaacucucugacauugcccagcgagguaaaccucugcaauauagacauuuucaacccuaaauacgauuguaagaucaugacuucaaagaccgacguuaguuccagcgugaucacaucucugggagcuauugucucaugcuaugguaaaaccaagugcacugccaguaauaaaaaccgaggcaucauuaagacguuuagcaaugggugugauuacguguccaacaaaggagucgacacagugucuguuggcaauaccuuauauuacgugaacaagcaagaagguaagucgcuguauguaaaaggggagccaauaaucaauuucuacgacccgcuagucuuucccagcgaugaguucgacgcguccauuucacaggugaacgaaaagaucaaucagagucucgccuucaucagaaaaucugaugaacugcuucacaacguuaaugugggaaagagcacuaccaacauuaugauaacaaccaucauuaucgucauuaucgugauauugcugcuccugaucgcaguaggccuuuuucuguacugcaaagcuaggugaggacuagucccuguucccagagcccacuuuuuuuucuuuuuuugaaauaaaauagccugucuuucagaucuaaaaaaaaaaaaaaaaaaaaaaaaaaaaaaaaaaaaaaaaaaaaaaaaaaaaaaaaaaaaaaaaugcaucccccccccccccccccccccccccccccccaaaggcucuuuucagagccaccagaauu

SEQ ID NO: 12140 - RNA, 1930 nt, Artificial Sequence
  mRNA product Design a-5 comprising derived and/or modified sequence from HRSV(Memphis-37)__AIY60640.1__F-del (opt4)
gggagacuuucccauucuguagcagaauuugguguugccuguggucuuggucccgcggagaagcuuaccauggagcugcccauccugaagaccaacgccaucaccaccauccuggccgccgugacccugugcuucgccagcagccagaacaucaccgaggaguucuaccagagcaccugcagcgccgugagcaagggcuaccugagcgcccugagaaccggcugguacaccagcgugaucaccaucgagcugagcaacaucaaggagaacaagugcaacggcaccgacgccaaggugaagcugaucaagcaggagcuggacaaguacaagaacgccgugaccgagcugcagcugcugaugcagagcacccccgccgccaacaacagagccagaagagagcugcccagauucaugaacuacacccugaacaacaccaagaacaacaacgugacccugagcaagaagagaaagagaagauuccugggcuuccugcugggcgugggcagcgccaucgccagcggcaucgccgugagcaaggugcugcaccuggagggcgaggugaacaagaucaagaacgcccugcugagcaccaacaaggccguggugagccugagcaacggcgugagcgugcugaccagcaaggugcuggaccugaagaacuacaucgacaagcagcugcugcccaucgugaacaagcagagcugcagcaucagcaacaucgagaccgugaucgaguuccagcagaagaacaacagacugcuggagaucaccagagaguucagcgugaacgccggcgugaccacccccgugagcaccuacaugcugaccaacagcgagcugcugagccugaucaacgacaugcccaucaccaacgaccagaagaagcugaugagcaacaacgugcagaucgugagacagcagagcuacagcaucaugagcaucaucaaggaggaggugcuggccuacguggugcagcugccccuguacggcgugaucgacacccccugcuggaagcugcacaccagcccccugugcaccaccaacaccaaggagggcagcaacaucugccugaccagaaccgacagaggcugguacugcgacaacgccggcagcgugagcuucuucccccaggccgagaccugcaaggugcagagcaacagaguguucugcgacaccaugaacagccugacccugcccagcgaggugaaccugugcaacaucgacaucuucaaccccaaguacgacugcaagaucaugaccagcaagaccgacgugagcagcagcgugaucaccagccugggcgccaucgugagcugcuacggcaagaccaagugcaccgccagcaacaagaacagaggcaucaucaagaccuucagcaacggcugcgacuacgugagcaacaagggcguggacaccgugagcgugggcaacacccuguacuacgugaacaagcaggagggcaagagccuguacgugaagggcgagcccaucaucaacuucuacgacccccugguguuccccagcgacgaguucgacgccagcaucagccaggugaacgagaagaucaaccagagccuggccuucaucagaaagagcgacgagcugcugcacaacgugaacgugggcaagagcaccaccaacaucaugaucaccaccaucaucaucgugaucaucgugauccugcugcugcugaucgccgugggccuguuccuguacugcaaggccagaugaggacuagucccuguucccagagcccacuuuuuuuucuuuuuuugaaauaaaauagccugucuuucagaucuaaaaaaaaaaaaaaaaaaaaaaaaaaaaaaaaaaaaaaaaaaaaaaaaaaaaaaaaaaaaaaaaugcaucccccccccccccccccccccccccccccccaaaggcucuuuucagagccaccagaauu

SEQ ID NO: 12141 - RNA, 1930 nt, Artificial Sequence
  mRNA product Design a-5 comprising derived and/or modified sequence from HRSV(Memphis-37)__AIY60640.1__F-del (opt5)
gggagacuuucccauucuguagcagaauuugguguugccuguggucuuggucccgcggagaagcuuaccauggagcugcccauccucaagaccaacgccauuacaacgauccuggcugccgugacccuuugcuucgcgagcucccagaauauuacagaagaguuuuaccaaucuaccuguagcgcugucuccaaaggcuaucugucugcccucagaacagggugguacaccagcguuaucacaauugaacuguccaacaucaaggagaauaaaugcaacggaaccgacgccaaggugaaacuuaucaagcaggaacuggauaaguauaaaaaugcugugacggagcuccagcugcugaugcagucuaccccugccgcuaacaaucgggcccgcagagagcucccgcgguucaugaacuacacacugaauaacaccaagaauaacaaugucacacuuagcaaaaagcgcaaaagacgguuucugggcuuccuccugggggugggauccgcgauugccagcggcaucgcuguuucuaaggugcuucaccuggaaggggaggucaacaagauuaaaaaugcccuccuguccaccaacaaggcugugguuagccugucuaacggaguguccguccucacgagcaaagugcuggaccuuaagaauuauaucgauaaacaacugcuccccauugugaacaagcagucuuguuccaucagcaauauugaaacagucaucgaguuucagcagaaaaacaaucgccugcuugagaucaccagagaauuuuccguuaacgccggcgugacaaccccugugucuaccuacaugcugacaaauagcgagcuccugucccugauuaacgacaugcccaucacgaaugaucaaaagaagcucaugagcaacaauguccagauugugcggcagcagucuuauuccaucaugagcauuaucaaagaagagguucuggcguacgugguccaacuuccucuguacggcgugaucgacacccccugcuggaagcuccauacaucuccucuguguaccacaaacaccaaagaagggagcaauauuugccuuacgcgcacagauagaggaugguauugugacaacgccggcuccguuucuuucuucccgcaggcugagaccugcaaggugcagagcaaucgggucuuuugugauaccaugaacucccugacacuccccagcgaggugaaccugugcaauaucgacauuuucaacccuaaauacgauuguaagaucaugaccucuaagacagacgucuccagcucugugauuacgucccugggggccaucguuagcugcuauggaaaaaccaagugcacagcuuccaauaaaaaccgcggcaucauuaagaccuuuucuaaugggugugauuacgugagcaacaaaggagucgacacaguguccguuggcaauacccucuauuacgugaacaagcaagaaggcaagucucuguaugucaaaggggagcccaucauuaauuucuacgacccucuuguguuucccagcgaugaguucgacgccuccaucagccaggugaacgaaaagauuaaucagucucuggccuucaucagaaaauccgaugaacuccugcacaacguuaaugucggaaagagcacgaccaacauuaugaucacaaccaucauuaucgugauuaucgugauucugcuucuccugaucgcugucggccuguuucucuacugcaaagcgcggugaggacuagucccuguucccagagcccacuuuuuuuucuuuuuuugaaauaaaauagccugucuuucagaucuaaaaaaaaaaaaaaaaaaaaaaaaaaaaaaaaaaaaaaaaaaaaaaaaaaaaaaaaaaaaaaaaugcaucccccccccccccccccccccccccccccccaaaggcucuuuucagagccaccagaauu

SEQ ID NO: 12142 - RNA, 1930 nt, Artificial Sequence
  mRNA product Design a-5 comprising derived and/or modified sequence from HRSV(Memphis-37)__AIY60640.1__F-del (opt6)
gggagacuuucccauucuguagcagaauuugguguugccuguggucuuggucccgcggagaagcuuaccauggaacucccaauauuaaaaacuaacgcaaucacaaccauauuagcagccgucacucuaugcuuugccuccucacaaaauauaacagaagaauuuuaccaauccacaugcucagccguuagcaaaggauaucuaucagcccuaagaacaggcugguauacuucaguaauaacaauagaacuaucaaauauaaaagaaaacaaaugcaacggaaccgacgcuaaaguaaagcucauaaaacaagaauuagacaaauacaaaaaugcaguaacagaacuacaacuccuaaugcaaucaaccccagccgccaauaacagagcuagacgagaacuaccccgauucaugaauuacacacuaaacaacacaaaaaacaacaauguaacacucucaaaaaaaagaaaacgaagauucuuagguuuucuccugggaguaggaucagcaaucgcuuccggaaucgcagucaguaaaguccuucaccuugaaggcgaaguaaacaaaauaaaaaaugcacuacuaucuacaaauaaagcaguaguaucccuauccaauggcgucucaguauuaaccucaaaaguacucgaccuuaaaaauuauauagacaaacaauuacuacccauagucaauaaacaauccuguuccauaucaaacauagaaacaguaaucgaauuucaacaaaaaaacaacagauuacuagaaauaacacgcgaauuuucagucaacgccggaguaaccacacccgucucaacauacaugcuaaccaacuccgaacuacuaucacuuaucaacgacaugccaauaacaaaugaccaaaaaaaacucaugucaaacaacguacaaauaguccgccaacaaucauacucuauaaugucuauuaucaaagaagaaguucucgcauacguaguacaacuaccacuauauggugucauagacacaccauguuggaaacuccauacaucacccuuauguacaaccaauacaaaagaaggcucaaacaucugccuaacucgaacagaccgaggaugguacugcgacaaugcaggaucugucucauucuucccucaagcagaaacauguaaaguucaaucuaauagaguuuucugcgauacaaugaacucacuaacucuaccaucagaaguaaaucucuguaauauugacauauucaacccaaaauacgauugcaagaucaugacaucaaaaacugacguaucauccucagucaucaccucauuaggagcaaucguaagcuguuacgggaaaacaaaaugcaccgcuucuaacaaaaauagaggaauaauuaaaaccuucucaaacggaugcgauuacgucuccaauaaaggaguagauacaguaagcguaggaaauacucuauacuacgucaauaaacaagaaggaaaaucacuuuaugucaaaggagaacccauaauaaauuucuacgacccauuagucuucccaucagaugaauuugacgcauccauaucccaagucaacgaaaaaaucaaucaaucacuagcauucauacgaaaaucagacgaacuacuacacaacguuaacguaggaaaaucaacaaccaacaucaugauaaccacuauaauaaucgucauaauagucauccuauuauuacuaauagccguaggccuuuuccuauacuguaaagcuagauaaggacuagucccuguucccagagcccacuuuuuuuucuuuuuuugaaauaaaauagccugucuuucagaucuaaaaaaaaaaaaaaaaaaaaaaaaaaaaaaaaaaaaaaaaaaaaaaaaaaaaaaaaaaaaaaaaugcaucccccccccccccccccccccccccccccccaaaggcucuuuucagagccaccagaauu

SEQ ID NO: 12143 - RNA, 1930 nt, Artificial Sequence
  mRNA product Design a-5 comprising derived and/or modified sequence from HRSV(Memphis-37)__AIY60640.1__F-del (opt11)
gggagacuuucccauucuguagcagaauuugguguugccuguggucuuggucccgcggagaagcuuaccauggaacucccgauccucaaaaccaacgccaucaccacuauccucgccgccguaacccucugcuucgccucaucccaaaacaucaccgaagaauuuuaccaauccacaugcuccgccgucuccaaagguuaccucucagcccuccgcaccggcugguacaccuccguuaucaccaucgaacuuuccaacauaaaagagaacaagugcaacggcaccgacgcaaaaguaaaacuaaucaaacaagaacuagacaaauacaaaaacgccgucaccgaacuccagcuccucaugcaaucgacgcccgccgccaacaaccgagcaaggcgcgaacuuccacgcuucaugaacuacacccucaacaacacuaaaaacaacaacgugacccuauccaaaaagcguaaacgccgauuccuagguuuccuucucggugucggcuccgccauugccuccggcaucgcuguuuccaaaguccuccaccucgaaggcgaaguaaacaagauaaaaaacgcccuccucucuacaaacaaggccgugguaucgcucucuaacggcgucucuguacucaccuccaaaguccucgaccucaaaaacuacaucgacaagcaacuccucccuaucgucaauaaacaauccugcuccauuuccaacaucgaaacagugaucgaauuucaacaaaaaaacaaccgauuacuagaaaucacccgcgaauuuucagucaacgccggcgucacaacgccagucucaaccuacaugcucaccaacucagaacucuuaucacucaucaacgacaugcccaucacuaacgaccagaaaaaacugauguccaacaacgugcaaauaguccgccaacaguccuacuccaucauguccauaaucaaggaggaggugcucgccuacguaguccaacucccccucuacggagucauugacaccccuugcuggaaacuacacaccuccccucucugcaccaccaacaccaaagaaggcagcaacaucugccuaaccaggacggaccgaggaugguacugcgacaaugcaggcuccgucagcuucuucccacaagccgaaacaugcaaaguucaaucaaaccguguauucugcgacaccaugaacucacucacccuccccucagaaguaaaccuaugcaacauagauaucuucaaccccaaauacgacugcaaaauuaugaccuccaaaaccgaugucuccagcuccguuaucacgucacucggcgccaucgucuccugcuacggcaagaccaaaugcaccgccuccaacaaaaaccgcggaauaaucaaaacauucucuaacggcugcgacuacgucuccaauaaaggcgucgacaccgucuccgugggcaacacgcuguacuacgucaacaaacaagaaggcaaaucucuuuacgucaaaggugaaccaaucaucaacuucuacgacccccucguauuccccuccgacgaauuugacgcgagcaucucccaagucaacgaaaagaucaaccaaucccucgccuucauccgaaaaagcgacgaacuccuccacaacgucaacgucggcaaaaguaccacaaacauuaugaucaccaccaucaucauagucaucaucgucauccugcuccuacuaauagccgucggccucuucuuguacugcaaggcacgaugaggacuagucccuguucccagagcccacuuuuuuuucuuuuuuugaaauaaaauagccugucuuucagaucuaaaaaaaaaaaaaaaaaaaaaaaaaaaaaaaaaaaaaaaaaaaaaaaaaaaaaaaaaaaaaaaaugcaucccccccccccccccccccccccccccccccaaaggcucuuuucagagccaccagaauu

SEQ ID NO: 12144 - RNA, 2111 nt, Artificial Sequence
  mRNA product Design b-1 comprising derived and/or modified sequence from HRSV(Memphis-37)__AIY60640.1__F-del (wt)
gggagacggagacggccugcaggaccugcucucucagcccucagccgaggccuacgccgagccgagugcgcagccgacgaccgggaggagccgcagccuucaacucugagguacugugauccgcgcugcccgccgggccgccccaguccgcugcugcggcaccuccuucccucgcgcccucuucgcucgccagcgccuucccugugagccugcgucaccgcggccgccaagcuuaccauggaguugccaauccucaaaacaaaugcaauuaccacaauccuugcugcagucacacucuguuucgcuuccagucaaaacaucacugaagaauuuuaucaaucaacaugcagugcaguuagcaaaggcuaucuuagugcuuuaagaacugguugguauacuaguguuauaacuauagaauuaaguaauaucaaggaaaauaaguguaauggaacagaugcuaagguaaaauugauaaaacaagaauuagauaaauauaaaaaugcuguaacagaauugcaguugcucaugcaaagcacaccagcagccaacaaucgagccagaagagaacuaccaagguuuaugaauuauacacucaacaauaccaaaaauaacaauguaacauuaagcaagaaaaggaaaagaagauuucuuggcuuuuuguuagguguuggaucugcaaucgccaguggcauugcuguaucuaaaguccugcaccuagaaggggaagugaacaaaaucaaaaaugcucuacuauccacaaacaaggcuguagucagcuuaucaaauggaguuagugucuuaaccagcaaaguguuagaccucaaaaacuauauagauaaacaguuguuacccauugugaacaagcaaagcugcagcauaucaaacauugaaacugugauagaauuccaacaaaagaacaacagacuacuagagauuaccagggaauuuaguguuaaugcagguguaacuacaccuguaagcacuuauauguuaacaaauagugaauuauuaucauuaaucaaugauaugccuauaacaaaugaucagaaaaaguuaauguccaacaauguucaaauaguuagacagcaaaguuacucuaucauguccauaauaaaggaggaagucuuagcauauguaguucaauuaccacuauaugguguaauagauacaccuuguuggaaacuacacacauccccucuaugcacaaccaacacaaaggaaggguccaacaucuguuuaacaagaaccgacagaggaugguacugugacaaugcaggaucagugucuuucuucccacaagcugaaacaugcaaaguucaaucgaaucgaguauuuugugacacaaugaacagucuaacauuaccaagugaaguaaaucucugcaacauugacauauucaacccuaaauaugauugcaaaauuaugacuucaaaaacagaugugagcagcuccguuaucacaucucuaggagccauugugucaugcuauggcaaaacuaaauguacagcauccaauaaaaaucguggaaucauaaagacauuuucuaacgggugugauuauguaucaaauaaggggguggacacuguaucuguagguaauacauuauauuauguaaauaagcaagaaggaaaaagccucuauguaaaaggugaaccaauaauaaauuucuaugacccauuaguguucccuucugaugaauuugaugcaucaauaucucaagucaaugagaagauuaaccagagccuagcauuuauucguaaauccgaugaauuauuacauaauguaaauguugguaaauccaccacaaauaucaugauaacuacuauaauuauagugauuauaguaauauuguuauuauuaauugcaguugggcuguuccuauacugcaaggccagaugaggacuaguguccaccugucccuccugggcugcuggauugucucguuuuccugccaaauaaacaggaucagcgcuuuacagaucuaaaaaaaaaaaaaaaaaaaaaaaaaaaaaaaaaaaaaaaaaaaaaaaaaaaaaaaaaaaaaaaaugcaucccccccccccccccccccccccccccccccaaaggcucuuuucagagccaccagaauu

SEQ ID NO: 12145 - RNA, 2111 nt, Artificial Sequence
  mRNA product Design b-1 comprising derived and/or modified sequence from HRSV(Memphis-37)__AIY60640.1__F-del (opt1)
gggagacggagacggccugcaggaccugcucucucagcccucagccgaggccuacgccgagccgagugcgcagccgacgaccgggaggagccgcagccuucaacucugagguacugugauccgcgcugcccgccgggccgccccaguccgcugcugcggcaccuccuucccucgcgcccucuucgcucgccagcgccuucccugugagccugcgucaccgcggccgccaagcuuaccauggagcugcccauccucaagaccaacgccaucaccacgauccuggccgcggugacccugugcuucgccagcucccagaacaucaccgaggaguucuaccagagcacgugcuccgccgucagcaagggcuaccucuccgcccugcgcaccgggugguacaccagcgugaucaccaucgagcuguccaacaucaaggagaacaagugcaacggcaccgacgccaaggugaagcucaucaagcaggagcuggacaaguacaagaacgcggucacggagcugcagcuccugaugcagagcaccccggccgccaacaaccgggcccgccgggagcugccccgcuucaugaacuacacccucaacaacaccaagaacaacaacgugacgcuguccaagaagcggaagcgccgguuccugggguuccuccugggcguggggagcgcgaucgccuccggcaucgccgucagcaaggugcugcaccucgagggcgaggugaacaagaucaagaacgcccugcuguccaccaacaaggccgucgugagccucuccaacggggugagcguccugaccuccaaggugcuggaccucaagaacuacaucgacaagcagcugcugcccaucgugaacaagcagagcugcuccaucagcaacaucgagaccgucaucgaguuccagcagaagaacaaccgccuccuggagaucacgcgggaguucagcgugaacgcgggcgugaccacccccgucuccaccuacaugcugacgaacagcgagcuccugucccugaucaacgacaugccgaucaccaacgaccagaagaagcucaugagcaacaacgugcagaucgugcgccagcaguccuacagcaucauguccaucaucaaggaggagguccuggccuacguggugcagcugccccucuacggggucaucgacacccccugcuggaagcugcacaccagcccccugugcacgaccaacaccaaggagggcuccaacaucugccucacccggacggaccgcgggugguacugcgacaacgccggcagcguguccuucuucccgcaggccgagaccugcaagguccagagcaaccggguguucugcgacaccaugaacucccugacccugcccagcgaggugaaccucugcaacaucgacaucuucaaccccaaguacgacugcaagaucaugacguccaagaccgacgucagcuccagcgugaucaccucccugggcgccaucgugagcugcuacgggaagaccaagugcacggcgagcaacaagaaccgcggcaucaucaagaccuucuccaacgggugcgacuacgucagcaacaagggcguggacaccguguccgucggcaacacccuguacuacgugaacaagcaggagggcaagagccucuacgugaagggggagcccaucaucaacuucuacgacccgcuggucuuccccuccgacgaguucgacgccagcaucucccaggugaacgagaagaucaaccagagccuggccuucauccggaaguccgacgagcuccugcacaacgugaacgucggcaagagcaccacgaacaucaugaucaccaccaucaucaucgugaucaucgugauccugcugcuccugaucgccgucgggcuguuccucuacugcaaggcccgcugaggacuaguguccaccugucccuccugggcugcuggauugucucguuuuccugccaaauaaacaggaucagcgcuuuacagaucuaaaaaaaaaaaaaaaaaaaaaaaaaaaaaaaaaaaaaaaaaaaaaaaaaaaaaaaaaaaaaaaaugcaucccccccccccccccccccccccccccccccaaaggcucuuuucagagccaccagaauu

SEQ ID NO: 12146 - RNA, 2111 nt, Artificial Sequence
  mRNA product Design b-1 comprising derived and/or modified sequence from HRSV(Memphis-37)__AIY60640.1__F-del (opt2)
gggagacggagacggccugcaggaccugcucucucagcccucagccgaggccuacgccgagccgagugcgcagccgacgaccgggaggagccgcagccuucaacucugagguacugugauccgcgcugcccgccgggccgccccaguccgcugcugcggcaccuccuucccucgcgcccucuucgcucgccagcgccuucccugugagccugcgucaccgcggccgccaagcuuaccauggagcuccccauccucaagaccaacgccaucaccaccauccucgccgccgucacccucugcuucgccuccucccagaacaucaccgaggaguucuaccaguccaccugcuccgccgucuccaagggcuaccucuccgcccuccgcaccggcugguacaccuccgucaucaccaucgagcucuccaacaucaaggagaacaagugcaacggcaccgacgccaaggucaagcucaucaagcaggagcucgacaaguacaagaacgccgucaccgagcuccagcuccucaugcaguccacccccgccgccaacaaccgcgcccgccgcgagcucccccgcuucaugaacuacacccucaacaacaccaagaacaacaacgucacccucuccaagaagcgcaagcgccgcuuccucggcuuccuccucggcgucggcuccgccaucgccuccggcaucgccgucuccaagguccuccaccucgagggcgaggucaacaagaucaagaacgcccuccucuccaccaacaaggccgucgucucccucuccaacggcgucuccguccucaccuccaagguccucgaccucaagaacuacaucgacaagcagcuccuccccaucgucaacaagcaguccugcuccaucuccaacaucgagaccgucaucgaguuccagcagaagaacaaccgccuccucgagaucacccgcgaguucuccgucaacgccggcgucaccacccccgucuccaccuacaugcucaccaacuccgagcuccucucccucaucaacgacaugcccaucaccaacgaccagaagaagcucauguccaacaacguccagaucguccgccagcaguccuacuccaucauguccaucaucaaggaggagguccucgccuacgucguccagcucccccucuacggcgucaucgacacccccugcuggaagcuccacaccuccccccucugcaccaccaacaccaaggagggcuccaacaucugccucacccgcaccgaccgcggcugguacugcgacaacgccggcuccgucuccuucuucccccaggccgagaccugcaagguccaguccaaccgcgucuucugcgacaccaugaacucccucacccuccccuccgaggucaaccucugcaacaucgacaucuucaaccccaaguacgacugcaagaucaugaccuccaagaccgacgucuccuccuccgucaucaccucccucggcgccaucgucuccugcuacggcaagaccaagugcaccgccuccaacaagaaccgcggcaucaucaagaccuucuccaacggcugcgacuacgucuccaacaagggcgucgacaccgucuccgucggcaacacccucuacuacgucaacaagcaggagggcaagucccucuacgucaagggcgagcccaucaucaacuucuacgacccccucgucuuccccuccgacgaguucgacgccuccaucucccaggucaacgagaagaucaaccagucccucgccuucauccgcaaguccgacgagcuccuccacaacgucaacgucggcaaguccaccaccaacaucaugaucaccaccaucaucaucgucaucaucgucauccuccuccuccucaucgccgucggccucuuccucuacugcaaggcccgcugaggacuaguguccaccugucccuccugggcugcuggauugucucguuuuccugccaaauaaacaggaucagcgcuuuacagaucuaaaaaaaaaaaaaaaaaaaaaaaaaaaaaaaaaaaaaaaaaaaaaaaaaaaaaaaaaaaaaaaaugcaucccccccccccccccccccccccccccccccaaaggcucuuuucagagccaccagaauu

SEQ ID NO: 12147 - RNA, 2111 nt, Artificial Sequence
  mRNA product Design b-1 comprising derived and/or modified sequence from HRSV(Memphis-37)__AIY60640.1__F-del (opt3)
gggagacggagacggccugcaggaccugcucucucagcccucagccgaggccuacgccgagccgagugcgcagccgacgaccgggaggagccgcagccuucaacucugagguacugugauccgcgcugcccgccgggccgccccaguccgcugcugcggcaccuccuucccucgcgcccucuucgcucgccagcgccuucccugugagccugcgucaccgcggccgccaagcuuaccauggagcugcccauccucaagaccaacgccauuacaacuauacuugcugcagugacgcugugcuucgccagcucccagaauaucaccgaagaguuuuaccaaucuacauguucagcggucaguaaaggcuauuugagcgcuuuaagaacugggugguacaccuccguuauuacaaucgaacugucuaacauuaaggagaauaaaugcaacggaaccgacgccaaggugaaacuaaucaagcaggaacucgauaaguauaaaaaugcaguaacugagcugcagcuucugaugcagucgaccccugccgcuaacaauagggcacggcgcgaguugccacgauucaugaacuacacacucaauaacacgaagaauaacaaugugacucugagcaaaaagcguaaaagaagguuucuggguuuccucuuaggcgucgggucagccauagcuaguggaaucgccguguccaagguucugcaccuugaaggcgaggugaacaagauuaaaaaugcguugcugucuaccaacaaggcagucgugagccuauccaacgguguaucaguucucacaaguaaagugcuggaccuuaagaauuauaucgauaaacaacuguugccgauugucaacaagcagagcuguucuaucuccaauauagaaacugugauugaguuucagcagaaaaacaaucggcuccuggagaucacccgcgaguucucagugaacgccggggucacaacccccguuagcacguacauguuaacuaauagugaacugcucucucuuauuaacgacaugccuaucacaaaugaucaaaagaagcugauguccaacaaugugcagaucguaagacagcagagcuauucgauuaugucuauaaucaaagaagagguguuggcuuacgucgugcaacuaccacuguacggaguuauugacacccccugcuggaagcuccauacuuccccucuguguacaaccaacacgaaagaaggcucaaauaucugccuuaccaggacagaucggggcugguauugugacaacgccgggagugugagcuuuuucccacaggcagagacuugcaagguccaguccaaucgcguguuuugugauaccaugaacucucugacauugcccagcgagguaaaccucugcaauauagacauuuucaacccuaaauacgauuguaagaucaugacuucaaagaccgacguuaguuccagcgugaucacaucucugggagcuauugucucaugcuaugguaaaaccaagugcacugccaguaauaaaaaccgaggcaucauuaagacguuuagcaaugggugugauuacguguccaacaaaggagucgacacagugucuguuggcaauaccuuauauuacgugaacaagcaagaagguaagucgcuguauguaaaaggggagccaauaaucaauuucuacgacccgcuagucuuucccagcgaugaguucgacgcguccauuucacaggugaacgaaaagaucaaucagagucucgccuucaucagaaaaucugaugaacugcuucacaacguuaaugugggaaagagcacuaccaacauuaugauaacaaccaucauuaucgucauuaucgugauauugcugcuccugaucgcaguaggccuuuuucuguacugcaaagcuaggugaggacuaguguccaccugucccuccugggcugcuggauugucucguuuuccugccaaauaaacaggaucagcgcuuuacagaucuaaaaaaaaaaaaaaaaaaaaaaaaaaaaaaaaaaaaaaaaaaaaaaaaaaaaaaaaaaaaaaaaugcaucccccccccccccccccccccccccccccccaaaggcucuuuucagagccaccagaauu

SEQ ID NO: 12148 - RNA, 2111 nt, Artificial Sequence
  mRNA product Design b-1 comprising derived and/or modified sequence from HRSV(Memphis-37)__AIY60640.1__F-del (opt4)
gggagacggagacggccugcaggaccugcucucucagcccucagccgaggccuacgccgagccgagugcgcagccgacgaccgggaggagccgcagccuucaacucugagguacugugauccgcgcugcccgccgggccgccccaguccgcugcugcggcaccuccuucccucgcgcccucuucgcucgccagcgccuucccugugagccugcgucaccgcggccgccaagcuuaccauggagcugcccauccugaagaccaacgccaucaccaccauccuggccgccgugacccugugcuucgccagcagccagaacaucaccgaggaguucuaccagagcaccugcagcgccgugagcaagggcuaccugagcgcccugagaaccggcugguacaccagcgugaucaccaucgagcugagcaacaucaaggagaacaagugcaacggcaccgacgccaaggugaagcugaucaagcaggagcuggacaaguacaagaacgccgugaccgagcugcagcugcugaugcagagcacccccgccgccaacaacagagccagaagagagcugcccagauucaugaacuacacccugaacaacaccaagaacaacaacgugacccugagcaagaagagaaagagaagauuccugggcuuccugcugggcgugggcagcgccaucgccagcggcaucgccgugagcaaggugcugcaccuggagggcgaggugaacaagaucaagaacgcccugcugagcaccaacaaggccguggugagccugagcaacggcgugagcgugcugaccagcaaggugcuggaccugaagaacuacaucgacaagcagcugcugcccaucgugaacaagcagagcugcagcaucagcaacaucgagaccgugaucgaguuccagcagaagaacaacagacugcuggagaucaccagagaguucagcgugaacgccggcgugaccacccccgugagcaccuacaugcugaccaacagcgagcugcugagccugaucaacgacaugcccaucaccaacgaccagaagaagcugaugagcaacaacgugcagaucgugagacagcagagcuacagcaucaugagcaucaucaaggaggaggugcuggccuacguggugcagcugccccuguacggcgugaucgacacccccugcuggaagcugcacaccagcccccugugcaccaccaacaccaaggagggcagcaacaucugccugaccagaaccgacagaggcugguacugcgacaacgccggcagcgugagcuucuucccccaggccgagaccugcaaggugcagagcaacagaguguucugcgacaccaugaacagccugacccugcccagcgaggugaaccugugcaacaucgacaucuucaaccccaaguacgacugcaagaucaugaccagcaagaccgacgugagcagcagcgugaucaccagccugggcgccaucgugagcugcuacggcaagaccaagugcaccgccagcaacaagaacagaggcaucaucaagaccuucagcaacggcugcgacuacgugagcaacaagggcguggacaccgugagcgugggcaacacccuguacuacgugaacaagcaggagggcaagagccuguacgugaagggcgagcccaucaucaacuucuacgacccccugguguuccccagcgacgaguucgacgccagcaucagccaggugaacgagaagaucaaccagagccuggccuucaucagaaagagcgacgagcugcugcacaacgugaacgugggcaagagcaccaccaacaucaugaucaccaccaucaucaucgugaucaucgugauccugcugcugcugaucgccgugggccuguuccuguacugcaaggccagaugaggacuaguguccaccugucccuccugggcugcuggauugucucguuuuccugccaaauaaacaggaucagcgcuuuacagaucuaaaaaaaaaaaaaaaaaaaaaaaaaaaaaaaaaaaaaaaaaaaaaaaaaaaaaaaaaaaaaaaaugcaucccccccccccccccccccccccccccccccaaaggcucuuuucagagccaccagaauu

SEQ ID NO: 12149 - RNA, 2111 nt, Artificial Sequence
  mRNA product Design b-1 comprising derived and/or modified sequence from HRSV(Memphis-37)__AIY60640.1__F-del (opt5)
gggagacggagacggccugcaggaccugcucucucagcccucagccgaggccuacgccgagccgagugcgcagccgacgaccgggaggagccgcagccuucaacucugagguacugugauccgcgcugcccgccgggccgccccaguccgcugcugcggcaccuccuucccucgcgcccucuucgcucgccagcgccuucccugugagccugcgucaccgcggccgccaagcuuaccauggagcugcccauccucaagaccaacgccauuacaacgauccuggcugccgugacccuuugcuucgcgagcucccagaauauuacagaagaguuuuaccaaucuaccuguagcgcugucuccaaaggcuaucugucugcccucagaacagggugguacaccagcguuaucacaauugaacuguccaacaucaaggagaauaaaugcaacggaaccgacgccaaggugaaacuuaucaagcaggaacuggauaaguauaaaaaugcugugacggagcuccagcugcugaugcagucuaccccugccgcuaacaaucgggcccgcagagagcucccgcgguucaugaacuacacacugaauaacaccaagaauaacaaugucacacuuagcaaaaagcgcaaaagacgguuucugggcuuccuccugggggugggauccgcgauugccagcggcaucgcuguuucuaaggugcuucaccuggaaggggaggucaacaagauuaaaaaugcccuccuguccaccaacaaggcugugguuagccugucuaacggaguguccguccucacgagcaaagugcuggaccuuaagaauuauaucgauaaacaacugcuccccauugugaacaagcagucuuguuccaucagcaauauugaaacagucaucgaguuucagcagaaaaacaaucgccugcuugagaucaccagagaauuuuccguuaacgccggcgugacaaccccugugucuaccuacaugcugacaaauagcgagcuccugucccugauuaacgacaugcccaucacgaaugaucaaaagaagcucaugagcaacaauguccagauugugcggcagcagucuuauuccaucaugagcauuaucaaagaagagguucuggcguacgugguccaacuuccucuguacggcgugaucgacacccccugcuggaagcuccauacaucuccucuguguaccacaaacaccaaagaagggagcaauauuugccuuacgcgcacagauagaggaugguauugugacaacgccggcuccguuucuuucuucccgcaggcugagaccugcaaggugcagagcaaucgggucuuuugugauaccaugaacucccugacacuccccagcgaggugaaccugugcaauaucgacauuuucaacccuaaauacgauuguaagaucaugaccucuaagacagacgucuccagcucugugauuacgucccugggggccaucguuagcugcuauggaaaaaccaagugcacagcuuccaauaaaaaccgcggcaucauuaagaccuuuucuaaugggugugauuacgugagcaacaaaggagucgacacaguguccguuggcaauacccucuauuacgugaacaagcaagaaggcaagucucuguaugucaaaggggagcccaucauuaauuucuacgacccucuuguguuucccagcgaugaguucgacgccuccaucagccaggugaacgaaaagauuaaucagucucuggccuucaucagaaaauccgaugaacuccugcacaacguuaaugucggaaagagcacgaccaacauuaugaucacaaccaucauuaucgugauuaucgugauucugcuucuccugaucgcugucggccuguuucucuacugcaaagcgcggugaggacuaguguccaccugucccuccugggcugcuggauugucucguuuuccugccaaauaaacaggaucagcgcuuuacagaucuaaaaaaaaaaaaaaaaaaaaaaaaaaaaaaaaaaaaaaaaaaaaaaaaaaaaaaaaaaaaaaaaugcaucccccccccccccccccccccccccccccccaaaggcucuuuucagagccaccagaauu

SEQ ID NO: 12150 - RNA, 2111 nt, Artificial Sequence
  mRNA product Design b-1 comprising derived and/or modified sequence from HRSV(Memphis-37)__AIY60640.1__F-del (opt6)
gggagacggagacggccugcaggaccugcucucucagcccucagccgaggccuacgccgagccgagugcgcagccgacgaccgggaggagccgcagccuucaacucugagguacugugauccgcgcugcccgccgggccgccccaguccgcugcugcggcaccuccuucccucgcgcccucuucgcucgccagcgccuucccugugagccugcgucaccgcggccgccaagcuuaccauggaacucccaauauuaaaaacuaacgcaaucacaaccauauuagcagccgucacucuaugcuuugccuccucacaaaauauaacagaagaauuuuaccaauccacaugcucagccguuagcaaaggauaucuaucagcccuaagaacaggcugguauacuucaguaauaacaauagaacuaucaaauauaaaagaaaacaaaugcaacggaaccgacgcuaaaguaaagcucauaaaacaagaauuagacaaauacaaaaaugcaguaacagaacuacaacuccuaaugcaaucaaccccagccgccaauaacagagcuagacgagaacuaccccgauucaugaauuacacacuaaacaacacaaaaaacaacaauguaacacucucaaaaaaaagaaaacgaagauucuuagguuuucuccugggaguaggaucagcaaucgcuuccggaaucgcagucaguaaaguccuucaccuugaaggcgaaguaaacaaaauaaaaaaugcacuacuaucuacaaauaaagcaguaguaucccuauccaauggcgucucaguauuaaccucaaaaguacucgaccuuaaaaauuauauagacaaacaauuacuacccauagucaauaaacaauccuguuccauaucaaacauagaaacaguaaucgaauuucaacaaaaaaacaacagauuacuagaaauaacacgcgaauuuucagucaacgccggaguaaccacacccgucucaacauacaugcuaaccaacuccgaacuacuaucacuuaucaacgacaugccaauaacaaaugaccaaaaaaaacucaugucaaacaacguacaaauaguccgccaacaaucauacucuauaaugucuauuaucaaagaagaaguucucgcauacguaguacaacuaccacuauauggugucauagacacaccauguuggaaacuccauacaucacccuuauguacaaccaauacaaaagaaggcucaaacaucugccuaacucgaacagaccgaggaugguacugcgacaaugcaggaucugucucauucuucccucaagcagaaacauguaaaguucaaucuaauagaguuuucugcgauacaaugaacucacuaacucuaccaucagaaguaaaucucuguaauauugacauauucaacccaaaauacgauugcaagaucaugacaucaaaaacugacguaucauccucagucaucaccucauuaggagcaaucguaagcuguuacgggaaaacaaaaugcaccgcuucuaacaaaaauagaggaauaauuaaaaccuucucaaacggaugcgauuacgucuccaauaaaggaguagauacaguaagcguaggaaauacucuauacuacgucaauaaacaagaaggaaaaucacuuuaugucaaaggagaacccauaauaaauuucuacgacccauuagucuucccaucagaugaauuugacgcauccauaucccaagucaacgaaaaaaucaaucaaucacuagcauucauacgaaaaucagacgaacuacuacacaacguuaacguaggaaaaucaacaaccaacaucaugauaaccacuauaauaaucgucauaauagucauccuauuauuacuaauagccguaggccuuuuccuauacuguaaagcuagauaaggacuaguguccaccugucccuccugggcugcuggauugucucguuuuccugccaaauaaacaggaucagcgcuuuacagaucuaaaaaaaaaaaaaaaaaaaaaaaaaaaaaaaaaaaaaaaaaaaaaaaaaaaaaaaaaaaaaaaaugcaucccccccccccccccccccccccccccccccaaaggcucuuuucagagccaccagaauu

SEQ ID NO: 12151 - RNA, 2111 nt, Artificial Sequence
  mRNA product Design b-1 comprising derived and/or modified sequence from HRSV(Memphis-37)__AIY60640.1__F-del (opt11)
gggagacggagacggccugcaggaccugcucucucagcccucagccgaggccuacgccgagccgagugcgcagccgacgaccgggaggagccgcagccuucaacucugagguacugugauccgcgcugcccgccgggccgccccaguccgcugcugcggcaccuccuucccucgcgcccucuucgcucgccagcgccuucccugugagccugcgucaccgcggccgccaagcuuaccauggaacucccgauccucaaaaccaacgccaucaccacuauccucgccgccguaacccucugcuucgccucaucccaaaacaucaccgaagaauuuuaccaauccacaugcuccgccgucuccaaagguuaccucucagcccuccgcaccggcugguacaccuccguuaucaccaucgaacuuuccaacauaaaagagaacaagugcaacggcaccgacgcaaaaguaaaacuaaucaaacaagaacuagacaaauacaaaaacgccgucaccgaacuccagcuccucaugcaaucgacgcccgccgccaacaaccgagcaaggcgcgaacuuccacgcuucaugaacuacacccucaacaacacuaaaaacaacaacgugacccuauccaaaaagcguaaacgccgauuccuagguuuccuucucggugucggcuccgccauugccuccggcaucgcuguuuccaaaguccuccaccucgaaggcgaaguaaacaagauaaaaaacgcccuccucucuacaaacaaggccgugguaucgcucucuaacggcgucucuguacucaccuccaaaguccucgaccucaaaaacuacaucgacaagcaacuccucccuaucgucaauaaacaauccugcuccauuuccaacaucgaaacagugaucgaauuucaacaaaaaaacaaccgauuacuagaaaucacccgcgaauuuucagucaacgccggcgucacaacgccagucucaaccuacaugcucaccaacucagaacucuuaucacucaucaacgacaugcccaucacuaacgaccagaaaaaacugauguccaacaacgugcaaauaguccgccaacaguccuacuccaucauguccauaaucaaggaggaggugcucgccuacguaguccaacucccccucuacggagucauugacaccccuugcuggaaacuacacaccuccccucucugcaccaccaacaccaaagaaggcagcaacaucugccuaaccaggacggaccgaggaugguacugcgacaaugcaggcuccgucagcuucuucccacaagccgaaacaugcaaaguucaaucaaaccguguauucugcgacaccaugaacucacucacccuccccucagaaguaaaccuaugcaacauagauaucuucaaccccaaauacgacugcaaaauuaugaccuccaaaaccgaugucuccagcuccguuaucacgucacucggcgccaucgucuccugcuacggcaagaccaaaugcaccgccuccaacaaaaaccgcggaauaaucaaaacauucucuaacggcugcgacuacgucuccaauaaaggcgucgacaccgucuccgugggcaacacgcuguacuacgucaacaaacaagaaggcaaaucucuuuacgucaaaggugaaccaaucaucaacuucuacgacccccucguauuccccuccgacgaauuugacgcgagcaucucccaagucaacgaaaagaucaaccaaucccucgccuucauccgaaaaagcgacgaacuccuccacaacgucaacgucggcaaaaguaccacaaacauuaugaucaccaccaucaucauagucaucaucgucauccugcuccuacuaauagccgucggccucuucuuguacugcaaggcacgaugaggacuaguguccaccugucccuccugggcugcuggauugucucguuuuccugccaaauaaacaggaucagcgcuuuacagaucuaaaaaaaaaaaaaaaaaaaaaaaaaaaaaaaaaaaaaaaaaaaaaaaaaaaaaaaaaaaaaaaaugcaucccccccccccccccccccccccccccccccaaaggcucuuuucagagccaccagaauu

SEQ ID NO: 12152 - RNA, 1931 nt, Artificial Sequence
  mRNA product Design b-2 comprising derived and/or modified sequence from HRSV(Memphis-37)__AIY60640.1__F-del (wt)
gggagagccucugcuggaguccggggaguggcguuggcugcuagagcgaagcuuaccauggaguugccaauccucaaaacaaaugcaauuaccacaauccuugcugcagucacacucuguuucgcuuccagucaaaacaucacugaagaauuuuaucaaucaacaugcagugcaguuagcaaaggcuaucuuagugcuuuaagaacugguugguauacuaguguuauaacuauagaauuaaguaauaucaaggaaaauaaguguaauggaacagaugcuaagguaaaauugauaaaacaagaauuagauaaauauaaaaaugcuguaacagaauugcaguugcucaugcaaagcacaccagcagccaacaaucgagccagaagagaacuaccaagguuuaugaauuauacacucaacaauaccaaaaauaacaauguaacauuaagcaagaaaaggaaaagaagauuucuuggcuuuuuguuagguguuggaucugcaaucgccaguggcauugcuguaucuaaaguccugcaccuagaaggggaagugaacaaaaucaaaaaugcucuacuauccacaaacaaggcuguagucagcuuaucaaauggaguuagugucuuaaccagcaaaguguuagaccucaaaaacuauauagauaaacaguuguuacccauugugaacaagcaaagcugcagcauaucaaacauugaaacugugauagaauuccaacaaaagaacaacagacuacuagagauuaccagggaauuuaguguuaaugcagguguaacuacaccuguaagcacuuauauguuaacaaauagugaauuauuaucauuaaucaaugauaugccuauaacaaaugaucagaaaaaguuaauguccaacaauguucaaauaguuagacagcaaaguuacucuaucauguccauaauaaaggaggaagucuuagcauauguaguucaauuaccacuauaugguguaauagauacaccuuguuggaaacuacacacauccccucuaugcacaaccaacacaaaggaaggguccaacaucuguuuaacaagaaccgacagaggaugguacugugacaaugcaggaucagugucuuucuucccacaagcugaaacaugcaaaguucaaucgaaucgaguauuuugugacacaaugaacagucuaacauuaccaagugaaguaaaucucugcaacauugacauauucaacccuaaauaugauugcaaaauuaugacuucaaaaacagaugugagcagcuccguuaucacaucucuaggagccauugugucaugcuauggcaaaacuaaauguacagcauccaauaaaaaucguggaaucauaaagacauuuucuaacgggugugauuauguaucaaauaaggggguggacacuguaucuguagguaauacauuauauuauguaaauaagcaagaaggaaaaagccucuauguaaaaggugaaccaauaauaaauuucuaugacccauuaguguucccuucugaugaauuugaugcaucaauaucucaagucaaugagaagauuaaccagagccuagcauuuauucguaaauccgaugaauuauuacauaauguaaauguugguaaauccaccacaaauaucaugauaacuacuauaauuauagugauuauaguaauauuguuauuauuaauugcaguugggcuguuccuauacugcaaggccagaugaggacuaguguccaccugucccuccugggcugcuggauugucucguuuuccugccaaauaaacaggaucagcgcuuuacagaucuaaaaaaaaaaaaaaaaaaaaaaaaaaaaaaaaaaaaaaaaaaaaaaaaaaaaaaaaaaaaaaaaugcaucccccccccccccccccccccccccccccccaaaggcucuuuucagagccaccagaauu

SEQ ID NO: 12153 - RNA, 1931 nt, Artificial Sequence
  mRNA product Design b-2 comprising derived and/or modified sequence from HRSV(Memphis-37)__AIY60640.1__F-del (opt1)
gggagagccucugcuggaguccggggaguggcguuggcugcuagagcgaagcuuaccauggagcugcccauccucaagaccaacgccaucaccacgauccuggccgcggugacccugugcuucgccagcucccagaacaucaccgaggaguucuaccagagcacgugcuccgccgucagcaagggcuaccucuccgcccugcgcaccgggugguacaccagcgugaucaccaucgagcuguccaacaucaaggagaacaagugcaacggcaccgacgccaaggugaagcucaucaagcaggagcuggacaaguacaagaacgcggucacggagcugcagcuccugaugcagagcaccccggccgccaacaaccgggcccgccgggagcugccccgcuucaugaacuacacccucaacaacaccaagaacaacaacgugacgcuguccaagaagcggaagcgccgguuccugggguuccuccugggcguggggagcgcgaucgccuccggcaucgccgucagcaaggugcugcaccucgagggcgaggugaacaagaucaagaacgcccugcuguccaccaacaaggccgucgugagccucuccaacggggugagcguccugaccuccaaggugcuggaccucaagaacuacaucgacaagcagcugcugcccaucgugaacaagcagagcugcuccaucagcaacaucgagaccgucaucgaguuccagcagaagaacaaccgccuccuggagaucacgcgggaguucagcgugaacgcgggcgugaccacccccgucuccaccuacaugcugacgaacagcgagcuccugucccugaucaacgacaugccgaucaccaacgaccagaagaagcucaugagcaacaacgugcagaucgugcgccagcaguccuacagcaucauguccaucaucaaggaggagguccuggccuacguggugcagcugccccucuacggggucaucgacacccccugcuggaagcugcacaccagcccccugugcacgaccaacaccaaggagggcuccaacaucugccucacccggacggaccgcgggugguacugcgacaacgccggcagcguguccuucuucccgcaggccgagaccugcaagguccagagcaaccggguguucugcgacaccaugaacucccugacccugcccagcgaggugaaccucugcaacaucgacaucuucaaccccaaguacgacugcaagaucaugacguccaagaccgacgucagcuccagcgugaucaccucccugggcgccaucgugagcugcuacgggaagaccaagugcacggcgagcaacaagaaccgcggcaucaucaagaccuucuccaacgggugcgacuacgucagcaacaagggcguggacaccguguccgucggcaacacccuguacuacgugaacaagcaggagggcaagagccucuacgugaagggggagcccaucaucaacuucuacgacccgcuggucuuccccuccgacgaguucgacgccagcaucucccaggugaacgagaagaucaaccagagccuggccuucauccggaaguccgacgagcuccugcacaacgugaacgucggcaagagcaccacgaacaucaugaucaccaccaucaucaucgugaucaucgugauccugcugcuccugaucgccgucgggcuguuccucuacugcaaggcccgcugaggacuaguguccaccugucccuccugggcugcuggauugucucguuuuccugccaaauaaacaggaucagcgcuuuacagaucuaaaaaaaaaaaaaaaaaaaaaaaaaaaaaaaaaaaaaaaaaaaaaaaaaaaaaaaaaaaaaaaaugcaucccccccccccccccccccccccccccccccaaaggcucuuuucagagccaccagaauu

SEQ ID NO: 12154 - RNA, 1931 nt, Artificial Sequence
  mRNA product Design b-2 comprising derived and/or modified sequence from HRSV(Memphis-37)__AIY60640.1__F-del (opt2)
gggagagccucugcuggaguccggggaguggcguuggcugcuagagcgaagcuuaccauggagcuccccauccucaagaccaacgccaucaccaccauccucgccgccgucacccucugcuucgccuccucccagaacaucaccgaggaguucuaccaguccaccugcuccgccgucuccaagggcuaccucuccgcccuccgcaccggcugguacaccuccgucaucaccaucgagcucuccaacaucaaggagaacaagugcaacggcaccgacgccaaggucaagcucaucaagcaggagcucgacaaguacaagaacgccgucaccgagcuccagcuccucaugcaguccacccccgccgccaacaaccgcgcccgccgcgagcucccccgcuucaugaacuacacccucaacaacaccaagaacaacaacgucacccucuccaagaagcgcaagcgccgcuuccucggcuuccuccucggcgucggcuccgccaucgccuccggcaucgccgucuccaagguccuccaccucgagggcgaggucaacaagaucaagaacgcccuccucuccaccaacaaggccgucgucucccucuccaacggcgucuccguccucaccuccaagguccucgaccucaagaacuacaucgacaagcagcuccuccccaucgucaacaagcaguccugcuccaucuccaacaucgagaccgucaucgaguuccagcagaagaacaaccgccuccucgagaucacccgcgaguucuccgucaacgccggcgucaccacccccgucuccaccuacaugcucaccaacuccgagcuccucucccucaucaacgacaugcccaucaccaacgaccagaagaagcucauguccaacaacguccagaucguccgccagcaguccuacuccaucauguccaucaucaaggaggagguccucgccuacgucguccagcucccccucuacggcgucaucgacacccccugcuggaagcuccacaccuccccccucugcaccaccaacaccaaggagggcuccaacaucugccucacccgcaccgaccgcggcugguacugcgacaacgccggcuccgucuccuucuucccccaggccgagaccugcaagguccaguccaaccgcgucuucugcgacaccaugaacucccucacccuccccuccgaggucaaccucugcaacaucgacaucuucaaccccaaguacgacugcaagaucaugaccuccaagaccgacgucuccuccuccgucaucaccucccucggcgccaucgucuccugcuacggcaagaccaagugcaccgccuccaacaagaaccgcggcaucaucaagaccuucuccaacggcugcgacuacgucuccaacaagggcgucgacaccgucuccgucggcaacacccucuacuacgucaacaagcaggagggcaagucccucuacgucaagggcgagcccaucaucaacuucuacgacccccucgucuuccccuccgacgaguucgacgccuccaucucccaggucaacgagaagaucaaccagucccucgccuucauccgcaaguccgacgagcuccuccacaacgucaacgucggcaaguccaccaccaacaucaugaucaccaccaucaucaucgucaucaucgucauccuccuccuccucaucgccgucggccucuuccucuacugcaaggcccgcugaggacuaguguccaccugucccuccugggcugcuggauugucucguuuuccugccaaauaaacaggaucagcgcuuuacagaucuaaaaaaaaaaaaaaaaaaaaaaaaaaaaaaaaaaaaaaaaaaaaaaaaaaaaaaaaaaaaaaaaugcaucccccccccccccccccccccccccccccccaaaggcucuuuucagagccaccagaauu

SEQ ID NO: 12155 - RNA, 1931 nt, Artificial Sequence
  mRNA product Design b-2 comprising derived and/or modified sequence from HRSV(Memphis-37)__AIY60640.1__F-del (opt3)
gggagagccucugcuggaguccggggaguggcguuggcugcuagagcgaagcuuaccauggagcugcccauccucaagaccaacgccauuacaacuauacuugcugcagugacgcugugcuucgccagcucccagaauaucaccgaagaguuuuaccaaucuacauguucagcggucaguaaaggcuauuugagcgcuuuaagaacugggugguacaccuccguuauuacaaucgaacugucuaacauuaaggagaauaaaugcaacggaaccgacgccaaggugaaacuaaucaagcaggaacucgauaaguauaaaaaugcaguaacugagcugcagcuucugaugcagucgaccccugccgcuaacaauagggcacggcgcgaguugccacgauucaugaacuacacacucaauaacacgaagaauaacaaugugacucugagcaaaaagcguaaaagaagguuucuggguuuccucuuaggcgucgggucagccauagcuaguggaaucgccguguccaagguucugcaccuugaaggcgaggugaacaagauuaaaaaugcguugcugucuaccaacaaggcagucgugagccuauccaacgguguaucaguucucacaaguaaagugcuggaccuuaagaauuauaucgauaaacaacuguugccgauugucaacaagcagagcuguucuaucuccaauauagaaacugugauugaguuucagcagaaaaacaaucggcuccuggagaucacccgcgaguucucagugaacgccggggucacaacccccguuagcacguacauguuaacuaauagugaacugcucucucuuauuaacgacaugccuaucacaaaugaucaaaagaagcugauguccaacaaugugcagaucguaagacagcagagcuauucgauuaugucuauaaucaaagaagagguguuggcuuacgucgugcaacuaccacuguacggaguuauugacacccccugcuggaagcuccauacuuccccucuguguacaaccaacacgaaagaaggcucaaauaucugccuuaccaggacagaucggggcugguauugugacaacgccgggagugugagcuuuuucccacaggcagagacuugcaagguccaguccaaucgcguguuuugugauaccaugaacucucugacauugcccagcgagguaaaccucugcaauauagacauuuucaacccuaaauacgauuguaagaucaugacuucaaagaccgacguuaguuccagcgugaucacaucucugggagcuauugucucaugcuaugguaaaaccaagugcacugccaguaauaaaaaccgaggcaucauuaagacguuuagcaaugggugugauuacguguccaacaaaggagucgacacagugucuguuggcaauaccuuauauuacgugaacaagcaagaagguaagucgcuguauguaaaaggggagccaauaaucaauuucuacgacccgcuagucuuucccagcgaugaguucgacgcguccauuucacaggugaacgaaaagaucaaucagagucucgccuucaucagaaaaucugaugaacugcuucacaacguuaaugugggaaagagcacuaccaacauuaugauaacaaccaucauuaucgucauuaucgugauauugcugcuccugaucgcaguaggccuuuuucuguacugcaaagcuaggugaggacuaguguccaccugucccuccugggcugcuggauugucucguuuuccugccaaauaaacaggaucagcgcuuuacagaucuaaaaaaaaaaaaaaaaaaaaaaaaaaaaaaaaaaaaaaaaaaaaaaaaaaaaaaaaaaaaaaaaugcaucccccccccccccccccccccccccccccccaaaggcucuuuucagagccaccagaauu

SEQ ID NO: 12156 - RNA, 1931 nt, Artificial Sequence
  mRNA product Design b-2 comprising derived and/or modified sequence from HRSV(Memphis-37)__AIY60640.1__F-del (opt4)
gggagagccucugcuggaguccggggaguggcguuggcugcuagagcgaagcuuaccauggagcugcccauccugaagaccaacgccaucaccaccauccuggccgccgugacccugugcuucgccagcagccagaacaucaccgaggaguucuaccagagcaccugcagcgccgugagcaagggcuaccugagcgcccugagaaccggcugguacaccagcgugaucaccaucgagcugagcaacaucaaggagaacaagugcaacggcaccgacgccaaggugaagcugaucaagcaggagcuggacaaguacaagaacgccgugaccgagcugcagcugcugaugcagagcacccccgccgccaacaacagagccagaagagagcugcccagauucaugaacuacacccugaacaacaccaagaacaacaacgugacccugagcaagaagagaaagagaagauuccugggcuuccugcugggcgugggcagcgccaucgccagcggcaucgccgugagcaaggugcugcaccuggagggcgaggugaacaagaucaagaacgcccugcugagcaccaacaaggccguggugagccugagcaacggcgugagcgugcugaccagcaaggugcuggaccugaagaacuacaucgacaagcagcugcugcccaucgugaacaagcagagcugcagcaucagcaacaucgagaccgugaucgaguuccagcagaagaacaacagacugcuggagaucaccagagaguucagcgugaacgccggcgugaccacccccgugagcaccuacaugcugaccaacagcgagcugcugagccugaucaacgacaugcccaucaccaacgaccagaagaagcugaugagcaacaacgugcagaucgugagacagcagagcuacagcaucaugagcaucaucaaggaggaggugcuggccuacguggugcagcugccccuguacggcgugaucgacacccccugcuggaagcugcacaccagcccccugugcaccaccaacaccaaggagggcagcaacaucugccugaccagaaccgacagaggcugguacugcgacaacgccggcagcgugagcuucuucccccaggccgagaccugcaaggugcagagcaacagaguguucugcgacaccaugaacagccugacccugcccagcgaggugaaccugugcaacaucgacaucuucaaccccaaguacgacugcaagaucaugaccagcaagaccgacgugagcagcagcgugaucaccagccugggcgccaucgugagcugcuacggcaagaccaagugcaccgccagcaacaagaacagaggcaucaucaagaccuucagcaacggcugcgacuacgugagcaacaagggcguggacaccgugagcgugggcaacacccuguacuacgugaacaagcaggagggcaagagccuguacgugaagggcgagcccaucaucaacuucuacgacccccugguguuccccagcgacgaguucgacgccagcaucagccaggugaacgagaagaucaaccagagccuggccuucaucagaaagagcgacgagcugcugcacaacgugaacgugggcaagagcaccaccaacaucaugaucaccaccaucaucaucgugaucaucgugauccugcugcugcugaucgccgugggccuguuccuguacugcaaggccagaugaggacuaguguccaccugucccuccugggcugcuggauugucucguuuuccugccaaauaaacaggaucagcgcuuuacagaucuaaaaaaaaaaaaaaaaaaaaaaaaaaaaaaaaaaaaaaaaaaaaaaaaaaaaaaaaaaaaaaaaugcaucccccccccccccccccccccccccccccccaaaggcucuuuucagagccaccagaauu

SEQ ID NO: 12157 - RNA, 1931 nt, Artificial Sequence
  mRNA product Design b-2 comprising derived and/or modified sequence from HRSV(Memphis-37)__AIY60640.1__F-del (opt5)
gggagagccucugcuggaguccggggaguggcguuggcugcuagagcgaagcuuaccauggagcugcccauccucaagaccaacgccauuacaacgauccuggcugccgugacccuuugcuucgcgagcucccagaauauuacagaagaguuuuaccaaucuaccuguagcgcugucuccaaaggcuaucugucugcccucagaacagggugguacaccagcguuaucacaauugaacuguccaacaucaaggagaauaaaugcaacggaaccgacgccaaggugaaacuuaucaagcaggaacuggauaaguauaaaaaugcugugacggagcuccagcugcugaugcagucuaccccugccgcuaacaaucgggcccgcagagagcucccgcgguucaugaacuacacacugaauaacaccaagaauaacaaugucacacuuagcaaaaagcgcaaaagacgguuucugggcuuccuccugggggugggauccgcgauugccagcggcaucgcuguuucuaaggugcuucaccuggaaggggaggucaacaagauuaaaaaugcccuccuguccaccaacaaggcugugguuagccugucuaacggaguguccguccucacgagcaaagugcuggaccuuaagaauuauaucgauaaacaacugcuccccauugugaacaagcagucuuguuccaucagcaauauugaaacagucaucgaguuucagcagaaaaacaaucgccugcuugagaucaccagagaauuuuccguuaacgccggcgugacaaccccugugucuaccuacaugcugacaaauagcgagcuccugucccugauuaacgacaugcccaucacgaaugaucaaaagaagcucaugagcaacaauguccagauugugcggcagcagucuuauuccaucaugagcauuaucaaagaagagguucuggcguacgugguccaacuuccucuguacggcgugaucgacacccccugcuggaagcuccauacaucuccucuguguaccacaaacaccaaagaagggagcaauauuugccuuacgcgcacagauagaggaugguauugugacaacgccggcuccguuucuuucuucccgcaggcugagaccugcaaggugcagagcaaucgggucuuuugugauaccaugaacucccugacacuccccagcgaggugaaccugugcaauaucgacauuuucaacccuaaauacgauuguaagaucaugaccucuaagacagacgucuccagcucugugauuacgucccugggggccaucguuagcugcuauggaaaaaccaagugcacagcuuccaauaaaaaccgcggcaucauuaagaccuuuucuaaugggugugauuacgugagcaacaaaggagucgacacaguguccguuggcaauacccucuauuacgugaacaagcaagaaggcaagucucuguaugucaaaggggagcccaucauuaauuucuacgacccucuuguguuucccagcgaugaguucgacgccuccaucagccaggugaacgaaaagauuaaucagucucuggccuucaucagaaaauccgaugaacuccugcacaacguuaaugucggaaagagcacgaccaacauuaugaucacaaccaucauuaucgugauuaucgugauucugcuucuccugaucgcugucggccuguuucucuacugcaaagcgcggugaggacuaguguccaccugucccuccugggcugcuggauugucucguuuuccugccaaauaaacaggaucagcgcuuuacagaucuaaaaaaaaaaaaaaaaaaaaaaaaaaaaaaaaaaaaaaaaaaaaaaaaaaaaaaaaaaaaaaaaugcaucccccccccccccccccccccccccccccccaaaggcucuuuucagagccaccagaauu

SEQ ID NO: 12158 - RNA, 1931 nt, Artificial Sequence
  mRNA product Design b-2 comprising derived and/or modified sequence from HRSV(Memphis-37)__AIY60640.1__F-del (opt6)
gggagagccucugcuggaguccggggaguggcguuggcugcuagagcgaagcuuaccauggaacucccaauauuaaaaacuaacgcaaucacaaccauauuagcagccgucacucuaugcuuugccuccucacaaaauauaacagaagaauuuuaccaauccacaugcucagccguuagcaaaggauaucuaucagcccuaagaacaggcugguauacuucaguaauaacaauagaacuaucaaauauaaaagaaaacaaaugcaacggaaccgacgcuaaaguaaagcucauaaaacaagaauuagacaaauacaaaaaugcaguaacagaacuacaacuccuaaugcaaucaaccccagccgccaauaacagagcuagacgagaacuaccccgauucaugaauuacacacuaaacaacacaaaaaacaacaauguaacacucucaaaaaaaagaaaacgaagauucuuagguuuucuccugggaguaggaucagcaaucgcuuccggaaucgcagucaguaaaguccuucaccuugaaggcgaaguaaacaaaauaaaaaaugcacuacuaucuacaaauaaagcaguaguaucccuauccaauggcgucucaguauuaaccucaaaaguacucgaccuuaaaaauuauauagacaaacaauuacuacccauagucaauaaacaauccuguuccauaucaaacauagaaacaguaaucgaauuucaacaaaaaaacaacagauuacuagaaauaacacgcgaauuuucagucaacgccggaguaaccacacccgucucaacauacaugcuaaccaacuccgaacuacuaucacuuaucaacgacaugccaauaacaaaugaccaaaaaaaacucaugucaaacaacguacaaauaguccgccaacaaucauacucuauaaugucuauuaucaaagaagaaguucucgcauacguaguacaacuaccacuauauggugucauagacacaccauguuggaaacuccauacaucacccuuauguacaaccaauacaaaagaaggcucaaacaucugccuaacucgaacagaccgaggaugguacugcgacaaugcaggaucugucucauucuucccucaagcagaaacauguaaaguucaaucuaauagaguuuucugcgauacaaugaacucacuaacucuaccaucagaaguaaaucucuguaauauugacauauucaacccaaaauacgauugcaagaucaugacaucaaaaacugacguaucauccucagucaucaccucauuaggagcaaucguaagcuguuacgggaaaacaaaaugcaccgcuucuaacaaaaauagaggaauaauuaaaaccuucucaaacggaugcgauuacgucuccaauaaaggaguagauacaguaagcguaggaaauacucuauacuacgucaauaaacaagaaggaaaaucacuuuaugucaaaggagaacccauaauaaauuucuacgacccauuagucuucccaucagaugaauuugacgcauccauaucccaagucaacgaaaaaaucaaucaaucacuagcauucauacgaaaaucagacgaacuacuacacaacguuaacguaggaaaaucaacaaccaacaucaugauaaccacuauaauaaucgucauaauagucauccuauuauuacuaauagccguaggccuuuuccuauacuguaaagcuagauaaggacuaguguccaccugucccuccugggcugcuggauugucucguuuuccugccaaauaaacaggaucagcgcuuuacagaucuaaaaaaaaaaaaaaaaaaaaaaaaaaaaaaaaaaaaaaaaaaaaaaaaaaaaaaaaaaaaaaaaugcaucccccccccccccccccccccccccccccccaaaggcucuuuucagagccaccagaauu

SEQ ID NO: 12159 - RNA, 1931 nt, Artificial Sequence
  mRNA product Design b-2 comprising derived and/or modified sequence from HRSV(Memphis-37)__AIY60640.1__F-del (opt11)
gggagagccucugcuggaguccggggaguggcguuggcugcuagagcgaagcuuaccauggaacucccgauccucaaaaccaacgccaucaccacuauccucgccgccguaacccucugcuucgccucaucccaaaacaucaccgaagaauuuuaccaauccacaugcuccgccgucuccaaagguuaccucucagcccuccgcaccggcugguacaccuccguuaucaccaucgaacuuuccaacauaaaagagaacaagugcaacggcaccgacgcaaaaguaaaacuaaucaaacaagaacuagacaaauacaaaaacgccgucaccgaacuccagcuccucaugcaaucgacgcccgccgccaacaaccgagcaaggcgcgaacuuccacgcuucaugaacuacacccucaacaacacuaaaaacaacaacgugacccuauccaaaaagcguaaacgccgauuccuagguuuccuucucggugucggcuccgccauugccuccggcaucgcuguuuccaaaguccuccaccucgaaggcgaaguaaacaagauaaaaaacgcccuccucucuacaaacaaggccgugguaucgcucucuaacggcgucucuguacucaccuccaaaguccucgaccucaaaaacuacaucgacaagcaacuccucccuaucgucaauaaacaauccugcuccauuuccaacaucgaaacagugaucgaauuucaacaaaaaaacaaccgauuacuagaaaucacccgcgaauuuucagucaacgccggcgucacaacgccagucucaaccuacaugcucaccaacucagaacucuuaucacucaucaacgacaugcccaucacuaacgaccagaaaaaacugauguccaacaacgugcaaauaguccgccaacaguccuacuccaucauguccauaaucaaggaggaggugcucgccuacguaguccaacucccccucuacggagucauugacaccccuugcuggaaacuacacaccuccccucucugcaccaccaacaccaaagaaggcagcaacaucugccuaaccaggacggaccgaggaugguacugcgacaaugcaggcuccgucagcuucuucccacaagccgaaacaugcaaaguucaaucaaaccguguauucugcgacaccaugaacucacucacccuccccucagaaguaaaccuaugcaacauagauaucuucaaccccaaauacgacugcaaaauuaugaccuccaaaaccgaugucuccagcuccguuaucacgucacucggcgccaucgucuccugcuacggcaagaccaaaugcaccgccuccaacaaaaaccgcggaauaaucaaaacauucucuaacggcugcgacuacgucuccaauaaaggcgucgacaccgucuccgugggcaacacgcuguacuacgucaacaaacaagaaggcaaaucucuuuacgucaaaggugaaccaaucaucaacuucuacgacccccucguauuccccuccgacgaauuugacgcgagcaucucccaagucaacgaaaagaucaaccaaucccucgccuucauccgaaaaagcgacgaacuccuccacaacgucaacgucggcaaaaguaccacaaacauuaugaucaccaccaucaucauagucaucaucgucauccugcuccuacuaauagccgucggccucuucuuguacugcaaggcacgaugaggacuaguguccaccugucccuccugggcugcuggauugucucguuuuccugccaaauaaacaggaucagcgcuuuacagaucuaaaaaaaaaaaaaaaaaaaaaaaaaaaaaaaaaaaaaaaaaaaaaaaaaaaaaaaaaaaaaaaaugcaucccccccccccccccccccccccccccccccaaaggcucuuuucagagccaccagaauu

SEQ ID NO: 12160 - RNA, 1951 nt, Artificial Sequence
  mRNA product Design b-3 comprising derived and/or modified sequence from HRSV(Memphis-37)__AIY60640.1__F-del (wt)
gggagagucccgcagucggcguccagcggcucugcuuguucgugugugugucguugcaggccuuauucaagcuuaccauggaguugccaauccucaaaacaaaugcaauuaccacaauccuugcugcagucacacucuguuucgcuuccagucaaaacaucacugaagaauuuuaucaaucaacaugcagugcaguuagcaaaggcuaucuuagugcuuuaagaacugguugguauacuaguguuauaacuauagaauuaaguaauaucaaggaaaauaaguguaauggaacagaugcuaagguaaaauugauaaaacaagaauuagauaaauauaaaaaugcuguaacagaauugcaguugcucaugcaaagcacaccagcagccaacaaucgagccagaagagaacuaccaagguuuaugaauuauacacucaacaauaccaaaaauaacaauguaacauuaagcaagaaaaggaaaagaagauuucuuggcuuuuuguuagguguuggaucugcaaucgccaguggcauugcuguaucuaaaguccugcaccuagaaggggaagugaacaaaaucaaaaaugcucuacuauccacaaacaaggcuguagucagcuuaucaaauggaguuagugucuuaaccagcaaaguguuagaccucaaaaacuauauagauaaacaguuguuacccauugugaacaagcaaagcugcagcauaucaaacauugaaacugugauagaauuccaacaaaagaacaacagacuacuagagauuaccagggaauuuaguguuaaugcagguguaacuacaccuguaagcacuuauauguuaacaaauagugaauuauuaucauuaaucaaugauaugccuauaacaaaugaucagaaaaaguuaauguccaacaauguucaaauaguuagacagcaaaguuacucuaucauguccauaauaaaggaggaagucuuagcauauguaguucaauuaccacuauaugguguaauagauacaccuuguuggaaacuacacacauccccucuaugcacaaccaacacaaaggaaggguccaacaucuguuuaacaagaaccgacagaggaugguacugugacaaugcaggaucagugucuuucuucccacaagcugaaacaugcaaaguucaaucgaaucgaguauuuugugacacaaugaacagucuaacauuaccaagugaaguaaaucucugcaacauugacauauucaacccuaaauaugauugcaaaauuaugacuucaaaaacagaugugagcagcuccguuaucacaucucuaggagccauugugucaugcuauggcaaaacuaaauguacagcauccaauaaaaaucguggaaucauaaagacauuuucuaacgggugugauuauguaucaaauaaggggguggacacuguaucuguagguaauacauuauauuauguaaauaagcaagaaggaaaaagccucuauguaaaaggugaaccaauaauaaauuucuaugacccauuaguguucccuucugaugaauuugaugcaucaauaucucaagucaaugagaagauuaaccagagccuagcauuuauucguaaauccgaugaauuauuacauaauguaaauguugguaaauccaccacaaauaucaugauaacuacuauaauuauagugauuauaguaauauuguuauuauuaauugcaguugggcuguuccuauacugcaaggccagaugaggacuaguguccaccugucccuccugggcugcuggauugucucguuuuccugccaaauaaacaggaucagcgcuuuacagaucuaaaaaaaaaaaaaaaaaaaaaaaaaaaaaaaaaaaaaaaaaaaaaaaaaaaaaaaaaaaaaaaaugcaucccccccccccccccccccccccccccccccaaaggcucuuuucagagccaccagaauu

SEQ ID NO: 12161 - RNA, 1951 nt, Artificial Sequence
  mRNA product Design b-3 comprising derived and/or modified sequence from HRSV(Memphis-37)__AIY60640.1__F-del (opt1)
gggagagucccgcagucggcguccagcggcucugcuuguucgugugugugucguugcaggccuuauucaagcuuaccauggagcugcccauccucaagaccaacgccaucaccacgauccuggccgcggugacccugugcuucgccagcucccagaacaucaccgaggaguucuaccagagcacgugcuccgccgucagcaagggcuaccucuccgcccugcgcaccgggugguacaccagcgugaucaccaucgagcuguccaacaucaaggagaacaagugcaacggcaccgacgccaaggugaagcucaucaagcaggagcuggacaaguacaagaacgcggucacggagcugcagcuccugaugcagagcaccccggccgccaacaaccgggcccgccgggagcugccccgcuucaugaacuacacccucaacaacaccaagaacaacaacgugacgcuguccaagaagcggaagcgccgguuccugggguuccuccugggcguggggagcgcgaucgccuccggcaucgccgucagcaaggugcugcaccucgagggcgaggugaacaagaucaagaacgcccugcuguccaccaacaaggccgucgugagccucuccaacggggugagcguccugaccuccaaggugcuggaccucaagaacuacaucgacaagcagcugcugcccaucgugaacaagcagagcugcuccaucagcaacaucgagaccgucaucgaguuccagcagaagaacaaccgccuccuggagaucacgcgggaguucagcgugaacgcgggcgugaccacccccgucuccaccuacaugcugacgaacagcgagcuccugucccugaucaacgacaugccgaucaccaacgaccagaagaagcucaugagcaacaacgugcagaucgugcgccagcaguccuacagcaucauguccaucaucaaggaggagguccuggccuacguggugcagcugccccucuacggggucaucgacacccccugcuggaagcugcacaccagcccccugugcacgaccaacaccaaggagggcuccaacaucugccucacccggacggaccgcgggugguacugcgacaacgccggcagcguguccuucuucccgcaggccgagaccugcaagguccagagcaaccggguguucugcgacaccaugaacucccugacccugcccagcgaggugaaccucugcaacaucgacaucuucaaccccaaguacgacugcaagaucaugacguccaagaccgacgucagcuccagcgugaucaccucccugggcgccaucgugagcugcuacgggaagaccaagugcacggcgagcaacaagaaccgcggcaucaucaagaccuucuccaacgggugcgacuacgucagcaacaagggcguggacaccguguccgucggcaacacccuguacuacgugaacaagcaggagggcaagagccucuacgugaagggggagcccaucaucaacuucuacgacccgcuggucuuccccuccgacgaguucgacgccagcaucucccaggugaacgagaagaucaaccagagccuggccuucauccggaaguccgacgagcuccugcacaacgugaacgucggcaagagcaccacgaacaucaugaucaccaccaucaucaucgugaucaucgugauccugcugcuccugaucgccgucgggcuguuccucuacugcaaggcccgcugaggacuaguguccaccugucccuccugggcugcuggauugucucguuuuccugccaaauaaacaggaucagcgcuuuacagaucuaaaaaaaaaaaaaaaaaaaaaaaaaaaaaaaaaaaaaaaaaaaaaaaaaaaaaaaaaaaaaaaaugcaucccccccccccccccccccccccccccccccaaaggcucuuuucagagccaccagaauu

SEQ ID NO: 12162 - RNA, 1951 nt, Artificial Sequence
  mRNA product Design b-3 comprising derived and/or modified sequence from HRSV(Memphis-37)__AIY60640.1__F-del (opt2)
gggagagucccgcagucggcguccagcggcucugcuuguucgugugugugucguugcaggccuuauucaagcuuaccauggagcuccccauccucaagaccaacgccaucaccaccauccucgccgccgucacccucugcuucgccuccucccagaacaucaccgaggaguucuaccaguccaccugcuccgccgucuccaagggcuaccucuccgcccuccgcaccggcugguacaccuccgucaucaccaucgagcucuccaacaucaaggagaacaagugcaacggcaccgacgccaaggucaagcucaucaagcaggagcucgacaaguacaagaacgccgucaccgagcuccagcuccucaugcaguccacccccgccgccaacaaccgcgcccgccgcgagcucccccgcuucaugaacuacacccucaacaacaccaagaacaacaacgucacccucuccaagaagcgcaagcgccgcuuccucggcuuccuccucggcgucggcuccgccaucgccuccggcaucgccgucuccaagguccuccaccucgagggcgaggucaacaagaucaagaacgcccuccucuccaccaacaaggccgucgucucccucuccaacggcgucuccguccucaccuccaagguccucgaccucaagaacuacaucgacaagcagcuccuccccaucgucaacaagcaguccugcuccaucuccaacaucgagaccgucaucgaguuccagcagaagaacaaccgccuccucgagaucacccgcgaguucuccgucaacgccggcgucaccacccccgucuccaccuacaugcucaccaacuccgagcuccucucccucaucaacgacaugcccaucaccaacgaccagaagaagcucauguccaacaacguccagaucguccgccagcaguccuacuccaucauguccaucaucaaggaggagguccucgccuacgucguccagcucccccucuacggcgucaucgacacccccugcuggaagcuccacaccuccccccucugcaccaccaacaccaaggagggcuccaacaucugccucacccgcaccgaccgcggcugguacugcgacaacgccggcuccgucuccuucuucccccaggccgagaccugcaagguccaguccaaccgcgucuucugcgacaccaugaacucccucacccuccccuccgaggucaaccucugcaacaucgacaucuucaaccccaaguacgacugcaagaucaugaccuccaagaccgacgucuccuccuccgucaucaccucccucggcgccaucgucuccugcuacggcaagaccaagugcaccgccuccaacaagaaccgcggcaucaucaagaccuucuccaacggcugcgacuacgucuccaacaagggcgucgacaccgucuccgucggcaacacccucuacuacgucaacaagcaggagggcaagucccucuacgucaagggcgagcccaucaucaacuucuacgacccccucgucuuccccuccgacgaguucgacgccuccaucucccaggucaacgagaagaucaaccagucccucgccuucauccgcaaguccgacgagcuccuccacaacgucaacgucggcaaguccaccaccaacaucaugaucaccaccaucaucaucgucaucaucgucauccuccuccuccucaucgccgucggccucuuccucuacugcaaggcccgcugaggacuaguguccaccugucccuccugggcugcuggauugucucguuuuccugccaaauaaacaggaucagcgcuuuacagaucuaaaaaaaaaaaaaaaaaaaaaaaaaaaaaaaaaaaaaaaaaaaaaaaaaaaaaaaaaaaaaaaaugcaucccccccccccccccccccccccccccccccaaaggcucuuuucagagccaccagaauu

SEQ ID NO: 12163 - RNA, 1951 nt, Artificial Sequence
  mRNA product Design b-3 comprising derived and/or modified sequence from HRSV(Memphis-37)__AIY60640.1__F-del (opt3)
gggagagucccgcagucggcguccagcggcucugcuuguucgugugugugucguugcaggccuuauucaagcuuaccauggagcugcccauccucaagaccaacgccauuacaacuauacuugcugcagugacgcugugcuucgccagcucccagaauaucaccgaagaguuuuaccaaucuacauguucagcggucaguaaaggcuauuugagcgcuuuaagaacugggugguacaccuccguuauuacaaucgaacugucuaacauuaaggagaauaaaugcaacggaaccgacgccaaggugaaacuaaucaagcaggaacucgauaaguauaaaaaugcaguaacugagcugcagcuucugaugcagucgaccccugccgcuaacaauagggcacggcgcgaguugccacgauucaugaacuacacacucaauaacacgaagaauaacaaugugacucugagcaaaaagcguaaaagaagguuucuggguuuccucuuaggcgucgggucagccauagcuaguggaaucgccguguccaagguucugcaccuugaaggcgaggugaacaagauuaaaaaugcguugcugucuaccaacaaggcagucgugagccuauccaacgguguaucaguucucacaaguaaagugcuggaccuuaagaauuauaucgauaaacaacuguugccgauugucaacaagcagagcuguucuaucuccaauauagaaacugugauugaguuucagcagaaaaacaaucggcuccuggagaucacccgcgaguucucagugaacgccggggucacaacccccguuagcacguacauguuaacuaauagugaacugcucucucuuauuaacgacaugccuaucacaaaugaucaaaagaagcugauguccaacaaugugcagaucguaagacagcagagcuauucgauuaugucuauaaucaaagaagagguguuggcuuacgucgugcaacuaccacuguacggaguuauugacacccccugcuggaagcuccauacuuccccucuguguacaaccaacacgaaagaaggcucaaauaucugccuuaccaggacagaucggggcugguauugugacaacgccgggagugugagcuuuuucccacaggcagagacuugcaagguccaguccaaucgcguguuuugugauaccaugaacucucugacauugcccagcgagguaaaccucugcaauauagacauuuucaacccuaaauacgauuguaagaucaugacuucaaagaccgacguuaguuccagcgugaucacaucucugggagcuauugucucaugcuaugguaaaaccaagugcacugccaguaauaaaaaccgaggcaucauuaagacguuuagcaaugggugugauuacguguccaacaaaggagucgacacagugucuguuggcaauaccuuauauuacgugaacaagcaagaagguaagucgcuguauguaaaaggggagccaauaaucaauuucuacgacccgcuagucuuucccagcgaugaguucgacgcguccauuucacaggugaacgaaaagaucaaucagagucucgccuucaucagaaaaucugaugaacugcuucacaacguuaaugugggaaagagcacuaccaacauuaugauaacaaccaucauuaucgucauuaucgugauauugcugcuccugaucgcaguaggccuuuuucuguacugcaaagcuaggugaggacuaguguccaccugucccuccugggcugcuggauugucucguuuuccugccaaauaaacaggaucagcgcuuuacagaucuaaaaaaaaaaaaaaaaaaaaaaaaaaaaaaaaaaaaaaaaaaaaaaaaaaaaaaaaaaaaaaaaugcaucccccccccccccccccccccccccccccccaaaggcucuuuucagagccaccagaauu

SEQ ID NO: 12164 - RNA, 1951 nt, Artificial Sequence
  mRNA product Design b-3 comprising derived and/or modified sequence from HRSV(Memphis-37)__AIY60640.1__F-del (opt4)
gggagagucccgcagucggcguccagcggcucugcuuguucgugugugugucguugcaggccuuauucaagcuuaccauggagcugcccauccugaagaccaacgccaucaccaccauccuggccgccgugacccugugcuucgccagcagccagaacaucaccgaggaguucuaccagagcaccugcagcgccgugagcaagggcuaccugagcgcccugagaaccggcugguacaccagcgugaucaccaucgagcugagcaacaucaaggagaacaagugcaacggcaccgacgccaaggugaagcugaucaagcaggagcuggacaaguacaagaacgccgugaccgagcugcagcugcugaugcagagcacccccgccgccaacaacagagccagaagagagcugcccagauucaugaacuacacccugaacaacaccaagaacaacaacgugacccugagcaagaagagaaagagaagauuccugggcuuccugcugggcgugggcagcgccaucgccagcggcaucgccgugagcaaggugcugcaccuggagggcgaggugaacaagaucaagaacgcccugcugagcaccaacaaggccguggugagccugagcaacggcgugagcgugcugaccagcaaggugcuggaccugaagaacuacaucgacaagcagcugcugcccaucgugaacaagcagagcugcagcaucagcaacaucgagaccgugaucgaguuccagcagaagaacaacagacugcuggagaucaccagagaguucagcgugaacgccggcgugaccacccccgugagcaccuacaugcugaccaacagcgagcugcugagccugaucaacgacaugcccaucaccaacgaccagaagaagcugaugagcaacaacgugcagaucgugagacagcagagcuacagcaucaugagcaucaucaaggaggaggugcuggccuacguggugcagcugccccuguacggcgugaucgacacccccugcuggaagcugcacaccagcccccugugcaccaccaacaccaaggagggcagcaacaucugccugaccagaaccgacagaggcugguacugcgacaacgccggcagcgugagcuucuucccccaggccgagaccugcaaggugcagagcaacagaguguucugcgacaccaugaacagccugacccugcccagcgaggugaaccugugcaacaucgacaucuucaaccccaaguacgacugcaagaucaugaccagcaagaccgacgugagcagcagcgugaucaccagccugggcgccaucgugagcugcuacggcaagaccaagugcaccgccagcaacaagaacagaggcaucaucaagaccuucagcaacggcugcgacuacgugagcaacaagggcguggacaccgugagcgugggcaacacccuguacuacgugaacaagcaggagggcaagagccuguacgugaagggcgagcccaucaucaacuucuacgacccccugguguuccccagcgacgaguucgacgccagcaucagccaggugaacgagaagaucaaccagagccuggccuucaucagaaagagcgacgagcugcugcacaacgugaacgugggcaagagcaccaccaacaucaugaucaccaccaucaucaucgugaucaucgugauccugcugcugcugaucgccgugggccuguuccuguacugcaaggccagaugaggacuaguguccaccugucccuccugggcugcuggauugucucguuuuccugccaaauaaacaggaucagcgcuuuacagaucuaaaaaaaaaaaaaaaaaaaaaaaaaaaaaaaaaaaaaaaaaaaaaaaaaaaaaaaaaaaaaaaaugcaucccccccccccccccccccccccccccccccaaaggcucuuuucagagccaccagaauu

SEQ ID NO: 12165 - RNA, 1951 nt, Artificial Sequence
  mRNA product Design b-3 comprising derived and/or modified sequence from HRSV(Memphis-37)__AIY60640.1__F-del (opt5)
gggagagucccgcagucggcguccagcggcucugcuuguucgugugugugucguugcaggccuuauucaagcuuaccauggagcugcccauccucaagaccaacgccauuacaacgauccuggcugccgugacccuuugcuucgcgagcucccagaauauuacagaagaguuuuaccaaucuaccuguagcgcugucuccaaaggcuaucugucugcccucagaacagggugguacaccagcguuaucacaauugaacuguccaacaucaaggagaauaaaugcaacggaaccgacgccaaggugaaacuuaucaagcaggaacuggauaaguauaaaaaugcugugacggagcuccagcugcugaugcagucuaccccugccgcuaacaaucgggcccgcagagagcucccgcgguucaugaacuacacacugaauaacaccaagaauaacaaugucacacuuagcaaaaagcgcaaaagacgguuucugggcuuccuccugggggugggauccgcgauugccagcggcaucgcuguuucuaaggugcuucaccuggaaggggaggucaacaagauuaaaaaugcccuccuguccaccaacaaggcugugguuagccugucuaacggaguguccguccucacgagcaaagugcuggaccuuaagaauuauaucgauaaacaacugcuccccauugugaacaagcagucuuguuccaucagcaauauugaaacagucaucgaguuucagcagaaaaacaaucgccugcuugagaucaccagagaauuuuccguuaacgccggcgugacaaccccugugucuaccuacaugcugacaaauagcgagcuccugucccugauuaacgacaugcccaucacgaaugaucaaaagaagcucaugagcaacaauguccagauugugcggcagcagucuuauuccaucaugagcauuaucaaagaagagguucuggcguacgugguccaacuuccucuguacggcgugaucgacacccccugcuggaagcuccauacaucuccucuguguaccacaaacaccaaagaagggagcaauauuugccuuacgcgcacagauagaggaugguauugugacaacgccggcuccguuucuuucuucccgcaggcugagaccugcaaggugcagagcaaucgggucuuuugugauaccaugaacucccugacacuccccagcgaggugaaccugugcaauaucgacauuuucaacccuaaauacgauuguaagaucaugaccucuaagacagacgucuccagcucugugauuacgucccugggggccaucguuagcugcuauggaaaaaccaagugcacagcuuccaauaaaaaccgcggcaucauuaagaccuuuucuaaugggugugauuacgugagcaacaaaggagucgacacaguguccguuggcaauacccucuauuacgugaacaagcaagaaggcaagucucuguaugucaaaggggagcccaucauuaauuucuacgacccucuuguguuucccagcgaugaguucgacgccuccaucagccaggugaacgaaaagauuaaucagucucuggccuucaucagaaaauccgaugaacuccugcacaacguuaaugucggaaagagcacgaccaacauuaugaucacaaccaucauuaucgugauuaucgugauucugcuucuccugaucgcugucggccuguuucucuacugcaaagcgcggugaggacuaguguccaccugucccuccugggcugcuggauugucucguuuuccugccaaauaaacaggaucagcgcuuuacagaucuaaaaaaaaaaaaaaaaaaaaaaaaaaaaaaaaaaaaaaaaaaaaaaaaaaaaaaaaaaaaaaaaugcaucccccccccccccccccccccccccccccccaaaggcucuuuucagagccaccagaauu

SEQ ID NO: 12166 - RNA, 1951 nt, Artificial Sequence
  mRNA product Design b-3 comprising derived and/or modified sequence from HRSV(Memphis-37)__AIY60640.1__F-del (opt6)
gggagagucccgcagucggcguccagcggcucugcuuguucgugugugugucguugcaggccuuauucaagcuuaccauggaacucccaauauuaaaaacuaacgcaaucacaaccauauuagcagccgucacucuaugcuuugccuccucacaaaauauaacagaagaauuuuaccaauccacaugcucagccguuagcaaaggauaucuaucagcccuaagaacaggcugguauacuucaguaauaacaauagaacuaucaaauauaaaagaaaacaaaugcaacggaaccgacgcuaaaguaaagcucauaaaacaagaauuagacaaauacaaaaaugcaguaacagaacuacaacuccuaaugcaaucaaccccagccgccaauaacagagcuagacgagaacuaccccgauucaugaauuacacacuaaacaacacaaaaaacaacaauguaacacucucaaaaaaaagaaaacgaagauucuuagguuuucuccugggaguaggaucagcaaucgcuuccggaaucgcagucaguaaaguccuucaccuugaaggcgaaguaaacaaaauaaaaaaugcacuacuaucuacaaauaaagcaguaguaucccuauccaauggcgucucaguauuaaccucaaaaguacucgaccuuaaaaauuauauagacaaacaauuacuacccauagucaauaaacaauccuguuccauaucaaacauagaaacaguaaucgaauuucaacaaaaaaacaacagauuacuagaaauaacacgcgaauuuucagucaacgccggaguaaccacacccgucucaacauacaugcuaaccaacuccgaacuacuaucacuuaucaacgacaugccaauaacaaaugaccaaaaaaaacucaugucaaacaacguacaaauaguccgccaacaaucauacucuauaaugucuauuaucaaagaagaaguucucgcauacguaguacaacuaccacuauauggugucauagacacaccauguuggaaacuccauacaucacccuuauguacaaccaauacaaaagaaggcucaaacaucugccuaacucgaacagaccgaggaugguacugcgacaaugcaggaucugucucauucuucccucaagcagaaacauguaaaguucaaucuaauagaguuuucugcgauacaaugaacucacuaacucuaccaucagaaguaaaucucuguaauauugacauauucaacccaaaauacgauugcaagaucaugacaucaaaaacugacguaucauccucagucaucaccucauuaggagcaaucguaagcuguuacgggaaaacaaaaugcaccgcuucuaacaaaaauagaggaauaauuaaaaccuucucaaacggaugcgauuacgucuccaauaaaggaguagauacaguaagcguaggaaauacucuauacuacgucaauaaacaagaaggaaaaucacuuuaugucaaaggagaacccauaauaaauuucuacgacccauuagucuucccaucagaugaauuugacgcauccauaucccaagucaacgaaaaaaucaaucaaucacuagcauucauacgaaaaucagacgaacuacuacacaacguuaacguaggaaaaucaacaaccaacaucaugauaaccacuauaauaaucgucauaauagucauccuauuauuacuaauagccguaggccuuuuccuauacuguaaagcuagauaaggacuaguguccaccugucccuccugggcugcuggauugucucguuuuccugccaaauaaacaggaucagcgcuuuacagaucuaaaaaaaaaaaaaaaaaaaaaaaaaaaaaaaaaaaaaaaaaaaaaaaaaaaaaaaaaaaaaaaaugcaucccccccccccccccccccccccccccccccaaaggcucuuuucagagccaccagaauu

SEQ ID NO: 12167 - RNA, 1951 nt, Artificial Sequence
  mRNA product Design b-3 comprising derived and/or modified sequence from HRSV(Memphis-37)__AIY60640.1__F-del (opt11)
gggagagucccgcagucggcguccagcggcucugcuuguucgugugugugucguugcaggccuuauucaagcuuaccauggaacucccgauccucaaaaccaacgccaucaccacuauccucgccgccguaacccucugcuucgccucaucccaaaacaucaccgaagaauuuuaccaauccacaugcuccgccgucuccaaagguuaccucucagcccuccgcaccggcugguacaccuccguuaucaccaucgaacuuuccaacauaaaagagaacaagugcaacggcaccgacgcaaaaguaaaacuaaucaaacaagaacuagacaaauacaaaaacgccgucaccgaacuccagcuccucaugcaaucgacgcccgccgccaacaaccgagcaaggcgcgaacuuccacgcuucaugaacuacacccucaacaacacuaaaaacaacaacgugacccuauccaaaaagcguaaacgccgauuccuagguuuccuucucggugucggcuccgccauugccuccggcaucgcuguuuccaaaguccuccaccucgaaggcgaaguaaacaagauaaaaaacgcccuccucucuacaaacaaggccgugguaucgcucucuaacggcgucucuguacucaccuccaaaguccucgaccucaaaaacuacaucgacaagcaacuccucccuaucgucaauaaacaauccugcuccauuuccaacaucgaaacagugaucgaauuucaacaaaaaaacaaccgauuacuagaaaucacccgcgaauuuucagucaacgccggcgucacaacgccagucucaaccuacaugcucaccaacucagaacucuuaucacucaucaacgacaugcccaucacuaacgaccagaaaaaacugauguccaacaacgugcaaauaguccgccaacaguccuacuccaucauguccauaaucaaggaggaggugcucgccuacguaguccaacucccccucuacggagucauugacaccccuugcuggaaacuacacaccuccccucucugcaccaccaacaccaaagaaggcagcaacaucugccuaaccaggacggaccgaggaugguacugcgacaaugcaggcuccgucagcuucuucccacaagccgaaacaugcaaaguucaaucaaaccguguauucugcgacaccaugaacucacucacccuccccucagaaguaaaccuaugcaacauagauaucuucaaccccaaauacgacugcaaaauuaugaccuccaaaaccgaugucuccagcuccguuaucacgucacucggcgccaucgucuccugcuacggcaagaccaaaugcaccgccuccaacaaaaaccgcggaauaaucaaaacauucucuaacggcugcgacuacgucuccaauaaaggcgucgacaccgucuccgugggcaacacgcuguacuacgucaacaaacaagaaggcaaaucucuuuacgucaaaggugaaccaaucaucaacuucuacgacccccucguauuccccuccgacgaauuugacgcgagcaucucccaagucaacgaaaagaucaaccaaucccucgccuucauccgaaaaagcgacgaacuccuccacaacgucaacgucggcaaaaguaccacaaacauuaugaucaccaccaucaucauagucaucaucgucauccugcuccuacuaauagccgucggccucuucuuguacugcaaggcacgaugaggacuaguguccaccugucccuccugggcugcuggauugucucguuuuccugccaaauaaacaggaucagcgcuuuacagaucuaaaaaaaaaaaaaaaaaaaaaaaaaaaaaaaaaaaaaaaaaaaaaaaaaaaaaaaaaaaaaaaaugcaucccccccccccccccccccccccccccccccaaaggcucuuuucagagccaccagaauu

SEQ ID NO: 12168 - RNA, 2002 nt, Artificial Sequence
  mRNA product Design b-4 comprising derived and/or modified sequence from HRSV(Memphis-37)__AIY60640.1__F-del (wt)
gggagagucccgcagucggcguccagcggcucugcuuguucgugugugugucguugcaggccuuauucaagcuuaccauggaguugccaauccucaaaacaaaugcaauuaccacaauccuugcugcagucacacucuguuucgcuuccagucaaaacaucacugaagaauuuuaucaaucaacaugcagugcaguuagcaaaggcuaucuuagugcuuuaagaacugguugguauacuaguguuauaacuauagaauuaaguaauaucaaggaaaauaaguguaauggaacagaugcuaagguaaaauugauaaaacaagaauuagauaaauauaaaaaugcuguaacagaauugcaguugcucaugcaaagcacaccagcagccaacaaucgagccagaagagaacuaccaagguuuaugaauuauacacucaacaauaccaaaaauaacaauguaacauuaagcaagaaaaggaaaagaagauuucuuggcuuuuuguuagguguuggaucugcaaucgccaguggcauugcuguaucuaaaguccugcaccuagaaggggaagugaacaaaaucaaaaaugcucuacuauccacaaacaaggcuguagucagcuuaucaaauggaguuagugucuuaaccagcaaaguguuagaccucaaaaacuauauagauaaacaguuguuacccauugugaacaagcaaagcugcagcauaucaaacauugaaacugugauagaauuccaacaaaagaacaacagacuacuagagauuaccagggaauuuaguguuaaugcagguguaacuacaccuguaagcacuuauauguuaacaaauagugaauuauuaucauuaaucaaugauaugccuauaacaaaugaucagaaaaaguuaauguccaacaauguucaaauaguuagacagcaaaguuacucuaucauguccauaauaaaggaggaagucuuagcauauguaguucaauuaccacuauaugguguaauagauacaccuuguuggaaacuacacacauccccucuaugcacaaccaacacaaaggaaggguccaacaucuguuuaacaagaaccgacagaggaugguacugugacaaugcaggaucagugucuuucuucccacaagcugaaacaugcaaaguucaaucgaaucgaguauuuugugacacaaugaacagucuaacauuaccaagugaaguaaaucucugcaacauugacauauucaacccuaaauaugauugcaaaauuaugacuucaaaaacagaugugagcagcuccguuaucacaucucuaggagccauugugucaugcuauggcaaaacuaaauguacagcauccaauaaaaaucguggaaucauaaagacauuuucuaacgggugugauuauguaucaaauaaggggguggacacuguaucuguagguaauacauuauauuauguaaauaagcaagaaggaaaaagccucuauguaaaaggugaaccaauaauaaauuucuaugacccauuaguguucccuucugaugaauuugaugcaucaauaucucaagucaaugagaagauuaaccagagccuagcauuuauucguaaauccgaugaauuauuacauaauguaaauguugguaaauccaccacaaauaucaugauaacuacuauaauuauagugauuauaguaauauuguuauuauuaauugcaguugggcuguuccuauacugcaaggccagaugaggacuaguaauaaggaaacuguaugaaugucugugggcaggaagugaagagauccuucuguaaagguuuuuggaauuaugucugcugaauaauaaacuuuuuugaaauaauaaaucugguagaaaaaugagaucuaaaaaaaaaaaaaaaaaaaaaaaaaaaaaaaaaaaaaaaaaaaaaaaaaaaaaaaaaaaaaaaaugcaucccccccccccccccccccccccccccccccaaaggcucuuuucagagccaccagaauu

SEQ ID NO: 12169 - RNA, 2002 nt, Artificial Sequence
  mRNA product Design b-4 comprising derived and/or modified sequence from HRSV(Memphis-37)__AIY60640.1__F-del (opt1)
gggagagucccgcagucggcguccagcggcucugcuuguucgugugugugucguugcaggccuuauucaagcuuaccauggagcugcccauccucaagaccaacgccaucaccacgauccuggccgcggugacccugugcuucgccagcucccagaacaucaccgaggaguucuaccagagcacgugcuccgccgucagcaagggcuaccucuccgcccugcgcaccgggugguacaccagcgugaucaccaucgagcuguccaacaucaaggagaacaagugcaacggcaccgacgccaaggugaagcucaucaagcaggagcuggacaaguacaagaacgcggucacggagcugcagcuccugaugcagagcaccccggccgccaacaaccgggcccgccgggagcugccccgcuucaugaacuacacccucaacaacaccaagaacaacaacgugacgcuguccaagaagcggaagcgccgguuccugggguuccuccugggcguggggagcgcgaucgccuccggcaucgccgucagcaaggugcugcaccucgagggcgaggugaacaagaucaagaacgcccugcuguccaccaacaaggccgucgugagccucuccaacggggugagcguccugaccuccaaggugcuggaccucaagaacuacaucgacaagcagcugcugcccaucgugaacaagcagagcugcuccaucagcaacaucgagaccgucaucgaguuccagcagaagaacaaccgccuccuggagaucacgcgggaguucagcgugaacgcgggcgugaccacccccgucuccaccuacaugcugacgaacagcgagcuccugucccugaucaacgacaugccgaucaccaacgaccagaagaagcucaugagcaacaacgugcagaucgugcgccagcaguccuacagcaucauguccaucaucaaggaggagguccuggccuacguggugcagcugccccucuacggggucaucgacacccccugcuggaagcugcacaccagcccccugugcacgaccaacaccaaggagggcuccaacaucugccucacccggacggaccgcgggugguacugcgacaacgccggcagcguguccuucuucccgcaggccgagaccugcaagguccagagcaaccggguguucugcgacaccaugaacucccugacccugcccagcgaggugaaccucugcaacaucgacaucuucaaccccaaguacgacugcaagaucaugacguccaagaccgacgucagcuccagcgugaucaccucccugggcgccaucgugagcugcuacgggaagaccaagugcacggcgagcaacaagaaccgcggcaucaucaagaccuucuccaacgggugcgacuacgucagcaacaagggcguggacaccguguccgucggcaacacccuguacuacgugaacaagcaggagggcaagagccucuacgugaagggggagcccaucaucaacuucuacgacccgcuggucuuccccuccgacgaguucgacgccagcaucucccaggugaacgagaagaucaaccagagccuggccuucauccggaaguccgacgagcuccugcacaacgugaacgucggcaagagcaccacgaacaucaugaucaccaccaucaucaucgugaucaucgugauccugcugcuccugaucgccgucgggcuguuccucuacugcaaggcccgcugaggacuaguaauaaggaaacuguaugaaugucugugggcaggaagugaagagauccuucuguaaagguuuuuggaauuaugucugcugaauaauaaacuuuuuugaaauaauaaaucugguagaaaaaugagaucuaaaaaaaaaaaaaaaaaaaaaaaaaaaaaaaaaaaaaaaaaaaaaaaaaaaaaaaaaaaaaaaaugcaucccccccccccccccccccccccccccccccaaaggcucuuuucagagccaccagaauu

SEQ ID NO: 12170 - RNA, 2002 nt, Artificial Sequence
  mRNA product Design b-4 comprising derived and/or modified sequence from HRSV(Memphis-37)__AIY60640.1__F-del (opt2)
gggagagucccgcagucggcguccagcggcucugcuuguucgugugugugucguugcaggccuuauucaagcuuaccauggagcuccccauccucaagaccaacgccaucaccaccauccucgccgccgucacccucugcuucgccuccucccagaacaucaccgaggaguucuaccaguccaccugcuccgccgucuccaagggcuaccucuccgcccuccgcaccggcugguacaccuccgucaucaccaucgagcucuccaacaucaaggagaacaagugcaacggcaccgacgccaaggucaagcucaucaagcaggagcucgacaaguacaagaacgccgucaccgagcuccagcuccucaugcaguccacccccgccgccaacaaccgcgcccgccgcgagcucccccgcuucaugaacuacacccucaacaacaccaagaacaacaacgucacccucuccaagaagcgcaagcgccgcuuccucggcuuccuccucggcgucggcuccgccaucgccuccggcaucgccgucuccaagguccuccaccucgagggcgaggucaacaagaucaagaacgcccuccucuccaccaacaaggccgucgucucccucuccaacggcgucuccguccucaccuccaagguccucgaccucaagaacuacaucgacaagcagcuccuccccaucgucaacaagcaguccugcuccaucuccaacaucgagaccgucaucgaguuccagcagaagaacaaccgccuccucgagaucacccgcgaguucuccgucaacgccggcgucaccacccccgucuccaccuacaugcucaccaacuccgagcuccucucccucaucaacgacaugcccaucaccaacgaccagaagaagcucauguccaacaacguccagaucguccgccagcaguccuacuccaucauguccaucaucaaggaggagguccucgccuacgucguccagcucccccucuacggcgucaucgacacccccugcuggaagcuccacaccuccccccucugcaccaccaacaccaaggagggcuccaacaucugccucacccgcaccgaccgcggcugguacugcgacaacgccggcuccgucuccuucuucccccaggccgagaccugcaagguccaguccaaccgcgucuucugcgacaccaugaacucccucacccuccccuccgaggucaaccucugcaacaucgacaucuucaaccccaaguacgacugcaagaucaugaccuccaagaccgacgucuccuccuccgucaucaccucccucggcgccaucgucuccugcuacggcaagaccaagugcaccgccuccaacaagaaccgcggcaucaucaagaccuucuccaacggcugcgacuacgucuccaacaagggcgucgacaccgucuccgucggcaacacccucuacuacgucaacaagcaggagggcaagucccucuacgucaagggcgagcccaucaucaacuucuacgacccccucgucuuccccuccgacgaguucgacgccuccaucucccaggucaacgagaagaucaaccagucccucgccuucauccgcaaguccgacgagcuccuccacaacgucaacgucggcaaguccaccaccaacaucaugaucaccaccaucaucaucgucaucaucgucauccuccuccuccucaucgccgucggccucuuccucuacugcaaggcccgcugaggacuaguaauaaggaaacuguaugaaugucugugggcaggaagugaagagauccuucuguaaagguuuuuggaauuaugucugcugaauaauaaacuuuuuugaaauaauaaaucugguagaaaaaugagaucuaaaaaaaaaaaaaaaaaaaaaaaaaaaaaaaaaaaaaaaaaaaaaaaaaaaaaaaaaaaaaaaaugcaucccccccccccccccccccccccccccccccaaaggcucuuuucagagccaccagaauu

SEQ ID NO: 12171 - RNA, 2002 nt, Artificial Sequence
  mRNA product Design b-4 comprising derived and/or modified sequence from HRSV(Memphis-37)__AIY60640.1__F-del (opt3)
gggagagucccgcagucggcguccagcggcucugcuuguucgugugugugucguugcaggccuuauucaagcuuaccauggagcugcccauccucaagaccaacgccauuacaacuauacuugcugcagugacgcugugcuucgccagcucccagaauaucaccgaagaguuuuaccaaucuacauguucagcggucaguaaaggcuauuugagcgcuuuaagaacugggugguacaccuccguuauuacaaucgaacugucuaacauuaaggagaauaaaugcaacggaaccgacgccaaggugaaacuaaucaagcaggaacucgauaaguauaaaaaugcaguaacugagcugcagcuucugaugcagucgaccccugccgcuaacaauagggcacggcgcgaguugccacgauucaugaacuacacacucaauaacacgaagaauaacaaugugacucugagcaaaaagcguaaaagaagguuucuggguuuccucuuaggcgucgggucagccauagcuaguggaaucgccguguccaagguucugcaccuugaaggcgaggugaacaagauuaaaaaugcguugcugucuaccaacaaggcagucgugagccuauccaacgguguaucaguucucacaaguaaagugcuggaccuuaagaauuauaucgauaaacaacuguugccgauugucaacaagcagagcuguucuaucuccaauauagaaacugugauugaguuucagcagaaaaacaaucggcuccuggagaucacccgcgaguucucagugaacgccggggucacaacccccguuagcacguacauguuaacuaauagugaacugcucucucuuauuaacgacaugccuaucacaaaugaucaaaagaagcugauguccaacaaugugcagaucguaagacagcagagcuauucgauuaugucuauaaucaaagaagagguguuggcuuacgucgugcaacuaccacuguacggaguuauugacacccccugcuggaagcuccauacuuccccucuguguacaaccaacacgaaagaaggcucaaauaucugccuuaccaggacagaucggggcugguauugugacaacgccgggagugugagcuuuuucccacaggcagagacuugcaagguccaguccaaucgcguguuuugugauaccaugaacucucugacauugcccagcgagguaaaccucugcaauauagacauuuucaacccuaaauacgauuguaagaucaugacuucaaagaccgacguuaguuccagcgugaucacaucucugggagcuauugucucaugcuaugguaaaaccaagugcacugccaguaauaaaaaccgaggcaucauuaagacguuuagcaaugggugugauuacguguccaacaaaggagucgacacagugucuguuggcaauaccuuauauuacgugaacaagcaagaagguaagucgcuguauguaaaaggggagccaauaaucaauuucuacgacccgcuagucuuucccagcgaugaguucgacgcguccauuucacaggugaacgaaaagaucaaucagagucucgccuucaucagaaaaucugaugaacugcuucacaacguuaaugugggaaagagcacuaccaacauuaugauaacaaccaucauuaucgucauuaucgugauauugcugcuccugaucgcaguaggccuuuuucuguacugcaaagcuaggugaggacuaguaauaaggaaacuguaugaaugucugugggcaggaagugaagagauccuucuguaaagguuuuuggaauuaugucugcugaauaauaaacuuuuuugaaauaauaaaucugguagaaaaaugagaucuaaaaaaaaaaaaaaaaaaaaaaaaaaaaaaaaaaaaaaaaaaaaaaaaaaaaaaaaaaaaaaaaugcaucccccccccccccccccccccccccccccccaaaggcucuuuucagagccaccagaauu

SEQ ID NO: 12172 - RNA, 2002 nt, Artificial Sequence
  mRNA product Design b-4 comprising derived and/or modified sequence from HRSV(Memphis-37)__AIY60640.1__F-del (opt4)
gggagagucccgcagucggcguccagcggcucugcuuguucgugugugugucguugcaggccuuauucaagcuuaccauggagcugcccauccugaagaccaacgccaucaccaccauccuggccgccgugacccugugcuucgccagcagccagaacaucaccgaggaguucuaccagagcaccugcagcgccgugagcaagggcuaccugagcgcccugagaaccggcugguacaccagcgugaucaccaucgagcugagcaacaucaaggagaacaagugcaacggcaccgacgccaaggugaagcugaucaagcaggagcuggacaaguacaagaacgccgugaccgagcugcagcugcugaugcagagcacccccgccgccaacaacagagccagaagagagcugcccagauucaugaacuacacccugaacaacaccaagaacaacaacgugacccugagcaagaagagaaagagaagauuccugggcuuccugcugggcgugggcagcgccaucgccagcggcaucgccgugagcaaggugcugcaccuggagggcgaggugaacaagaucaagaacgcccugcugagcaccaacaaggccguggugagccugagcaacggcgugagcgugcugaccagcaaggugcuggaccugaagaacuacaucgacaagcagcugcugcccaucgugaacaagcagagcugcagcaucagcaacaucgagaccgugaucgaguuccagcagaagaacaacagacugcuggagaucaccagagaguucagcgugaacgccggcgugaccacccccgugagcaccuacaugcugaccaacagcgagcugcugagccugaucaacgacaugcccaucaccaacgaccagaagaagcugaugagcaacaacgugcagaucgugagacagcagagcuacagcaucaugagcaucaucaaggaggaggugcuggccuacguggugcagcugccccuguacggcgugaucgacacccccugcuggaagcugcacaccagcccccugugcaccaccaacaccaaggagggcagcaacaucugccugaccagaaccgacagaggcugguacugcgacaacgccggcagcgugagcuucuucccccaggccgagaccugcaaggugcagagcaacagaguguucugcgacaccaugaacagccugacccugcccagcgaggugaaccugugcaacaucgacaucuucaaccccaaguacgacugcaagaucaugaccagcaagaccgacgugagcagcagcgugaucaccagccugggcgccaucgugagcugcuacggcaagaccaagugcaccgccagcaacaagaacagaggcaucaucaagaccuucagcaacggcugcgacuacgugagcaacaagggcguggacaccgugagcgugggcaacacccuguacuacgugaacaagcaggagggcaagagccuguacgugaagggcgagcccaucaucaacuucuacgacccccugguguuccccagcgacgaguucgacgccagcaucagccaggugaacgagaagaucaaccagagccuggccuucaucagaaagagcgacgagcugcugcacaacgugaacgugggcaagagcaccaccaacaucaugaucaccaccaucaucaucgugaucaucgugauccugcugcugcugaucgccgugggccuguuccuguacugcaaggccagaugaggacuaguaauaaggaaacuguaugaaugucugugggcaggaagugaagagauccuucuguaaagguuuuuggaauuaugucugcugaauaauaaacuuuuuugaaauaauaaaucugguagaaaaaugagaucuaaaaaaaaaaaaaaaaaaaaaaaaaaaaaaaaaaaaaaaaaaaaaaaaaaaaaaaaaaaaaaaaugcaucccccccccccccccccccccccccccccccaaaggcucuuuucagagccaccagaauu

SEQ ID NO: 12173 - RNA, 2002 nt, Artificial Sequence
  mRNA product Design b-4 comprising derived and/or modified sequence from HRSV(Memphis-37)__AIY60640.1__F-del (opt5)
gggagagucccgcagucggcguccagcggcucugcuuguucgugugugugucguugcaggccuuauucaagcuuaccauggagcugcccauccucaagaccaacgccauuacaacgauccuggcugccgugacccuuugcuucgcgagcucccagaauauuacagaagaguuuuaccaaucuaccuguagcgcugucuccaaaggcuaucugucugcccucagaacagggugguacaccagcguuaucacaauugaacuguccaacaucaaggagaauaaaugcaacggaaccgacgccaaggugaaacuuaucaagcaggaacuggauaaguauaaaaaugcugugacggagcuccagcugcugaugcagucuaccccugccgcuaacaaucgggcccgcagagagcucccgcgguucaugaacuacacacugaauaacaccaagaauaacaaugucacacuuagcaaaaagcgcaaaagacgguuucugggcuuccuccugggggugggauccgcgauugccagcggcaucgcuguuucuaaggugcuucaccuggaaggggaggucaacaagauuaaaaaugcccuccuguccaccaacaaggcugugguuagccugucuaacggaguguccguccucacgagcaaagugcuggaccuuaagaauuauaucgauaaacaacugcuccccauugugaacaagcagucuuguuccaucagcaauauugaaacagucaucgaguuucagcagaaaaacaaucgccugcuugagaucaccagagaauuuuccguuaacgccggcgugacaaccccugugucuaccuacaugcugacaaauagcgagcuccugucccugauuaacgacaugcccaucacgaaugaucaaaagaagcucaugagcaacaauguccagauugugcggcagcagucuuauuccaucaugagcauuaucaaagaagagguucuggcguacgugguccaacuuccucuguacggcgugaucgacacccccugcuggaagcuccauacaucuccucuguguaccacaaacaccaaagaagggagcaauauuugccuuacgcgcacagauagaggaugguauugugacaacgccggcuccguuucuuucuucccgcaggcugagaccugcaaggugcagagcaaucgggucuuuugugauaccaugaacucccugacacuccccagcgaggugaaccugugcaauaucgacauuuucaacccuaaauacgauuguaagaucaugaccucuaagacagacgucuccagcucugugauuacgucccugggggccaucguuagcugcuauggaaaaaccaagugcacagcuuccaauaaaaaccgcggcaucauuaagaccuuuucuaaugggugugauuacgugagcaacaaaggagucgacacaguguccguuggcaauacccucuauuacgugaacaagcaagaaggcaagucucuguaugucaaaggggagcccaucauuaauuucuacgacccucuuguguuucccagcgaugaguucgacgccuccaucagccaggugaacgaaaagauuaaucagucucuggccuucaucagaaaauccgaugaacuccugcacaacguuaaugucggaaagagcacgaccaacauuaugaucacaaccaucauuaucgugauuaucgugauucugcuucuccugaucgcugucggccuguuucucuacugcaaagcgcggugaggacuaguaauaaggaaacuguaugaaugucugugggcaggaagugaagagauccuucuguaaagguuuuuggaauuaugucugcugaauaauaaacuuuuuugaaauaauaaaucugguagaaaaaugagaucuaaaaaaaaaaaaaaaaaaaaaaaaaaaaaaaaaaaaaaaaaaaaaaaaaaaaaaaaaaaaaaaaugcaucccccccccccccccccccccccccccccccaaaggcucuuuucagagccaccagaauu

SEQ ID NO: 12174 - RNA, 2002 nt, Artificial Sequence
  mRNA product Design b-4 comprising derived and/or modified sequence from HRSV(Memphis-37)__AIY60640.1__F-del (opt6)
gggagagucccgcagucggcguccagcggcucugcuuguucgugugugugucguugcaggccuuauucaagcuuaccauggaacucccaauauuaaaaacuaacgcaaucacaaccauauuagcagccgucacucuaugcuuugccuccucacaaaauauaacagaagaauuuuaccaauccacaugcucagccguuagcaaaggauaucuaucagcccuaagaacaggcugguauacuucaguaauaacaauagaacuaucaaauauaaaagaaaacaaaugcaacggaaccgacgcuaaaguaaagcucauaaaacaagaauuagacaaauacaaaaaugcaguaacagaacuacaacuccuaaugcaaucaaccccagccgccaauaacagagcuagacgagaacuaccccgauucaugaauuacacacuaaacaacacaaaaaacaacaauguaacacucucaaaaaaaagaaaacgaagauucuuagguuuucuccugggaguaggaucagcaaucgcuuccggaaucgcagucaguaaaguccuucaccuugaaggcgaaguaaacaaaauaaaaaaugcacuacuaucuacaaauaaagcaguaguaucccuauccaauggcgucucaguauuaaccucaaaaguacucgaccuuaaaaauuauauagacaaacaauuacuacccauagucaauaaacaauccuguuccauaucaaacauagaaacaguaaucgaauuucaacaaaaaaacaacagauuacuagaaauaacacgcgaauuuucagucaacgccggaguaaccacacccgucucaacauacaugcuaaccaacuccgaacuacuaucacuuaucaacgacaugccaauaacaaaugaccaaaaaaaacucaugucaaacaacguacaaauaguccgccaacaaucauacucuauaaugucuauuaucaaagaagaaguucucgcauacguaguacaacuaccacuauauggugucauagacacaccauguuggaaacuccauacaucacccuuauguacaaccaauacaaaagaaggcucaaacaucugccuaacucgaacagaccgaggaugguacugcgacaaugcaggaucugucucauucuucccucaagcagaaacauguaaaguucaaucuaauagaguuuucugcgauacaaugaacucacuaacucuaccaucagaaguaaaucucuguaauauugacauauucaacccaaaauacgauugcaagaucaugacaucaaaaacugacguaucauccucagucaucaccucauuaggagcaaucguaagcuguuacgggaaaacaaaaugcaccgcuucuaacaaaaauagaggaauaauuaaaaccuucucaaacggaugcgauuacgucuccaauaaaggaguagauacaguaagcguaggaaauacucuauacuacgucaauaaacaagaaggaaaaucacuuuaugucaaaggagaacccauaauaaauuucuacgacccauuagucuucccaucagaugaauuugacgcauccauaucccaagucaacgaaaaaaucaaucaaucacuagcauucauacgaaaaucagacgaacuacuacacaacguuaacguaggaaaaucaacaaccaacaucaugauaaccacuauaauaaucgucauaauagucauccuauuauuacuaauagccguaggccuuuuccuauacuguaaagcuagauaaggacuaguaauaaggaaacuguaugaaugucugugggcaggaagugaagagauccuucuguaaagguuuuuggaauuaugucugcugaauaauaaacuuuuuugaaauaauaaaucugguagaaaaaugagaucuaaaaaaaaaaaaaaaaaaaaaaaaaaaaaaaaaaaaaaaaaaaaaaaaaaaaaaaaaaaaaaaaugcaucccccccccccccccccccccccccccccccaaaggcucuuuucagagccaccagaauu

SEQ ID NO: 12175 - RNA, 2002 nt, Artificial Sequence
  mRNA product Design b-4 comprising derived and/or modified sequence from HRSV(Memphis-37)__AIY60640.1__F-del (opt11)
gggagagucccgcagucggcguccagcggcucugcuuguucgugugugugucguugcaggccuuauucaagcuuaccauggaacucccgauccucaaaaccaacgccaucaccacuauccucgccgccguaacccucugcuucgccucaucccaaaacaucaccgaagaauuuuaccaauccacaugcuccgccgucuccaaagguuaccucucagcccuccgcaccggcugguacaccuccguuaucaccaucgaacuuuccaacauaaaagagaacaagugcaacggcaccgacgcaaaaguaaaacuaaucaaacaagaacuagacaaauacaaaaacgccgucaccgaacuccagcuccucaugcaaucgacgcccgccgccaacaaccgagcaaggcgcgaacuuccacgcuucaugaacuacacccucaacaacacuaaaaacaacaacgugacccuauccaaaaagcguaaacgccgauuccuagguuuccuucucggugucggcuccgccauugccuccggcaucgcuguuuccaaaguccuccaccucgaaggcgaaguaaacaagauaaaaaacgcccuccucucuacaaacaaggccgugguaucgcucucuaacggcgucucuguacucaccuccaaaguccucgaccucaaaaacuacaucgacaagcaacuccucccuaucgucaauaaacaauccugcuccauuuccaacaucgaaacagugaucgaauuucaacaaaaaaacaaccgauuacuagaaaucacccgcgaauuuucagucaacgccggcgucacaacgccagucucaaccuacaugcucaccaacucagaacucuuaucacucaucaacgacaugcccaucacuaacgaccagaaaaaacugauguccaacaacgugcaaauaguccgccaacaguccuacuccaucauguccauaaucaaggaggaggugcucgccuacguaguccaacucccccucuacggagucauugacaccccuugcuggaaacuacacaccuccccucucugcaccaccaacaccaaagaaggcagcaacaucugccuaaccaggacggaccgaggaugguacugcgacaaugcaggcuccgucagcuucuucccacaagccgaaacaugcaaaguucaaucaaaccguguauucugcgacaccaugaacucacucacccuccccucagaaguaaaccuaugcaacauagauaucuucaaccccaaauacgacugcaaaauuaugaccuccaaaaccgaugucuccagcuccguuaucacgucacucggcgccaucgucuccugcuacggcaagaccaaaugcaccgccuccaacaaaaaccgcggaauaaucaaaacauucucuaacggcugcgacuacgucuccaauaaaggcgucgacaccgucuccgugggcaacacgcuguacuacgucaacaaacaagaaggcaaaucucuuuacgucaaaggugaaccaaucaucaacuucuacgacccccucguauuccccuccgacgaauuugacgcgagcaucucccaagucaacgaaaagaucaaccaaucccucgccuucauccgaaaaagcgacgaacuccuccacaacgucaacgucggcaaaaguaccacaaacauuaugaucaccaccaucaucauagucaucaucgucauccugcuccuacuaauagccgucggccucuucuuguacugcaaggcacgaugaggacuaguaauaaggaaacuguaugaaugucugugggcaggaagugaagagauccuucuguaaagguuuuuggaauuaugucugcugaauaauaaacuuuuuugaaauaauaaaucugguagaaaaaugagaucuaaaaaaaaaaaaaaaaaaaaaaaaaaaaaaaaaaaaaaaaaaaaaaaaaaaaaaaaaaaaaaaaugcaucccccccccccccccccccccccccccccccaaaggcucuuuucagagccaccagaauu

SEQ ID NO: 12176 - RNA, 2064 nt, Artificial Sequence
  mRNA product Design b-5 comprising derived and/or modified sequence from HRSV(Memphis-37)__AIY60640.1__F-del (wt)
gggagacuccugucgggcggaaguaggaggaguagaguuuaaaaacaguacucuuuuuccgguucgggacguaguugaagcaacgacaagccggauaaccgcucuugagacaggaagcuuaccauggaguugccaauccucaaaacaaaugcaauuaccacaauccuugcugcagucacacucuguuucgcuuccagucaaaacaucacugaagaauuuuaucaaucaacaugcagugcaguuagcaaaggcuaucuuagugcuuuaagaacugguugguauacuaguguuauaacuauagaauuaaguaauaucaaggaaaauaaguguaauggaacagaugcuaagguaaaauugauaaaacaagaauuagauaaauauaaaaaugcuguaacagaauugcaguugcucaugcaaagcacaccagcagccaacaaucgagccagaagagaacuaccaagguuuaugaauuauacacucaacaauaccaaaaauaacaauguaacauuaagcaagaaaaggaaaagaagauuucuuggcuuuuuguuagguguuggaucugcaaucgccaguggcauugcuguaucuaaaguccugcaccuagaaggggaagugaacaaaaucaaaaaugcucuacuauccacaaacaaggcuguagucagcuuaucaaauggaguuagugucuuaaccagcaaaguguuagaccucaaaaacuauauagauaaacaguuguuacccauugugaacaagcaaagcugcagcauaucaaacauugaaacugugauagaauuccaacaaaagaacaacagacuacuagagauuaccagggaauuuaguguuaaugcagguguaacuacaccuguaagcacuuauauguuaacaaauagugaauuauuaucauuaaucaaugauaugccuauaacaaaugaucagaaaaaguuaauguccaacaauguucaaauaguuagacagcaaaguuacucuaucauguccauaauaaaggaggaagucuuagcauauguaguucaauuaccacuauaugguguaauagauacaccuuguuggaaacuacacacauccccucuaugcacaaccaacacaaaggaaggguccaacaucuguuuaacaagaaccgacagaggaugguacugugacaaugcaggaucagugucuuucuucccacaagcugaaacaugcaaaguucaaucgaaucgaguauuuugugacacaaugaacagucuaacauuaccaagugaaguaaaucucugcaacauugacauauucaacccuaaauaugauugcaaaauuaugacuucaaaaacagaugugagcagcuccguuaucacaucucuaggagccauugugucaugcuauggcaaaacuaaauguacagcauccaauaaaaaucguggaaucauaaagacauuuucuaacgggugugauuauguaucaaauaaggggguggacacuguaucuguagguaauacauuauauuauguaaauaagcaagaaggaaaaagccucuauguaaaaggugaaccaauaauaaauuucuaugacccauuaguguucccuucugaugaauuugaugcaucaauaucucaagucaaugagaagauuaaccagagccuagcauuuauucguaaauccgaugaauuauuacauaauguaaauguugguaaauccaccacaaauaucaugauaacuacuauaauuauagugauuauaguaauauuguuauuauuaauugcaguugggcuguuccuauacugcaaggccagaugaggacuaguacuggcugcaucucccuuuccucuguccuccauccuucucccaggauggugaagggggaccugguacccagugauccccaccccaggauccuaaaucaugacuuaccugcuaauaaaaacucauuggaaaagugagaagaucuaaaaaaaaaaaaaaaaaaaaaaaaaaaaaaaaaaaaaaaaaaaaaaaaaaaaaaaaaaaaaaaaugcaucccccccccccccccccccccccccccccccaaaggcucuuuucagagccaccagaauu

SEQ ID NO: 12177 - RNA, 2064 nt, Artificial Sequence
  mRNA product Design b-5 comprising derived and/or modified sequence from HRSV(Memphis-37)__AIY60640.1__F-del (opt1)
gggagacuccugucgggcggaaguaggaggaguagaguuuaaaaacaguacucuuuuuccgguucgggacguaguugaagcaacgacaagccggauaaccgcucuugagacaggaagcuuaccauggagcugcccauccucaagaccaacgccaucaccacgauccuggccgcggugacccugugcuucgccagcucccagaacaucaccgaggaguucuaccagagcacgugcuccgccgucagcaagggcuaccucuccgcccugcgcaccgggugguacaccagcgugaucaccaucgagcuguccaacaucaaggagaacaagugcaacggcaccgacgccaaggugaagcucaucaagcaggagcuggacaaguacaagaacgcggucacggagcugcagcuccugaugcagagcaccccggccgccaacaaccgggcccgccgggagcugccccgcuucaugaacuacacccucaacaacaccaagaacaacaacgugacgcuguccaagaagcggaagcgccgguuccugggguuccuccugggcguggggagcgcgaucgccuccggcaucgccgucagcaaggugcugcaccucgagggcgaggugaacaagaucaagaacgcccugcuguccaccaacaaggccgucgugagccucuccaacggggugagcguccugaccuccaaggugcuggaccucaagaacuacaucgacaagcagcugcugcccaucgugaacaagcagagcugcuccaucagcaacaucgagaccgucaucgaguuccagcagaagaacaaccgccuccuggagaucacgcgggaguucagcgugaacgcgggcgugaccacccccgucuccaccuacaugcugacgaacagcgagcuccugucccugaucaacgacaugccgaucaccaacgaccagaagaagcucaugagcaacaacgugcagaucgugcgccagcaguccuacagcaucauguccaucaucaaggaggagguccuggccuacguggugcagcugccccucuacggggucaucgacacccccugcuggaagcugcacaccagcccccugugcacgaccaacaccaaggagggcuccaacaucugccucacccggacggaccgcgggugguacugcgacaacgccggcagcguguccuucuucccgcaggccgagaccugcaagguccagagcaaccggguguucugcgacaccaugaacucccugacccugcccagcgaggugaaccucugcaacaucgacaucuucaaccccaaguacgacugcaagaucaugacguccaagaccgacgucagcuccagcgugaucaccucccugggcgccaucgugagcugcuacgggaagaccaagugcacggcgagcaacaagaaccgcggcaucaucaagaccuucuccaacgggugcgacuacgucagcaacaagggcguggacaccguguccgucggcaacacccuguacuacgugaacaagcaggagggcaagagccucuacgugaagggggagcccaucaucaacuucuacgacccgcuggucuuccccuccgacgaguucgacgccagcaucucccaggugaacgagaagaucaaccagagccuggccuucauccggaaguccgacgagcuccugcacaacgugaacgucggcaagagcaccacgaacaucaugaucaccaccaucaucaucgugaucaucgugauccugcugcuccugaucgccgucgggcuguuccucuacugcaaggcccgcugaggacuaguacuggcugcaucucccuuuccucuguccuccauccuucucccaggauggugaagggggaccugguacccagugauccccaccccaggauccuaaaucaugacuuaccugcuaauaaaaacucauuggaaaagugagaagaucuaaaaaaaaaaaaaaaaaaaaaaaaaaaaaaaaaaaaaaaaaaaaaaaaaaaaaaaaaaaaaaaaugcaucccccccccccccccccccccccccccccccaaaggcucuuuucagagccaccagaauu

SEQ ID NO: 12178 - RNA, 2064 nt, Artificial Sequence
  mRNA product Design b-5 comprising derived and/or modified sequence from HRSV(Memphis-37)__AIY60640.1__F-del (opt2)
gggagacuccugucgggcggaaguaggaggaguagaguuuaaaaacaguacucuuuuuccgguucgggacguaguugaagcaacgacaagccggauaaccgcucuugagacaggaagcuuaccauggagcuccccauccucaagaccaacgccaucaccaccauccucgccgccgucacccucugcuucgccuccucccagaacaucaccgaggaguucuaccaguccaccugcuccgccgucuccaagggcuaccucuccgcccuccgcaccggcugguacaccuccgucaucaccaucgagcucuccaacaucaaggagaacaagugcaacggcaccgacgccaaggucaagcucaucaagcaggagcucgacaaguacaagaacgccgucaccgagcuccagcuccucaugcaguccacccccgccgccaacaaccgcgcccgccgcgagcucccccgcuucaugaacuacacccucaacaacaccaagaacaacaacgucacccucuccaagaagcgcaagcgccgcuuccucggcuuccuccucggcgucggcuccgccaucgccuccggcaucgccgucuccaagguccuccaccucgagggcgaggucaacaagaucaagaacgcccuccucuccaccaacaaggccgucgucucccucuccaacggcgucuccguccucaccuccaagguccucgaccucaagaacuacaucgacaagcagcuccuccccaucgucaacaagcaguccugcuccaucuccaacaucgagaccgucaucgaguuccagcagaagaacaaccgccuccucgagaucacccgcgaguucuccgucaacgccggcgucaccacccccgucuccaccuacaugcucaccaacuccgagcuccucucccucaucaacgacaugcccaucaccaacgaccagaagaagcucauguccaacaacguccagaucguccgccagcaguccuacuccaucauguccaucaucaaggaggagguccucgccuacgucguccagcucccccucuacggcgucaucgacacccccugcuggaagcuccacaccuccccccucugcaccaccaacaccaaggagggcuccaacaucugccucacccgcaccgaccgcggcugguacugcgacaacgccggcuccgucuccuucuucccccaggccgagaccugcaagguccaguccaaccgcgucuucugcgacaccaugaacucccucacccuccccuccgaggucaaccucugcaacaucgacaucuucaaccccaaguacgacugcaagaucaugaccuccaagaccgacgucuccuccuccgucaucaccucccucggcgccaucgucuccugcuacggcaagaccaagugcaccgccuccaacaagaaccgcggcaucaucaagaccuucuccaacggcugcgacuacgucuccaacaagggcgucgacaccgucuccgucggcaacacccucuacuacgucaacaagcaggagggcaagucccucuacgucaagggcgagcccaucaucaacuucuacgacccccucgucuuccccuccgacgaguucgacgccuccaucucccaggucaacgagaagaucaaccagucccucgccuucauccgcaaguccgacgagcuccuccacaacgucaacgucggcaaguccaccaccaacaucaugaucaccaccaucaucaucgucaucaucgucauccuccuccuccucaucgccgucggccucuuccucuacugcaaggcccgcugaggacuaguacuggcugcaucucccuuuccucuguccuccauccuucucccaggauggugaagggggaccugguacccagugauccccaccccaggauccuaaaucaugacuuaccugcuaauaaaaacucauuggaaaagugagaagaucuaaaaaaaaaaaaaaaaaaaaaaaaaaaaaaaaaaaaaaaaaaaaaaaaaaaaaaaaaaaaaaaaugcaucccccccccccccccccccccccccccccccaaaggcucuuuucagagccaccagaauu

SEQ ID NO: 12179 - RNA, 2064 nt, Artificial Sequence
  mRNA product Design b-5 comprising derived and/or modified sequence from HRSV(Memphis-37)__AIY60640.1__F-del (opt3)
gggagacuccugucgggcggaaguaggaggaguagaguuuaaaaacaguacucuuuuuccgguucgggacguaguugaagcaacgacaagccggauaaccgcucuugagacaggaagcuuaccauggagcugcccauccucaagaccaacgccauuacaacuauacuugcugcagugacgcugugcuucgccagcucccagaauaucaccgaagaguuuuaccaaucuacauguucagcggucaguaaaggcuauuugagcgcuuuaagaacugggugguacaccuccguuauuacaaucgaacugucuaacauuaaggagaauaaaugcaacggaaccgacgccaaggugaaacuaaucaagcaggaacucgauaaguauaaaaaugcaguaacugagcugcagcuucugaugcagucgaccccugccgcuaacaauagggcacggcgcgaguugccacgauucaugaacuacacacucaauaacacgaagaauaacaaugugacucugagcaaaaagcguaaaagaagguuucuggguuuccucuuaggcgucgggucagccauagcuaguggaaucgccguguccaagguucugcaccuugaaggcgaggugaacaagauuaaaaaugcguugcugucuaccaacaaggcagucgugagccuauccaacgguguaucaguucucacaaguaaagugcuggaccuuaagaauuauaucgauaaacaacuguugccgauugucaacaagcagagcuguucuaucuccaauauagaaacugugauugaguuucagcagaaaaacaaucggcuccuggagaucacccgcgaguucucagugaacgccggggucacaacccccguuagcacguacauguuaacuaauagugaacugcucucucuuauuaacgacaugccuaucacaaaugaucaaaagaagcugauguccaacaaugugcagaucguaagacagcagagcuauucgauuaugucuauaaucaaagaagagguguuggcuuacgucgugcaacuaccacuguacggaguuauugacacccccugcuggaagcuccauacuuccccucuguguacaaccaacacgaaagaaggcucaaauaucugccuuaccaggacagaucggggcugguauugugacaacgccgggagugugagcuuuuucccacaggcagagacuugcaagguccaguccaaucgcguguuuugugauaccaugaacucucugacauugcccagcgagguaaaccucugcaauauagacauuuucaacccuaaauacgauuguaagaucaugacuucaaagaccgacguuaguuccagcgugaucacaucucugggagcuauugucucaugcuaugguaaaaccaagugcacugccaguaauaaaaaccgaggcaucauuaagacguuuagcaaugggugugauuacguguccaacaaaggagucgacacagugucuguuggcaauaccuuauauuacgugaacaagcaagaagguaagucgcuguauguaaaaggggagccaauaaucaauuucuacgacccgcuagucuuucccagcgaugaguucgacgcguccauuucacaggugaacgaaaagaucaaucagagucucgccuucaucagaaaaucugaugaacugcuucacaacguuaaugugggaaagagcacuaccaacauuaugauaacaaccaucauuaucgucauuaucgugauauugcugcuccugaucgcaguaggccuuuuucuguacugcaaagcuaggugaggacuaguacuggcugcaucucccuuuccucuguccuccauccuucucccaggauggugaagggggaccugguacccagugauccccaccccaggauccuaaaucaugacuuaccugcuaauaaaaacucauuggaaaagugagaagaucuaaaaaaaaaaaaaaaaaaaaaaaaaaaaaaaaaaaaaaaaaaaaaaaaaaaaaaaaaaaaaaaaugcaucccccccccccccccccccccccccccccccaaaggcucuuuucagagccaccagaauu

SEQ ID NO: 12180 - RNA, 2064 nt, Artificial Sequence
  mRNA product Design b-5 comprising derived and/or modified sequence from HRSV(Memphis-37)__AIY60640.1__F-del (opt4)
gggagacuccugucgggcggaaguaggaggaguagaguuuaaaaacaguacucuuuuuccgguucgggacguaguugaagcaacgacaagccggauaaccgcucuugagacaggaagcuuaccauggagcugcccauccugaagaccaacgccaucaccaccauccuggccgccgugacccugugcuucgccagcagccagaacaucaccgaggaguucuaccagagcaccugcagcgccgugagcaagggcuaccugagcgcccugagaaccggcugguacaccagcgugaucaccaucgagcugagcaacaucaaggagaacaagugcaacggcaccgacgccaaggugaagcugaucaagcaggagcuggacaaguacaagaacgccgugaccgagcugcagcugcugaugcagagcacccccgccgccaacaacagagccagaagagagcugcccagauucaugaacuacacccugaacaacaccaagaacaacaacgugacccugagcaagaagagaaagagaagauuccugggcuuccugcugggcgugggcagcgccaucgccagcggcaucgccgugagcaaggugcugcaccuggagggcgaggugaacaagaucaagaacgcccugcugagcaccaacaaggccguggugagccugagcaacggcgugagcgugcugaccagcaaggugcuggaccugaagaacuacaucgacaagcagcugcugcccaucgugaacaagcagagcugcagcaucagcaacaucgagaccgugaucgaguuccagcagaagaacaacagacugcuggagaucaccagagaguucagcgugaacgccggcgugaccacccccgugagcaccuacaugcugaccaacagcgagcugcugagccugaucaacgacaugcccaucaccaacgaccagaagaagcugaugagcaacaacgugcagaucgugagacagcagagcuacagcaucaugagcaucaucaaggaggaggugcuggccuacguggugcagcugccccuguacggcgugaucgacacccccugcuggaagcugcacaccagcccccugugcaccaccaacaccaaggagggcagcaacaucugccugaccagaaccgacagaggcugguacugcgacaacgccggcagcgugagcuucuucccccaggccgagaccugcaaggugcagagcaacagaguguucugcgacaccaugaacagccugacccugcccagcgaggugaaccugugcaacaucgacaucuucaaccccaaguacgacugcaagaucaugaccagcaagaccgacgugagcagcagcgugaucaccagccugggcgccaucgugagcugcuacggcaagaccaagugcaccgccagcaacaagaacagaggcaucaucaagaccuucagcaacggcugcgacuacgugagcaacaagggcguggacaccgugagcgugggcaacacccuguacuacgugaacaagcaggagggcaagagccuguacgugaagggcgagcccaucaucaacuucuacgacccccugguguuccccagcgacgaguucgacgccagcaucagccaggugaacgagaagaucaaccagagccuggccuucaucagaaagagcgacgagcugcugcacaacgugaacgugggcaagagcaccaccaacaucaugaucaccaccaucaucaucgugaucaucgugauccugcugcugcugaucgccgugggccuguuccuguacugcaaggccagaugaggacuaguacuggcugcaucucccuuuccucuguccuccauccuucucccaggauggugaagggggaccugguacccagugauccccaccccaggauccuaaaucaugacuuaccugcuaauaaaaacucauuggaaaagugagaagaucuaaaaaaaaaaaaaaaaaaaaaaaaaaaaaaaaaaaaaaaaaaaaaaaaaaaaaaaaaaaaaaaaugcaucccccccccccccccccccccccccccccccaaaggcucuuuucagagccaccagaauu

SEQ ID NO: 12181 - RNA, 2064 nt, Artificial Sequence
  mRNA product Design b-5 comprising derived and/or modified sequence from HRSV(Memphis-37)__AIY60640.1__F-del (opt5)
gggagacuccugucgggcggaaguaggaggaguagaguuuaaaaacaguacucuuuuuccgguucgggacguaguugaagcaacgacaagccggauaaccgcucuugagacaggaagcuuaccauggagcugcccauccucaagaccaacgccauuacaacgauccuggcugccgugacccuuugcuucgcgagcucccagaauauuacagaagaguuuuaccaaucuaccuguagcgcugucuccaaaggcuaucugucugcccucagaacagggugguacaccagcguuaucacaauugaacuguccaacaucaaggagaauaaaugcaacggaaccgacgccaaggugaaacuuaucaagcaggaacuggauaaguauaaaaaugcugugacggagcuccagcugcugaugcagucuaccccugccgcuaacaaucgggcccgcagagagcucccgcgguucaugaacuacacacugaauaacaccaagaauaacaaugucacacuuagcaaaaagcgcaaaagacgguuucugggcuuccuccugggggugggauccgcgauugccagcggcaucgcuguuucuaaggugcuucaccuggaaggggaggucaacaagauuaaaaaugcccuccuguccaccaacaaggcugugguuagccugucuaacggaguguccguccucacgagcaaagugcuggaccuuaagaauuauaucgauaaacaacugcuccccauugugaacaagcagucuuguuccaucagcaauauugaaacagucaucgaguuucagcagaaaaacaaucgccugcuugagaucaccagagaauuuuccguuaacgccggcgugacaaccccugugucuaccuacaugcugacaaauagcgagcuccugucccugauuaacgacaugcccaucacgaaugaucaaaagaagcucaugagcaacaauguccagauugugcggcagcagucuuauuccaucaugagcauuaucaaagaagagguucuggcguacgugguccaacuuccucuguacggcgugaucgacacccccugcuggaagcuccauacaucuccucuguguaccacaaacaccaaagaagggagcaauauuugccuuacgcgcacagauagaggaugguauugugacaacgccggcuccguuucuuucuucccgcaggcugagaccugcaaggugcagagcaaucgggucuuuugugauaccaugaacucccugacacuccccagcgaggugaaccugugcaauaucgacauuuucaacccuaaauacgauuguaagaucaugaccucuaagacagacgucuccagcucugugauuacgucccugggggccaucguuagcugcuauggaaaaaccaagugcacagcuuccaauaaaaaccgcggcaucauuaagaccuuuucuaaugggugugauuacgugagcaacaaaggagucgacacaguguccguuggcaauacccucuauuacgugaacaagcaagaaggcaagucucuguaugucaaaggggagcccaucauuaauuucuacgacccucuuguguuucccagcgaugaguucgacgccuccaucagccaggugaacgaaaagauuaaucagucucuggccuucaucagaaaauccgaugaacuccugcacaacguuaaugucggaaagagcacgaccaacauuaugaucacaaccaucauuaucgugauuaucgugauucugcuucuccugaucgcugucggccuguuucucuacugcaaagcgcggugaggacuaguacuggcugcaucucccuuuccucuguccuccauccuucucccaggauggugaagggggaccugguacccagugauccccaccccaggauccuaaaucaugacuuaccugcuaauaaaaacucauuggaaaagugagaagaucuaaaaaaaaaaaaaaaaaaaaaaaaaaaaaaaaaaaaaaaaaaaaaaaaaaaaaaaaaaaaaaaaugcaucccccccccccccccccccccccccccccccaaaggcucuuuucagagccaccagaauu

SEQ ID NO: 12182 - RNA, 2064 nt, Artificial Sequence
  mRNA product Design b-5 comprising derived and/or modified sequence from HRSV(Memphis-37)__AIY60640.1__F-del (opt6)
gggagacuccugucgggcggaaguaggaggaguagaguuuaaaaacaguacucuuuuuccgguucgggacguaguugaagcaacgacaagccggauaaccgcucuugagacaggaagcuuaccauggaacucccaauauuaaaaacuaacgcaaucacaaccauauuagcagccgucacucuaugcuuugccuccucacaaaauauaacagaagaauuuuaccaauccacaugcucagccguuagcaaaggauaucuaucagcccuaagaacaggcugguauacuucaguaauaacaauagaacuaucaaauauaaaagaaaacaaaugcaacggaaccgacgcuaaaguaaagcucauaaaacaagaauuagacaaauacaaaaaugcaguaacagaacuacaacuccuaaugcaaucaaccccagccgccaauaacagagcuagacgagaacuaccccgauucaugaauuacacacuaaacaacacaaaaaacaacaauguaacacucucaaaaaaaagaaaacgaagauucuuagguuuucuccugggaguaggaucagcaaucgcuuccggaaucgcagucaguaaaguccuucaccuugaaggcgaaguaaacaaaauaaaaaaugcacuacuaucuacaaauaaagcaguaguaucccuauccaauggcgucucaguauuaaccucaaaaguacucgaccuuaaaaauuauauagacaaacaauuacuacccauagucaauaaacaauccuguuccauaucaaacauagaaacaguaaucgaauuucaacaaaaaaacaacagauuacuagaaauaacacgcgaauuuucagucaacgccggaguaaccacacccgucucaacauacaugcuaaccaacuccgaacuacuaucacuuaucaacgacaugccaauaacaaaugaccaaaaaaaacucaugucaaacaacguacaaauaguccgccaacaaucauacucuauaaugucuauuaucaaagaagaaguucucgcauacguaguacaacuaccacuauauggugucauagacacaccauguuggaaacuccauacaucacccuuauguacaaccaauacaaaagaaggcucaaacaucugccuaacucgaacagaccgaggaugguacugcgacaaugcaggaucugucucauucuucccucaagcagaaacauguaaaguucaaucuaauagaguuuucugcgauacaaugaacucacuaacucuaccaucagaaguaaaucucuguaauauugacauauucaacccaaaauacgauugcaagaucaugacaucaaaaacugacguaucauccucagucaucaccucauuaggagcaaucguaagcuguuacgggaaaacaaaaugcaccgcuucuaacaaaaauagaggaauaauuaaaaccuucucaaacggaugcgauuacgucuccaauaaaggaguagauacaguaagcguaggaaauacucuauacuacgucaauaaacaagaaggaaaaucacuuuaugucaaaggagaacccauaauaaauuucuacgacccauuagucuucccaucagaugaauuugacgcauccauaucccaagucaacgaaaaaaucaaucaaucacuagcauucauacgaaaaucagacgaacuacuacacaacguuaacguaggaaaaucaacaaccaacaucaugauaaccacuauaauaaucgucauaauagucauccuauuauuacuaauagccguaggccuuuuccuauacuguaaagcuagauaaggacuaguacuggcugcaucucccuuuccucuguccuccauccuucucccaggauggugaagggggaccugguacccagugauccccaccccaggauccuaaaucaugacuuaccugcuaauaaaaacucauuggaaaagugagaagaucuaaaaaaaaaaaaaaaaaaaaaaaaaaaaaaaaaaaaaaaaaaaaaaaaaaaaaaaaaaaaaaaaugcaucccccccccccccccccccccccccccccccaaaggcucuuuucagagccaccagaauu

SEQ ID NO: 12183 - RNA, 2064 nt, Artificial Sequence
  mRNA product Design b-5 comprising derived and/or modified sequence from HRSV(Memphis-37)__AIY60640.1__F-del (opt11)
gggagacuccugucgggcggaaguaggaggaguagaguuuaaaaacaguacucuuuuuccgguucgggacguaguugaagcaacgacaagccggauaaccgcucuugagacaggaagcuuaccauggaacucccgauccucaaaaccaacgccaucaccacuauccucgccgccguaacccucugcuucgccucaucccaaaacaucaccgaagaauuuuaccaauccacaugcuccgccgucuccaaagguuaccucucagcccuccgcaccggcugguacaccuccguuaucaccaucgaacuuuccaacauaaaagagaacaagugcaacggcaccgacgcaaaaguaaaacuaaucaaacaagaacuagacaaauacaaaaacgccgucaccgaacuccagcuccucaugcaaucgacgcccgccgccaacaaccgagcaaggcgcgaacuuccacgcuucaugaacuacacccucaacaacacuaaaaacaacaacgugacccuauccaaaaagcguaaacgccgauuccuagguuuccuucucggugucggcuccgccauugccuccggcaucgcuguuuccaaaguccuccaccucgaaggcgaaguaaacaagauaaaaaacgcccuccucucuacaaacaaggccgugguaucgcucucuaacggcgucucuguacucaccuccaaaguccucgaccucaaaaacuacaucgacaagcaacuccucccuaucgucaauaaacaauccugcuccauuuccaacaucgaaacagugaucgaauuucaacaaaaaaacaaccgauuacuagaaaucacccgcgaauuuucagucaacgccggcgucacaacgccagucucaaccuacaugcucaccaacucagaacucuuaucacucaucaacgacaugcccaucacuaacgaccagaaaaaacugauguccaacaacgugcaaauaguccgccaacaguccuacuccaucauguccauaaucaaggaggaggugcucgccuacguaguccaacucccccucuacggagucauugacaccccuugcuggaaacuacacaccuccccucucugcaccaccaacaccaaagaaggcagcaacaucugccuaaccaggacggaccgaggaugguacugcgacaaugcaggcuccgucagcuucuucccacaagccgaaacaugcaaaguucaaucaaaccguguauucugcgacaccaugaacucacucacccuccccucagaaguaaaccuaugcaacauagauaucuucaaccccaaauacgacugcaaaauuaugaccuccaaaaccgaugucuccagcuccguuaucacgucacucggcgccaucgucuccugcuacggcaagaccaaaugcaccgccuccaacaaaaaccgcggaauaaucaaaacauucucuaacggcugcgacuacgucuccaauaaaggcgucgacaccgucuccgugggcaacacgcuguacuacgucaacaaacaagaaggcaaaucucuuuacgucaaaggugaaccaaucaucaacuucuacgacccccucguauuccccuccgacgaauuugacgcgagcaucucccaagucaacgaaaagaucaaccaaucccucgccuucauccgaaaaagcgacgaacuccuccacaacgucaacgucggcaaaaguaccacaaacauuaugaucaccaccaucaucauagucaucaucgucauccugcuccuacuaauagccgucggccucuucuuguacugcaaggcacgaugaggacuaguacuggcugcaucucccuuuccucuguccuccauccuucucccaggauggugaagggggaccugguacccagugauccccaccccaggauccuaaaucaugacuuaccugcuaauaaaaacucauuggaaaagugagaagaucuaaaaaaaaaaaaaaaaaaaaaaaaaaaaaaaaaaaaaaaaaaaaaaaaaaaaaaaaaaaaaaaaugcaucccccccccccccccccccccccccccccccaaaggcucuuuucagagccaccagaauu

SEQ ID NO: 12184 - RNA, 1970 nt, Artificial Sequence
  mRNA product Design c-1 comprising derived and/or modified sequence from HRSV(Memphis-37)__AIY60640.1__F-del (wt)
gggagaguccgcucagccagguugcagaagcggcuuagcguguguccuaaucuucucucugcguguagguaggccugugccgcaaacaagcuuaccauggaguugccaauccucaaaacaaaugcaauuaccacaauccuugcugcagucacacucuguuucgcuuccagucaaaacaucacugaagaauuuuaucaaucaacaugcagugcaguuagcaaaggcuaucuuagugcuuuaagaacugguugguauacuaguguuauaacuauagaauuaaguaauaucaaggaaaauaaguguaauggaacagaugcuaagguaaaauugauaaaacaagaauuagauaaauauaaaaaugcuguaacagaauugcaguugcucaugcaaagcacaccagcagccaacaaucgagccagaagagaacuaccaagguuuaugaauuauacacucaacaauaccaaaaauaacaauguaacauuaagcaagaaaaggaaaagaagauuucuuggcuuuuuguuagguguuggaucugcaaucgccaguggcauugcuguaucuaaaguccugcaccuagaaggggaagugaacaaaaucaaaaaugcucuacuauccacaaacaaggcuguagucagcuuaucaaauggaguuagugucuuaaccagcaaaguguuagaccucaaaaacuauauagauaaacaguuguuacccauugugaacaagcaaagcugcagcauaucaaacauugaaacugugauagaauuccaacaaaagaacaacagacuacuagagauuaccagggaauuuaguguuaaugcagguguaacuacaccuguaagcacuuauauguuaacaaauagugaauuauuaucauuaaucaaugauaugccuauaacaaaugaucagaaaaaguuaauguccaacaauguucaaauaguuagacagcaaaguuacucuaucauguccauaauaaaggaggaagucuuagcauauguaguucaauuaccacuauaugguguaauagauacaccuuguuggaaacuacacacauccccucuaugcacaaccaacacaaaggaaggguccaacaucuguuuaacaagaaccgacagaggaugguacugugacaaugcaggaucagugucuuucuucccacaagcugaaacaugcaaaguucaaucgaaucgaguauuuugugacacaaugaacagucuaacauuaccaagugaaguaaaucucugcaacauugacauauucaacccuaaauaugauugcaaaauuaugacuucaaaaacagaugugagcagcuccguuaucacaucucuaggagccauugugucaugcuauggcaaaacuaaauguacagcauccaauaaaaaucguggaaucauaaagacauuuucuaacgggugugauuauguaucaaauaaggggguggacacuguaucuguagguaauacauuauauuauguaaauaagcaagaaggaaaaagccucuauguaaaaggugaaccaauaauaaauuucuaugacccauuaguguucccuucugaugaauuugaugcaucaauaucucaagucaaugagaagauuaaccagagccuagcauuuauucguaaauccgaugaauuauuacauaauguaaauguugguaaauccaccacaaauaucaugauaacuacuauaauuauagugauuauaguaauauuguuauuauuaauugcaguugggcuguuccuauacugcaaggccagaugaggacuaguguccaccugucccuccugggcugcuggauugucucguuuuccugccaaauaaacaggaucagcgcuuuacagaucuaaaaaaaaaaaaaaaaaaaaaaaaaaaaaaaaaaaaaaaaaaaaaaaaaaaaaaaaaaaaaaaaugcaucccccccccccccccccccccccccccccccaaaggcucuuuucagagccaccagaauu

SEQ ID NO: 12185 - RNA, 1970 nt, Artificial Sequence
  mRNA product Design c-1 comprising derived and/or modified sequence from HRSV(Memphis-37)__AIY60640.1__F-del (opt1)
gggagaguccgcucagccagguugcagaagcggcuuagcguguguccuaaucuucucucugcguguagguaggccugugccgcaaacaagcuuaccauggagcugcccauccucaagaccaacgccaucaccacgauccuggccgcggugacccugugcuucgccagcucccagaacaucaccgaggaguucuaccagagcacgugcuccgccgucagcaagggcuaccucuccgcccugcgcaccgggugguacaccagcgugaucaccaucgagcuguccaacaucaaggagaacaagugcaacggcaccgacgccaaggugaagcucaucaagcaggagcuggacaaguacaagaacgcggucacggagcugcagcuccugaugcagagcaccccggccgccaacaaccgggcccgccgggagcugccccgcuucaugaacuacacccucaacaacaccaagaacaacaacgugacgcuguccaagaagcggaagcgccgguuccugggguuccuccugggcguggggagcgcgaucgccuccggcaucgccgucagcaaggugcugcaccucgagggcgaggugaacaagaucaagaacgcccugcuguccaccaacaaggccgucgugagccucuccaacggggugagcguccugaccuccaaggugcuggaccucaagaacuacaucgacaagcagcugcugcccaucgugaacaagcagagcugcuccaucagcaacaucgagaccgucaucgaguuccagcagaagaacaaccgccuccuggagaucacgcgggaguucagcgugaacgcgggcgugaccacccccgucuccaccuacaugcugacgaacagcgagcuccugucccugaucaacgacaugccgaucaccaacgaccagaagaagcucaugagcaacaacgugcagaucgugcgccagcaguccuacagcaucauguccaucaucaaggaggagguccuggccuacguggugcagcugccccucuacggggucaucgacacccccugcuggaagcugcacaccagcccccugugcacgaccaacaccaaggagggcuccaacaucugccucacccggacggaccgcgggugguacugcgacaacgccggcagcguguccuucuucccgcaggccgagaccugcaagguccagagcaaccggguguucugcgacaccaugaacucccugacccugcccagcgaggugaaccucugcaacaucgacaucuucaaccccaaguacgacugcaagaucaugacguccaagaccgacgucagcuccagcgugaucaccucccugggcgccaucgugagcugcuacgggaagaccaagugcacggcgagcaacaagaaccgcggcaucaucaagaccuucuccaacgggugcgacuacgucagcaacaagggcguggacaccguguccgucggcaacacccuguacuacgugaacaagcaggagggcaagagccucuacgugaagggggagcccaucaucaacuucuacgacccgcuggucuuccccuccgacgaguucgacgccagcaucucccaggugaacgagaagaucaaccagagccuggccuucauccggaaguccgacgagcuccugcacaacgugaacgucggcaagagcaccacgaacaucaugaucaccaccaucaucaucgugaucaucgugauccugcugcuccugaucgccgucgggcuguuccucuacugcaaggcccgcugaggacuaguguccaccugucccuccugggcugcuggauugucucguuuuccugccaaauaaacaggaucagcgcuuuacagaucuaaaaaaaaaaaaaaaaaaaaaaaaaaaaaaaaaaaaaaaaaaaaaaaaaaaaaaaaaaaaaaaaugcaucccccccccccccccccccccccccccccccaaaggcucuuuucagagccaccagaauu

SEQ ID NO: 12186 - RNA, 1970 nt, Artificial Sequence
  mRNA product Design c-1 comprising derived and/or modified sequence from HRSV(Memphis-37)__AIY60640.1__F-del (opt2)
gggagaguccgcucagccagguugcagaagcggcuuagcguguguccuaaucuucucucugcguguagguaggccugugccgcaaacaagcuuaccauggagcuccccauccucaagaccaacgccaucaccaccauccucgccgccgucacccucugcuucgccuccucccagaacaucaccgaggaguucuaccaguccaccugcuccgccgucuccaagggcuaccucuccgcccuccgcaccggcugguacaccuccgucaucaccaucgagcucuccaacaucaaggagaacaagugcaacggcaccgacgccaaggucaagcucaucaagcaggagcucgacaaguacaagaacgccgucaccgagcuccagcuccucaugcaguccacccccgccgccaacaaccgcgcccgccgcgagcucccccgcuucaugaacuacacccucaacaacaccaagaacaacaacgucacccucuccaagaagcgcaagcgccgcuuccucggcuuccuccucggcgucggcuccgccaucgccuccggcaucgccgucuccaagguccuccaccucgagggcgaggucaacaagaucaagaacgcccuccucuccaccaacaaggccgucgucucccucuccaacggcgucuccguccucaccuccaagguccucgaccucaagaacuacaucgacaagcagcuccuccccaucgucaacaagcaguccugcuccaucuccaacaucgagaccgucaucgaguuccagcagaagaacaaccgccuccucgagaucacccgcgaguucuccgucaacgccggcgucaccacccccgucuccaccuacaugcucaccaacuccgagcuccucucccucaucaacgacaugcccaucaccaacgaccagaagaagcucauguccaacaacguccagaucguccgccagcaguccuacuccaucauguccaucaucaaggaggagguccucgccuacgucguccagcucccccucuacggcgucaucgacacccccugcuggaagcuccacaccuccccccucugcaccaccaacaccaaggagggcuccaacaucugccucacccgcaccgaccgcggcugguacugcgacaacgccggcuccgucuccuucuucccccaggccgagaccugcaagguccaguccaaccgcgucuucugcgacaccaugaacucccucacccuccccuccgaggucaaccucugcaacaucgacaucuucaaccccaaguacgacugcaagaucaugaccuccaagaccgacgucuccuccuccgucaucaccucccucggcgccaucgucuccugcuacggcaagaccaagugcaccgccuccaacaagaaccgcggcaucaucaagaccuucuccaacggcugcgacuacgucuccaacaagggcgucgacaccgucuccgucggcaacacccucuacuacgucaacaagcaggagggcaagucccucuacgucaagggcgagcccaucaucaacuucuacgacccccucgucuuccccuccgacgaguucgacgccuccaucucccaggucaacgagaagaucaaccagucccucgccuucauccgcaaguccgacgagcuccuccacaacgucaacgucggcaaguccaccaccaacaucaugaucaccaccaucaucaucgucaucaucgucauccuccuccuccucaucgccgucggccucuuccucuacugcaaggcccgcugaggacuaguguccaccugucccuccugggcugcuggauugucucguuuuccugccaaauaaacaggaucagcgcuuuacagaucuaaaaaaaaaaaaaaaaaaaaaaaaaaaaaaaaaaaaaaaaaaaaaaaaaaaaaaaaaaaaaaaaugcaucccccccccccccccccccccccccccccccaaaggcucuuuucagagccaccagaauu

SEQ ID NO: 12187 - RNA, 1970 nt, Artificial Sequence
  mRNA product Design c-1 comprising derived and/or modified sequence from HRSV(Memphis-37)__AIY60640.1__F-del (opt3)
gggagaguccgcucagccagguugcagaagcggcuuagcguguguccuaaucuucucucugcguguagguaggccugugccgcaaacaagcuuaccauggagcugcccauccucaagaccaacgccauuacaacuauacuugcugcagugacgcugugcuucgccagcucccagaauaucaccgaagaguuuuaccaaucuacauguucagcggucaguaaaggcuauuugagcgcuuuaagaacugggugguacaccuccguuauuacaaucgaacugucuaacauuaaggagaauaaaugcaacggaaccgacgccaaggugaaacuaaucaagcaggaacucgauaaguauaaaaaugcaguaacugagcugcagcuucugaugcagucgaccccugccgcuaacaauagggcacggcgcgaguugccacgauucaugaacuacacacucaauaacacgaagaauaacaaugugacucugagcaaaaagcguaaaagaagguuucuggguuuccucuuaggcgucgggucagccauagcuaguggaaucgccguguccaagguucugcaccuugaaggcgaggugaacaagauuaaaaaugcguugcugucuaccaacaaggcagucgugagccuauccaacgguguaucaguucucacaaguaaagugcuggaccuuaagaauuauaucgauaaacaacuguugccgauugucaacaagcagagcuguucuaucuccaauauagaaacugugauugaguuucagcagaaaaacaaucggcuccuggagaucacccgcgaguucucagugaacgccggggucacaacccccguuagcacguacauguuaacuaauagugaacugcucucucuuauuaacgacaugccuaucacaaaugaucaaaagaagcugauguccaacaaugugcagaucguaagacagcagagcuauucgauuaugucuauaaucaaagaagagguguuggcuuacgucgugcaacuaccacuguacggaguuauugacacccccugcuggaagcuccauacuuccccucuguguacaaccaacacgaaagaaggcucaaauaucugccuuaccaggacagaucggggcugguauugugacaacgccgggagugugagcuuuuucccacaggcagagacuugcaagguccaguccaaucgcguguuuugugauaccaugaacucucugacauugcccagcgagguaaaccucugcaauauagacauuuucaacccuaaauacgauuguaagaucaugacuucaaagaccgacguuaguuccagcgugaucacaucucugggagcuauugucucaugcuaugguaaaaccaagugcacugccaguaauaaaaaccgaggcaucauuaagacguuuagcaaugggugugauuacguguccaacaaaggagucgacacagugucuguuggcaauaccuuauauuacgugaacaagcaagaagguaagucgcuguauguaaaaggggagccaauaaucaauuucuacgacccgcuagucuuucccagcgaugaguucgacgcguccauuucacaggugaacgaaaagaucaaucagagucucgccuucaucagaaaaucugaugaacugcuucacaacguuaaugugggaaagagcacuaccaacauuaugauaacaaccaucauuaucgucauuaucgugauauugcugcuccugaucgcaguaggccuuuuucuguacugcaaagcuaggugaggacuaguguccaccugucccuccugggcugcuggauugucucguuuuccugccaaauaaacaggaucagcgcuuuacagaucuaaaaaaaaaaaaaaaaaaaaaaaaaaaaaaaaaaaaaaaaaaaaaaaaaaaaaaaaaaaaaaaaugcaucccccccccccccccccccccccccccccccaaaggcucuuuucagagccaccagaauu

SEQ ID NO: 12188 - RNA, 1970 nt, Artificial Sequence
  mRNA product Design c-1 comprising derived and/or modified sequence from HRSV(Memphis-37)__AIY60640.1__F-del (opt4)
gggagaguccgcucagccagguugcagaagcggcuuagcguguguccuaaucuucucucugcguguagguaggccugugccgcaaacaagcuuaccauggagcugcccauccugaagaccaacgccaucaccaccauccuggccgccgugacccugugcuucgccagcagccagaacaucaccgaggaguucuaccagagcaccugcagcgccgugagcaagggcuaccugagcgcccugagaaccggcugguacaccagcgugaucaccaucgagcugagcaacaucaaggagaacaagugcaacggcaccgacgccaaggugaagcugaucaagcaggagcuggacaaguacaagaacgccgugaccgagcugcagcugcugaugcagagcacccccgccgccaacaacagagccagaagagagcugcccagauucaugaacuacacccugaacaacaccaagaacaacaacgugacccugagcaagaagagaaagagaagauuccugggcuuccugcugggcgugggcagcgccaucgccagcggcaucgccgugagcaaggugcugcaccuggagggcgaggugaacaagaucaagaacgcccugcugagcaccaacaaggccguggugagccugagcaacggcgugagcgugcugaccagcaaggugcuggaccugaagaacuacaucgacaagcagcugcugcccaucgugaacaagcagagcugcagcaucagcaacaucgagaccgugaucgaguuccagcagaagaacaacagacugcuggagaucaccagagaguucagcgugaacgccggcgugaccacccccgugagcaccuacaugcugaccaacagcgagcugcugagccugaucaacgacaugcccaucaccaacgaccagaagaagcugaugagcaacaacgugcagaucgugagacagcagagcuacagcaucaugagcaucaucaaggaggaggugcuggccuacguggugcagcugccccuguacggcgugaucgacacccccugcuggaagcugcacaccagcccccugugcaccaccaacaccaaggagggcagcaacaucugccugaccagaaccgacagaggcugguacugcgacaacgccggcagcgugagcuucuucccccaggccgagaccugcaaggugcagagcaacagaguguucugcgacaccaugaacagccugacccugcccagcgaggugaaccugugcaacaucgacaucuucaaccccaaguacgacugcaagaucaugaccagcaagaccgacgugagcagcagcgugaucaccagccugggcgccaucgugagcugcuacggcaagaccaagugcaccgccagcaacaagaacagaggcaucaucaagaccuucagcaacggcugcgacuacgugagcaacaagggcguggacaccgugagcgugggcaacacccuguacuacgugaacaagcaggagggcaagagccuguacgugaagggcgagcccaucaucaacuucuacgacccccugguguuccccagcgacgaguucgacgccagcaucagccaggugaacgagaagaucaaccagagccuggccuucaucagaaagagcgacgagcugcugcacaacgugaacgugggcaagagcaccaccaacaucaugaucaccaccaucaucaucgugaucaucgugauccugcugcugcugaucgccgugggccuguuccuguacugcaaggccagaugaggacuaguguccaccugucccuccugggcugcuggauugucucguuuuccugccaaauaaacaggaucagcgcuuuacagaucuaaaaaaaaaaaaaaaaaaaaaaaaaaaaaaaaaaaaaaaaaaaaaaaaaaaaaaaaaaaaaaaaugcaucccccccccccccccccccccccccccccccaaaggcucuuuucagagccaccagaauu

SEQ ID NO: 12189 - RNA, 1970 nt, Artificial Sequence
  mRNA product Design c-1 comprising derived and/or modified sequence from HRSV(Memphis-37)__AIY60640.1__F-del (opt5)
gggagaguccgcucagccagguugcagaagcggcuuagcguguguccuaaucuucucucugcguguagguaggccugugccgcaaacaagcuuaccauggagcugcccauccucaagaccaacgccauuacaacgauccuggcugccgugacccuuugcuucgcgagcucccagaauauuacagaagaguuuuaccaaucuaccuguagcgcugucuccaaaggcuaucugucugcccucagaacagggugguacaccagcguuaucacaauugaacuguccaacaucaaggagaauaaaugcaacggaaccgacgccaaggugaaacuuaucaagcaggaacuggauaaguauaaaaaugcugugacggagcuccagcugcugaugcagucuaccccugccgcuaacaaucgggcccgcagagagcucccgcgguucaugaacuacacacugaauaacaccaagaauaacaaugucacacuuagcaaaaagcgcaaaagacgguuucugggcuuccuccugggggugggauccgcgauugccagcggcaucgcuguuucuaaggugcuucaccuggaaggggaggucaacaagauuaaaaaugcccuccuguccaccaacaaggcugugguuagccugucuaacggaguguccguccucacgagcaaagugcuggaccuuaagaauuauaucgauaaacaacugcuccccauugugaacaagcagucuuguuccaucagcaauauugaaacagucaucgaguuucagcagaaaaacaaucgccugcuugagaucaccagagaauuuuccguuaacgccggcgugacaaccccugugucuaccuacaugcugacaaauagcgagcuccugucccugauuaacgacaugcccaucacgaaugaucaaaagaagcucaugagcaacaauguccagauugugcggcagcagucuuauuccaucaugagcauuaucaaagaagagguucuggcguacgugguccaacuuccucuguacggcgugaucgacacccccugcuggaagcuccauacaucuccucuguguaccacaaacaccaaagaagggagcaauauuugccuuacgcgcacagauagaggaugguauugugacaacgccggcuccguuucuuucuucccgcaggcugagaccugcaaggugcagagcaaucgggucuuuugugauaccaugaacucccugacacuccccagcgaggugaaccugugcaauaucgacauuuucaacccuaaauacgauuguaagaucaugaccucuaagacagacgucuccagcucugugauuacgucccugggggccaucguuagcugcuauggaaaaaccaagugcacagcuuccaauaaaaaccgcggcaucauuaagaccuuuucuaaugggugugauuacgugagcaacaaaggagucgacacaguguccguuggcaauacccucuauuacgugaacaagcaagaaggcaagucucuguaugucaaaggggagcccaucauuaauuucuacgacccucuuguguuucccagcgaugaguucgacgccuccaucagccaggugaacgaaaagauuaaucagucucuggccuucaucagaaaauccgaugaacuccugcacaacguuaaugucggaaagagcacgaccaacauuaugaucacaaccaucauuaucgugauuaucgugauucugcuucuccugaucgcugucggccuguuucucuacugcaaagcgcggugaggacuaguguccaccugucccuccugggcugcuggauugucucguuuuccugccaaauaaacaggaucagcgcuuuacagaucuaaaaaaaaaaaaaaaaaaaaaaaaaaaaaaaaaaaaaaaaaaaaaaaaaaaaaaaaaaaaaaaaugcaucccccccccccccccccccccccccccccccaaaggcucuuuucagagccaccagaauu

SEQ ID NO: 12190 - RNA, 1970 nt, Artificial Sequence
  mRNA product Design c-1 comprising derived and/or modified sequence from HRSV(Memphis-37)__AIY60640.1__F-del (opt6)
gggagaguccgcucagccagguugcagaagcggcuuagcguguguccuaaucuucucucugcguguagguaggccugugccgcaaacaagcuuaccauggaacucccaauauuaaaaacuaacgcaaucacaaccauauuagcagccgucacucuaugcuuugccuccucacaaaauauaacagaagaauuuuaccaauccacaugcucagccguuagcaaaggauaucuaucagcccuaagaacaggcugguauacuucaguaauaacaauagaacuaucaaauauaaaagaaaacaaaugcaacggaaccgacgcuaaaguaaagcucauaaaacaagaauuagacaaauacaaaaaugcaguaacagaacuacaacuccuaaugcaaucaaccccagccgccaauaacagagcuagacgagaacuaccccgauucaugaauuacacacuaaacaacacaaaaaacaacaauguaacacucucaaaaaaaagaaaacgaagauucuuagguuuucuccugggaguaggaucagcaaucgcuuccggaaucgcagucaguaaaguccuucaccuugaaggcgaaguaaacaaaauaaaaaaugcacuacuaucuacaaauaaagcaguaguaucccuauccaauggcgucucaguauuaaccucaaaaguacucgaccuuaaaaauuauauagacaaacaauuacuacccauagucaauaaacaauccuguuccauaucaaacauagaaacaguaaucgaauuucaacaaaaaaacaacagauuacuagaaauaacacgcgaauuuucagucaacgccggaguaaccacacccgucucaacauacaugcuaaccaacuccgaacuacuaucacuuaucaacgacaugccaauaacaaaugaccaaaaaaaacucaugucaaacaacguacaaauaguccgccaacaaucauacucuauaaugucuauuaucaaagaagaaguucucgcauacguaguacaacuaccacuauauggugucauagacacaccauguuggaaacuccauacaucacccuuauguacaaccaauacaaaagaaggcucaaacaucugccuaacucgaacagaccgaggaugguacugcgacaaugcaggaucugucucauucuucccucaagcagaaacauguaaaguucaaucuaauagaguuuucugcgauacaaugaacucacuaacucuaccaucagaaguaaaucucuguaauauugacauauucaacccaaaauacgauugcaagaucaugacaucaaaaacugacguaucauccucagucaucaccucauuaggagcaaucguaagcuguuacgggaaaacaaaaugcaccgcuucuaacaaaaauagaggaauaauuaaaaccuucucaaacggaugcgauuacgucuccaauaaaggaguagauacaguaagcguaggaaauacucuauacuacgucaauaaacaagaaggaaaaucacuuuaugucaaaggagaacccauaauaaauuucuacgacccauuagucuucccaucagaugaauuugacgcauccauaucccaagucaacgaaaaaaucaaucaaucacuagcauucauacgaaaaucagacgaacuacuacacaacguuaacguaggaaaaucaacaaccaacaucaugauaaccacuauaauaaucgucauaauagucauccuauuauuacuaauagccguaggccuuuuccuauacuguaaagcuagauaaggacuaguguccaccugucccuccugggcugcuggauugucucguuuuccugccaaauaaacaggaucagcgcuuuacagaucuaaaaaaaaaaaaaaaaaaaaaaaaaaaaaaaaaaaaaaaaaaaaaaaaaaaaaaaaaaaaaaaaugcaucccccccccccccccccccccccccccccccaaaggcucuuuucagagccaccagaauu

SEQ ID NO: 12191 - RNA, 1970 nt, Artificial Sequence
  mRNA product Design c-1 comprising derived and/or modified sequence from HRSV(Memphis-37)__AIY60640.1__F-del (opt11)
gggagaguccgcucagccagguugcagaagcggcuuagcguguguccuaaucuucucucugcguguagguaggccugugccgcaaacaagcuuaccauggaacucccgauccucaaaaccaacgccaucaccacuauccucgccgccguaacccucugcuucgccucaucccaaaacaucaccgaagaauuuuaccaauccacaugcuccgccgucuccaaagguuaccucucagcccuccgcaccggcugguacaccuccguuaucaccaucgaacuuuccaacauaaaagagaacaagugcaacggcaccgacgcaaaaguaaaacuaaucaaacaagaacuagacaaauacaaaaacgccgucaccgaacuccagcuccucaugcaaucgacgcccgccgccaacaaccgagcaaggcgcgaacuuccacgcuucaugaacuacacccucaacaacacuaaaaacaacaacgugacccuauccaaaaagcguaaacgccgauuccuagguuuccuucucggugucggcuccgccauugccuccggcaucgcuguuuccaaaguccuccaccucgaaggcgaaguaaacaagauaaaaaacgcccuccucucuacaaacaaggccgugguaucgcucucuaacggcgucucuguacucaccuccaaaguccucgaccucaaaaacuacaucgacaagcaacuccucccuaucgucaauaaacaauccugcuccauuuccaacaucgaaacagugaucgaauuucaacaaaaaaacaaccgauuacuagaaaucacccgcgaauuuucagucaacgccggcgucacaacgccagucucaaccuacaugcucaccaacucagaacucuuaucacucaucaacgacaugcccaucacuaacgaccagaaaaaacugauguccaacaacgugcaaauaguccgccaacaguccuacuccaucauguccauaaucaaggaggaggugcucgccuacguaguccaacucccccucuacggagucauugacaccccuugcuggaaacuacacaccuccccucucugcaccaccaacaccaaagaaggcagcaacaucugccuaaccaggacggaccgaggaugguacugcgacaaugcaggcuccgucagcuucuucccacaagccgaaacaugcaaaguucaaucaaaccguguauucugcgacaccaugaacucacucacccuccccucagaaguaaaccuaugcaacauagauaucuucaaccccaaauacgacugcaaaauuaugaccuccaaaaccgaugucuccagcuccguuaucacgucacucggcgccaucgucuccugcuacggcaagaccaaaugcaccgccuccaacaaaaaccgcggaauaaucaaaacauucucuaacggcugcgacuacgucuccaauaaaggcgucgacaccgucuccgugggcaacacgcuguacuacgucaacaaacaagaaggcaaaucucuuuacgucaaaggugaaccaaucaucaacuucuacgacccccucguauuccccuccgacgaauuugacgcgagcaucucccaagucaacgaaaagaucaaccaaucccucgccuucauccgaaaaagcgacgaacuccuccacaacgucaacgucggcaaaaguaccacaaacauuaugaucaccaccaucaucauagucaucaucgucauccugcuccuacuaauagccgucggccucuucuuguacugcaaggcacgaugaggacuaguguccaccugucccuccugggcugcuggauugucucguuuuccugccaaauaaacaggaucagcgcuuuacagaucuaaaaaaaaaaaaaaaaaaaaaaaaaaaaaaaaaaaaaaaaaaaaaaaaaaaaaaaaaaaaaaaaugcaucccccccccccccccccccccccccccccccaaaggcucuuuucagagccaccagaauu

SEQ ID NO: 12192 - RNA, 2060 nt, Artificial Sequence
  mRNA product Design c-2 comprising derived and/or modified sequence from HRSV(Memphis-37)__AIY60640.1__F-del (wt)
gggagacuccugucgggcggaaguaggaggaguagaguuuaaaaacaguacucuuuuuccgguucgggacguaguugaagcaacgacaagccggauaaccgcucuugagacaggaagcuuaccauggaguugccaauccucaaaacaaaugcaauuaccacaauccuugcugcagucacacucuguuucgcuuccagucaaaacaucacugaagaauuuuaucaaucaacaugcagugcaguuagcaaaggcuaucuuagugcuuuaagaacugguugguauacuaguguuauaacuauagaauuaaguaauaucaaggaaaauaaguguaauggaacagaugcuaagguaaaauugauaaaacaagaauuagauaaauauaaaaaugcuguaacagaauugcaguugcucaugcaaagcacaccagcagccaacaaucgagccagaagagaacuaccaagguuuaugaauuauacacucaacaauaccaaaaauaacaauguaacauuaagcaagaaaaggaaaagaagauuucuuggcuuuuuguuagguguuggaucugcaaucgccaguggcauugcuguaucuaaaguccugcaccuagaaggggaagugaacaaaaucaaaaaugcucuacuauccacaaacaaggcuguagucagcuuaucaaauggaguuagugucuuaaccagcaaaguguuagaccucaaaaacuauauagauaaacaguuguuacccauugugaacaagcaaagcugcagcauaucaaacauugaaacugugauagaauuccaacaaaagaacaacagacuacuagagauuaccagggaauuuaguguuaaugcagguguaacuacaccuguaagcacuuauauguuaacaaauagugaauuauuaucauuaaucaaugauaugccuauaacaaaugaucagaaaaaguuaauguccaacaauguucaaauaguuagacagcaaaguuacucuaucauguccauaauaaaggaggaagucuuagcauauguaguucaauuaccacuauaugguguaauagauacaccuuguuggaaacuacacacauccccucuaugcacaaccaacacaaaggaaggguccaacaucuguuuaacaagaaccgacagaggaugguacugugacaaugcaggaucagugucuuucuucccacaagcugaaacaugcaaaguucaaucgaaucgaguauuuugugacacaaugaacagucuaacauuaccaagugaaguaaaucucugcaacauugacauauucaacccuaaauaugauugcaaaauuaugacuucaaaaacagaugugagcagcuccguuaucacaucucuaggagccauugugucaugcuauggcaaaacuaaauguacagcauccaauaaaaaucguggaaucauaaagacauuuucuaacgggugugauuauguaucaaauaaggggguggacacuguaucuguagguaauacauuauauuauguaaauaagcaagaaggaaaaagccucuauguaaaaggugaaccaauaauaaauuucuaugacccauuaguguucccuucugaugaauuugaugcaucaauaucucaagucaaugagaagauuaaccagagccuagcauuuauucguaaauccgaugaauuauuacauaauguaaauguugguaaauccaccacaaauaucaugauaacuacuauaauuauagugauuauaguaauauuguuauuauuaauugcaguugggcuguuccuauacugcaaggccagaugaggacuaguggaagcauuuuccuggcugauuaaaagaaauuacucagcuauggucaucuguuccuguuagaaggcuaugcagcauauuauauacuaugcgcauguuaugaaaugcauaauaaaaaauuuuaaaaaaucuaaaagaucuaaaaaaaaaaaaaaaaaaaaaaaaaaaaaaaaaaaaaaaaaaaaaaaaaaaaaaaaaaaaaaaaugcaucccccccccccccccccccccccccccccccaaaggcucuuuucagagccaccagaauu

SEQ ID NO: 12193 - RNA, 2060 nt, Artificial Sequence
  mRNA product Design c-2 comprising derived and/or modified sequence from HRSV(Memphis-37)__AIY60640.1__F-del (opt1)
gggagacuccugucgggcggaaguaggaggaguagaguuuaaaaacaguacucuuuuuccgguucgggacguaguugaagcaacgacaagccggauaaccgcucuugagacaggaagcuuaccauggagcugcccauccucaagaccaacgccaucaccacgauccuggccgcggugacccugugcuucgccagcucccagaacaucaccgaggaguucuaccagagcacgugcuccgccgucagcaagggcuaccucuccgcccugcgcaccgggugguacaccagcgugaucaccaucgagcuguccaacaucaaggagaacaagugcaacggcaccgacgccaaggugaagcucaucaagcaggagcuggacaaguacaagaacgcggucacggagcugcagcuccugaugcagagcaccccggccgccaacaaccgggcccgccgggagcugccccgcuucaugaacuacacccucaacaacaccaagaacaacaacgugacgcuguccaagaagcggaagcgccgguuccugggguuccuccugggcguggggagcgcgaucgccuccggcaucgccgucagcaaggugcugcaccucgagggcgaggugaacaagaucaagaacgcccugcuguccaccaacaaggccgucgugagccucuccaacggggugagcguccugaccuccaaggugcuggaccucaagaacuacaucgacaagcagcugcugcccaucgugaacaagcagagcugcuccaucagcaacaucgagaccgucaucgaguuccagcagaagaacaaccgccuccuggagaucacgcgggaguucagcgugaacgcgggcgugaccacccccgucuccaccuacaugcugacgaacagcgagcuccugucccugaucaacgacaugccgaucaccaacgaccagaagaagcucaugagcaacaacgugcagaucgugcgccagcaguccuacagcaucauguccaucaucaaggaggagguccuggccuacguggugcagcugccccucuacggggucaucgacacccccugcuggaagcugcacaccagcccccugugcacgaccaacaccaaggagggcuccaacaucugccucacccggacggaccgcgggugguacugcgacaacgccggcagcguguccuucuucccgcaggccgagaccugcaagguccagagcaaccggguguucugcgacaccaugaacucccugacccugcccagcgaggugaaccucugcaacaucgacaucuucaaccccaaguacgacugcaagaucaugacguccaagaccgacgucagcuccagcgugaucaccucccugggcgccaucgugagcugcuacgggaagaccaagugcacggcgagcaacaagaaccgcggcaucaucaagaccuucuccaacgggugcgacuacgucagcaacaagggcguggacaccguguccgucggcaacacccuguacuacgugaacaagcaggagggcaagagccucuacgugaagggggagcccaucaucaacuucuacgacccgcuggucuuccccuccgacgaguucgacgccagcaucucccaggugaacgagaagaucaaccagagccuggccuucauccggaaguccgacgagcuccugcacaacgugaacgucggcaagagcaccacgaacaucaugaucaccaccaucaucaucgugaucaucgugauccugcugcuccugaucgccgucgggcuguuccucuacugcaaggcccgcugaggacuaguggaagcauuuuccuggcugauuaaaagaaauuacucagcuauggucaucuguuccuguuagaaggcuaugcagcauauuauauacuaugcgcauguuaugaaaugcauaauaaaaaauuuuaaaaaaucuaaaagaucuaaaaaaaaaaaaaaaaaaaaaaaaaaaaaaaaaaaaaaaaaaaaaaaaaaaaaaaaaaaaaaaaugcaucccccccccccccccccccccccccccccccaaaggcucuuuucagagccaccagaauu

SEQ ID NO: 12194 - RNA, 2060 nt, Artificial Sequence
  mRNA product Design c-2 comprising derived and/or modified sequence from HRSV(Memphis-37)__AIY60640.1__F-del (opt2)
gggagacuccugucgggcggaaguaggaggaguagaguuuaaaaacaguacucuuuuuccgguucgggacguaguugaagcaacgacaagccggauaaccgcucuugagacaggaagcuuaccauggagcuccccauccucaagaccaacgccaucaccaccauccucgccgccgucacccucugcuucgccuccucccagaacaucaccgaggaguucuaccaguccaccugcuccgccgucuccaagggcuaccucuccgcccuccgcaccggcugguacaccuccgucaucaccaucgagcucuccaacaucaaggagaacaagugcaacggcaccgacgccaaggucaagcucaucaagcaggagcucgacaaguacaagaacgccgucaccgagcuccagcuccucaugcaguccacccccgccgccaacaaccgcgcccgccgcgagcucccccgcuucaugaacuacacccucaacaacaccaagaacaacaacgucacccucuccaagaagcgcaagcgccgcuuccucggcuuccuccucggcgucggcuccgccaucgccuccggcaucgccgucuccaagguccuccaccucgagggcgaggucaacaagaucaagaacgcccuccucuccaccaacaaggccgucgucucccucuccaacggcgucuccguccucaccuccaagguccucgaccucaagaacuacaucgacaagcagcuccuccccaucgucaacaagcaguccugcuccaucuccaacaucgagaccgucaucgaguuccagcagaagaacaaccgccuccucgagaucacccgcgaguucuccgucaacgccggcgucaccacccccgucuccaccuacaugcucaccaacuccgagcuccucucccucaucaacgacaugcccaucaccaacgaccagaagaagcucauguccaacaacguccagaucguccgccagcaguccuacuccaucauguccaucaucaaggaggagguccucgccuacgucguccagcucccccucuacggcgucaucgacacccccugcuggaagcuccacaccuccccccucugcaccaccaacaccaaggagggcuccaacaucugccucacccgcaccgaccgcggcugguacugcgacaacgccggcuccgucuccuucuucccccaggccgagaccugcaagguccaguccaaccgcgucuucugcgacaccaugaacucccucacccuccccuccgaggucaaccucugcaacaucgacaucuucaaccccaaguacgacugcaagaucaugaccuccaagaccgacgucuccuccuccgucaucaccucccucggcgccaucgucuccugcuacggcaagaccaagugcaccgccuccaacaagaaccgcggcaucaucaagaccuucuccaacggcugcgacuacgucuccaacaagggcgucgacaccgucuccgucggcaacacccucuacuacgucaacaagcaggagggcaagucccucuacgucaagggcgagcccaucaucaacuucuacgacccccucgucuuccccuccgacgaguucgacgccuccaucucccaggucaacgagaagaucaaccagucccucgccuucauccgcaaguccgacgagcuccuccacaacgucaacgucggcaaguccaccaccaacaucaugaucaccaccaucaucaucgucaucaucgucauccuccuccuccucaucgccgucggccucuuccucuacugcaaggcccgcugaggacuaguggaagcauuuuccuggcugauuaaaagaaauuacucagcuauggucaucuguuccuguuagaaggcuaugcagcauauuauauacuaugcgcauguuaugaaaugcauaauaaaaaauuuuaaaaaaucuaaaagaucuaaaaaaaaaaaaaaaaaaaaaaaaaaaaaaaaaaaaaaaaaaaaaaaaaaaaaaaaaaaaaaaaugcaucccccccccccccccccccccccccccccccaaaggcucuuuucagagccaccagaauu

SEQ ID NO: 12195 - RNA, 2060 nt, Artificial Sequence
  mRNA product Design c-2 comprising derived and/or modified sequence from HRSV(Memphis-37)__AIY60640.1__F-del (opt3)
gggagacuccugucgggcggaaguaggaggaguagaguuuaaaaacaguacucuuuuuccgguucgggacguaguugaagcaacgacaagccggauaaccgcucuugagacaggaagcuuaccauggagcugcccauccucaagaccaacgccauuacaacuauacuugcugcagugacgcugugcuucgccagcucccagaauaucaccgaagaguuuuaccaaucuacauguucagcggucaguaaaggcuauuugagcgcuuuaagaacugggugguacaccuccguuauuacaaucgaacugucuaacauuaaggagaauaaaugcaacggaaccgacgccaaggugaaacuaaucaagcaggaacucgauaaguauaaaaaugcaguaacugagcugcagcuucugaugcagucgaccccugccgcuaacaauagggcacggcgcgaguugccacgauucaugaacuacacacucaauaacacgaagaauaacaaugugacucugagcaaaaagcguaaaagaagguuucuggguuuccucuuaggcgucgggucagccauagcuaguggaaucgccguguccaagguucugcaccuugaaggcgaggugaacaagauuaaaaaugcguugcugucuaccaacaaggcagucgugagccuauccaacgguguaucaguucucacaaguaaagugcuggaccuuaagaauuauaucgauaaacaacuguugccgauugucaacaagcagagcuguucuaucuccaauauagaaacugugauugaguuucagcagaaaaacaaucggcuccuggagaucacccgcgaguucucagugaacgccggggucacaacccccguuagcacguacauguuaacuaauagugaacugcucucucuuauuaacgacaugccuaucacaaaugaucaaaagaagcugauguccaacaaugugcagaucguaagacagcagagcuauucgauuaugucuauaaucaaagaagagguguuggcuuacgucgugcaacuaccacuguacggaguuauugacacccccugcuggaagcuccauacuuccccucuguguacaaccaacacgaaagaaggcucaaauaucugccuuaccaggacagaucggggcugguauugugacaacgccgggagugugagcuuuuucccacaggcagagacuugcaagguccaguccaaucgcguguuuugugauaccaugaacucucugacauugcccagcgagguaaaccucugcaauauagacauuuucaacccuaaauacgauuguaagaucaugacuucaaagaccgacguuaguuccagcgugaucacaucucugggagcuauugucucaugcuaugguaaaaccaagugcacugccaguaauaaaaaccgaggcaucauuaagacguuuagcaaugggugugauuacguguccaacaaaggagucgacacagugucuguuggcaauaccuuauauuacgugaacaagcaagaagguaagucgcuguauguaaaaggggagccaauaaucaauuucuacgacccgcuagucuuucccagcgaugaguucgacgcguccauuucacaggugaacgaaaagaucaaucagagucucgccuucaucagaaaaucugaugaacugcuucacaacguuaaugugggaaagagcacuaccaacauuaugauaacaaccaucauuaucgucauuaucgugauauugcugcuccugaucgcaguaggccuuuuucuguacugcaaagcuaggugaggacuaguggaagcauuuuccuggcugauuaaaagaaauuacucagcuauggucaucuguuccuguuagaaggcuaugcagcauauuauauacuaugcgcauguuaugaaaugcauaauaaaaaauuuuaaaaaaucuaaaagaucuaaaaaaaaaaaaaaaaaaaaaaaaaaaaaaaaaaaaaaaaaaaaaaaaaaaaaaaaaaaaaaaaugcaucccccccccccccccccccccccccccccccaaaggcucuuuucagagccaccagaauu

SEQ ID NO: 12196 - RNA, 2060 nt, Artificial Sequence
  mRNA product Design c-2 comprising derived and/or modified sequence from HRSV(Memphis-37)__AIY60640.1__F-del (opt4)
gggagacuccugucgggcggaaguaggaggaguagaguuuaaaaacaguacucuuuuuccgguucgggacguaguugaagcaacgacaagccggauaaccgcucuugagacaggaagcuuaccauggagcugcccauccugaagaccaacgccaucaccaccauccuggccgccgugacccugugcuucgccagcagccagaacaucaccgaggaguucuaccagagcaccugcagcgccgugagcaagggcuaccugagcgcccugagaaccggcugguacaccagcgugaucaccaucgagcugagcaacaucaaggagaacaagugcaacggcaccgacgccaaggugaagcugaucaagcaggagcuggacaaguacaagaacgccgugaccgagcugcagcugcugaugcagagcacccccgccgccaacaacagagccagaagagagcugcccagauucaugaacuacacccugaacaacaccaagaacaacaacgugacccugagcaagaagagaaagagaagauuccugggcuuccugcugggcgugggcagcgccaucgccagcggcaucgccgugagcaaggugcugcaccuggagggcgaggugaacaagaucaagaacgcccugcugagcaccaacaaggccguggugagccugagcaacggcgugagcgugcugaccagcaaggugcuggaccugaagaacuacaucgacaagcagcugcugcccaucgugaacaagcagagcugcagcaucagcaacaucgagaccgugaucgaguuccagcagaagaacaacagacugcuggagaucaccagagaguucagcgugaacgccggcgugaccacccccgugagcaccuacaugcugaccaacagcgagcugcugagccugaucaacgacaugcccaucaccaacgaccagaagaagcugaugagcaacaacgugcagaucgugagacagcagagcuacagcaucaugagcaucaucaaggaggaggugcuggccuacguggugcagcugccccuguacggcgugaucgacacccccugcuggaagcugcacaccagcccccugugcaccaccaacaccaaggagggcagcaacaucugccugaccagaaccgacagaggcugguacugcgacaacgccggcagcgugagcuucuucccccaggccgagaccugcaaggugcagagcaacagaguguucugcgacaccaugaacagccugacccugcccagcgaggugaaccugugcaacaucgacaucuucaaccccaaguacgacugcaagaucaugaccagcaagaccgacgugagcagcagcgugaucaccagccugggcgccaucgugagcugcuacggcaagaccaagugcaccgccagcaacaagaacagaggcaucaucaagaccuucagcaacggcugcgacuacgugagcaacaagggcguggacaccgugagcgugggcaacacccuguacuacgugaacaagcaggagggcaagagccuguacgugaagggcgagcccaucaucaacuucuacgacccccugguguuccccagcgacgaguucgacgccagcaucagccaggugaacgagaagaucaaccagagccuggccuucaucagaaagagcgacgagcugcugcacaacgugaacgugggcaagagcaccaccaacaucaugaucaccaccaucaucaucgugaucaucgugauccugcugcugcugaucgccgugggccuguuccuguacugcaaggccagaugaggacuaguggaagcauuuuccuggcugauuaaaagaaauuacucagcuauggucaucuguuccuguuagaaggcuaugcagcauauuauauacuaugcgcauguuaugaaaugcauaauaaaaaauuuuaaaaaaucuaaaagaucuaaaaaaaaaaaaaaaaaaaaaaaaaaaaaaaaaaaaaaaaaaaaaaaaaaaaaaaaaaaaaaaaugcaucccccccccccccccccccccccccccccccaaaggcucuuuucagagccaccagaauu

SEQ ID NO: 12197 - RNA, 2060 nt, Artificial Sequence
  mRNA product Design c-2 comprising derived and/or modified sequence from HRSV(Memphis-37)__AIY60640.1__F-del (opt5)
gggagacuccugucgggcggaaguaggaggaguagaguuuaaaaacaguacucuuuuuccgguucgggacguaguugaagcaacgacaagccggauaaccgcucuugagacaggaagcuuaccauggagcugcccauccucaagaccaacgccauuacaacgauccuggcugccgugacccuuugcuucgcgagcucccagaauauuacagaagaguuuuaccaaucuaccuguagcgcugucuccaaaggcuaucugucugcccucagaacagggugguacaccagcguuaucacaauugaacuguccaacaucaaggagaauaaaugcaacggaaccgacgccaaggugaaacuuaucaagcaggaacuggauaaguauaaaaaugcugugacggagcuccagcugcugaugcagucuaccccugccgcuaacaaucgggcccgcagagagcucccgcgguucaugaacuacacacugaauaacaccaagaauaacaaugucacacuuagcaaaaagcgcaaaagacgguuucugggcuuccuccugggggugggauccgcgauugccagcggcaucgcuguuucuaaggugcuucaccuggaaggggaggucaacaagauuaaaaaugcccuccuguccaccaacaaggcugugguuagccugucuaacggaguguccguccucacgagcaaagugcuggaccuuaagaauuauaucgauaaacaacugcuccccauugugaacaagcagucuuguuccaucagcaauauugaaacagucaucgaguuucagcagaaaaacaaucgccugcuugagaucaccagagaauuuuccguuaacgccggcgugacaaccccugugucuaccuacaugcugacaaauagcgagcuccugucccugauuaacgacaugcccaucacgaaugaucaaaagaagcucaugagcaacaauguccagauugugcggcagcagucuuauuccaucaugagcauuaucaaagaagagguucuggcguacgugguccaacuuccucuguacggcgugaucgacacccccugcuggaagcuccauacaucuccucuguguaccacaaacaccaaagaagggagcaauauuugccuuacgcgcacagauagaggaugguauugugacaacgccggcuccguuucuuucuucccgcaggcugagaccugcaaggugcagagcaaucgggucuuuugugauaccaugaacucccugacacuccccagcgaggugaaccugugcaauaucgacauuuucaacccuaaauacgauuguaagaucaugaccucuaagacagacgucuccagcucugugauuacgucccugggggccaucguuagcugcuauggaaaaaccaagugcacagcuuccaauaaaaaccgcggcaucauuaagaccuuuucuaaugggugugauuacgugagcaacaaaggagucgacacaguguccguuggcaauacccucuauuacgugaacaagcaagaaggcaagucucuguaugucaaaggggagcccaucauuaauuucuacgacccucuuguguuucccagcgaugaguucgacgccuccaucagccaggugaacgaaaagauuaaucagucucuggccuucaucagaaaauccgaugaacuccugcacaacguuaaugucggaaagagcacgaccaacauuaugaucacaaccaucauuaucgugauuaucgugauucugcuucuccugaucgcugucggccuguuucucuacugcaaagcgcggugaggacuaguggaagcauuuuccuggcugauuaaaagaaauuacucagcuauggucaucuguuccuguuagaaggcuaugcagcauauuauauacuaugcgcauguuaugaaaugcauaauaaaaaauuuuaaaaaaucuaaaagaucuaaaaaaaaaaaaaaaaaaaaaaaaaaaaaaaaaaaaaaaaaaaaaaaaaaaaaaaaaaaaaaaaugcaucccccccccccccccccccccccccccccccaaaggcucuuuucagagccaccagaauu

SEQ ID NO: 12198 - RNA, 2060 nt, Artificial Sequence
  mRNA product Design c-2 comprising derived and/or modified sequence from HRSV(Memphis-37)__AIY60640.1__F-del (opt6)
gggagacuccugucgggcggaaguaggaggaguagaguuuaaaaacaguacucuuuuuccgguucgggacguaguugaagcaacgacaagccggauaaccgcucuugagacaggaagcuuaccauggaacucccaauauuaaaaacuaacgcaaucacaaccauauuagcagccgucacucuaugcuuugccuccucacaaaauauaacagaagaauuuuaccaauccacaugcucagccguuagcaaaggauaucuaucagcccuaagaacaggcugguauacuucaguaauaacaauagaacuaucaaauauaaaagaaaacaaaugcaacggaaccgacgcuaaaguaaagcucauaaaacaagaauuagacaaauacaaaaaugcaguaacagaacuacaacuccuaaugcaaucaaccccagccgccaauaacagagcuagacgagaacuaccccgauucaugaauuacacacuaaacaacacaaaaaacaacaauguaacacucucaaaaaaaagaaaacgaagauucuuagguuuucuccugggaguaggaucagcaaucgcuuccggaaucgcagucaguaaaguccuucaccuugaaggcgaaguaaacaaaauaaaaaaugcacuacuaucuacaaauaaagcaguaguaucccuauccaauggcgucucaguauuaaccucaaaaguacucgaccuuaaaaauuauauagacaaacaauuacuacccauagucaauaaacaauccuguuccauaucaaacauagaaacaguaaucgaauuucaacaaaaaaacaacagauuacuagaaauaacacgcgaauuuucagucaacgccggaguaaccacacccgucucaacauacaugcuaaccaacuccgaacuacuaucacuuaucaacgacaugccaauaacaaaugaccaaaaaaaacucaugucaaacaacguacaaauaguccgccaacaaucauacucuauaaugucuauuaucaaagaagaaguucucgcauacguaguacaacuaccacuauauggugucauagacacaccauguuggaaacuccauacaucacccuuauguacaaccaauacaaaagaaggcucaaacaucugccuaacucgaacagaccgaggaugguacugcgacaaugcaggaucugucucauucuucccucaagcagaaacauguaaaguucaaucuaauagaguuuucugcgauacaaugaacucacuaacucuaccaucagaaguaaaucucuguaauauugacauauucaacccaaaauacgauugcaagaucaugacaucaaaaacugacguaucauccucagucaucaccucauuaggagcaaucguaagcuguuacgggaaaacaaaaugcaccgcuucuaacaaaaauagaggaauaauuaaaaccuucucaaacggaugcgauuacgucuccaauaaaggaguagauacaguaagcguaggaaauacucuauacuacgucaauaaacaagaaggaaaaucacuuuaugucaaaggagaacccauaauaaauuucuacgacccauuagucuucccaucagaugaauuugacgcauccauaucccaagucaacgaaaaaaucaaucaaucacuagcauucauacgaaaaucagacgaacuacuacacaacguuaacguaggaaaaucaacaaccaacaucaugauaaccacuauaauaaucgucauaauagucauccuauuauuacuaauagccguaggccuuuuccuauacuguaaagcuagauaaggacuaguggaagcauuuuccuggcugauuaaaagaaauuacucagcuauggucaucuguuccuguuagaaggcuaugcagcauauuauauacuaugcgcauguuaugaaaugcauaauaaaaaauuuuaaaaaaucuaaaagaucuaaaaaaaaaaaaaaaaaaaaaaaaaaaaaaaaaaaaaaaaaaaaaaaaaaaaaaaaaaaaaaaaugcaucccccccccccccccccccccccccccccccaaaggcucuuuucagagccaccagaauu

SEQ ID NO: 12199 - RNA, 2060 nt, Artificial Sequence
  mRNA product Design c-2 comprising derived and/or modified sequence from HRSV(Memphis-37)__AIY60640.1__F-del (opt11)
gggagacuccugucgggcggaaguaggaggaguagaguuuaaaaacaguacucuuuuuccgguucgggacguaguugaagcaacgacaagccggauaaccgcucuugagacaggaagcuuaccauggaacucccgauccucaaaaccaacgccaucaccacuauccucgccgccguaacccucugcuucgccucaucccaaaacaucaccgaagaauuuuaccaauccacaugcuccgccgucuccaaagguuaccucucagcccuccgcaccggcugguacaccuccguuaucaccaucgaacuuuccaacauaaaagagaacaagugcaacggcaccgacgcaaaaguaaaacuaaucaaacaagaacuagacaaauacaaaaacgccgucaccgaacuccagcuccucaugcaaucgacgcccgccgccaacaaccgagcaaggcgcgaacuuccacgcuucaugaacuacacccucaacaacacuaaaaacaacaacgugacccuauccaaaaagcguaaacgccgauuccuagguuuccuucucggugucggcuccgccauugccuccggcaucgcuguuuccaaaguccuccaccucgaaggcgaaguaaacaagauaaaaaacgcccuccucucuacaaacaaggccgugguaucgcucucuaacggcgucucuguacucaccuccaaaguccucgaccucaaaaacuacaucgacaagcaacuccucccuaucgucaauaaacaauccugcuccauuuccaacaucgaaacagugaucgaauuucaacaaaaaaacaaccgauuacuagaaaucacccgcgaauuuucagucaacgccggcgucacaacgccagucucaaccuacaugcucaccaacucagaacucuuaucacucaucaacgacaugcccaucacuaacgaccagaaaaaacugauguccaacaacgugcaaauaguccgccaacaguccuacuccaucauguccauaaucaaggaggaggugcucgccuacguaguccaacucccccucuacggagucauugacaccccuugcuggaaacuacacaccuccccucucugcaccaccaacaccaaagaaggcagcaacaucugccuaaccaggacggaccgaggaugguacugcgacaaugcaggcuccgucagcuucuucccacaagccgaaacaugcaaaguucaaucaaaccguguauucugcgacaccaugaacucacucacccuccccucagaaguaaaccuaugcaacauagauaucuucaaccccaaauacgacugcaaaauuaugaccuccaaaaccgaugucuccagcuccguuaucacgucacucggcgccaucgucuccugcuacggcaagaccaaaugcaccgccuccaacaaaaaccgcggaauaaucaaaacauucucuaacggcugcgacuacgucuccaauaaaggcgucgacaccgucuccgugggcaacacgcuguacuacgucaacaaacaagaaggcaaaucucuuuacgucaaaggugaaccaaucaucaacuucuacgacccccucguauuccccuccgacgaauuugacgcgagcaucucccaagucaacgaaaagaucaaccaaucccucgccuucauccgaaaaagcgacgaacuccuccacaacgucaacgucggcaaaaguaccacaaacauuaugaucaccaccaucaucauagucaucaucgucauccugcuccuacuaauagccgucggccucuucuuguacugcaaggcacgaugaggacuaguggaagcauuuuccuggcugauuaaaagaaauuacucagcuauggucaucuguuccuguuagaaggcuaugcagcauauuauauacuaugcgcauguuaugaaaugcauaauaaaaaauuuuaaaaaaucuaaaagaucuaaaaaaaaaaaaaaaaaaaaaaaaaaaaaaaaaaaaaaaaaaaaaaaaaaaaaaaaaaaaaaaaugcaucccccccccccccccccccccccccccccccaaaggcucuuuucagagccaccagaauu

SEQ ID NO: 12200 - RNA, 2037 nt, Artificial Sequence
  mRNA product Design c-3 comprising derived and/or modified sequence from HRSV(Memphis-37)__AIY60640.1__F-del (wt)
gggagaguccgcucagccagguugcagaagcggcuuagcguguguccuaaucuucucucugcguguagguaggccugugccgcaaacaagcuuaccauggaguugccaauccucaaaacaaaugcaauuaccacaauccuugcugcagucacacucuguuucgcuuccagucaaaacaucacugaagaauuuuaucaaucaacaugcagugcaguuagcaaaggcuaucuuagugcuuuaagaacugguugguauacuaguguuauaacuauagaauuaaguaauaucaaggaaaauaaguguaauggaacagaugcuaagguaaaauugauaaaacaagaauuagauaaauauaaaaaugcuguaacagaauugcaguugcucaugcaaagcacaccagcagccaacaaucgagccagaagagaacuaccaagguuuaugaauuauacacucaacaauaccaaaaauaacaauguaacauuaagcaagaaaaggaaaagaagauuucuuggcuuuuuguuagguguuggaucugcaaucgccaguggcauugcuguaucuaaaguccugcaccuagaaggggaagugaacaaaaucaaaaaugcucuacuauccacaaacaaggcuguagucagcuuaucaaauggaguuagugucuuaaccagcaaaguguuagaccucaaaaacuauauagauaaacaguuguuacccauugugaacaagcaaagcugcagcauaucaaacauugaaacugugauagaauuccaacaaaagaacaacagacuacuagagauuaccagggaauuuaguguuaaugcagguguaacuacaccuguaagcacuuauauguuaacaaauagugaauuauuaucauuaaucaaugauaugccuauaacaaaugaucagaaaaaguuaauguccaacaauguucaaauaguuagacagcaaaguuacucuaucauguccauaauaaaggaggaagucuuagcauauguaguucaauuaccacuauaugguguaauagauacaccuuguuggaaacuacacacauccccucuaugcacaaccaacacaaaggaaggguccaacaucuguuuaacaagaaccgacagaggaugguacugugacaaugcaggaucagugucuuucuucccacaagcugaaacaugcaaaguucaaucgaaucgaguauuuugugacacaaugaacagucuaacauuaccaagugaaguaaaucucugcaacauugacauauucaacccuaaauaugauugcaaaauuaugacuucaaaaacagaugugagcagcuccguuaucacaucucuaggagccauugugucaugcuauggcaaaacuaaauguacagcauccaauaaaaaucguggaaucauaaagacauuuucuaacgggugugauuauguaucaaauaaggggguggacacuguaucuguagguaauacauuauauuauguaaauaagcaagaaggaaaaagccucuauguaaaaggugaaccaauaauaaauuucuaugacccauuaguguucccuucugaugaauuugaugcaucaauaucucaagucaaugagaagauuaaccagagccuagcauuuauucguaaauccgaugaauuauuacauaauguaaauguugguaaauccaccacaaauaucaugauaacuacuauaauuauagugauuauaguaauauuguuauuauuaauugcaguugggcuguuccuauacugcaaggccagaugaggacuaguacuggcugcaucucccuuuccucuguccuccauccuucucccaggauggugaagggggaccugguacccagugauccccaccccaggauccuaaaucaugacuuaccugcuaauaaaaacucauuggaaaagugagaagaucuaaaaaaaaaaaaaaaaaaaaaaaaaaaaaaaaaaaaaaaaaaaaaaaaaaaaaaaaaaaaaaaaugcaucccccccccccccccccccccccccccccccaaaggcucuuuucagagccaccagaauu

SEQ ID NO: 12201 - RNA, 2037 nt, Artificial Sequence
  mRNA product Design c-3 comprising derived and/or modified sequence from HRSV(Memphis-37)__AIY60640.1__F-del (opt1)
gggagaguccgcucagccagguugcagaagcggcuuagcguguguccuaaucuucucucugcguguagguaggccugugccgcaaacaagcuuaccauggagcugcccauccucaagaccaacgccaucaccacgauccuggccgcggugacccugugcuucgccagcucccagaacaucaccgaggaguucuaccagagcacgugcuccgccgucagcaagggcuaccucuccgcccugcgcaccgggugguacaccagcgugaucaccaucgagcuguccaacaucaaggagaacaagugcaacggcaccgacgccaaggugaagcucaucaagcaggagcuggacaaguacaagaacgcggucacggagcugcagcuccugaugcagagcaccccggccgccaacaaccgggcccgccgggagcugccccgcuucaugaacuacacccucaacaacaccaagaacaacaacgugacgcuguccaagaagcggaagcgccgguuccugggguuccuccugggcguggggagcgcgaucgccuccggcaucgccgucagcaaggugcugcaccucgagggcgaggugaacaagaucaagaacgcccugcuguccaccaacaaggccgucgugagccucuccaacggggugagcguccugaccuccaaggugcuggaccucaagaacuacaucgacaagcagcugcugcccaucgugaacaagcagagcugcuccaucagcaacaucgagaccgucaucgaguuccagcagaagaacaaccgccuccuggagaucacgcgggaguucagcgugaacgcgggcgugaccacccccgucuccaccuacaugcugacgaacagcgagcuccugucccugaucaacgacaugccgaucaccaacgaccagaagaagcucaugagcaacaacgugcagaucgugcgccagcaguccuacagcaucauguccaucaucaaggaggagguccuggccuacguggugcagcugccccucuacggggucaucgacacccccugcuggaagcugcacaccagcccccugugcacgaccaacaccaaggagggcuccaacaucugccucacccggacggaccgcgggugguacugcgacaacgccggcagcguguccuucuucccgcaggccgagaccugcaagguccagagcaaccggguguucugcgacaccaugaacucccugacccugcccagcgaggugaaccucugcaacaucgacaucuucaaccccaaguacgacugcaagaucaugacguccaagaccgacgucagcuccagcgugaucaccucccugggcgccaucgugagcugcuacgggaagaccaagugcacggcgagcaacaagaaccgcggcaucaucaagaccuucuccaacgggugcgacuacgucagcaacaagggcguggacaccguguccgucggcaacacccuguacuacgugaacaagcaggagggcaagagccucuacgugaagggggagcccaucaucaacuucuacgacccgcuggucuuccccuccgacgaguucgacgccagcaucucccaggugaacgagaagaucaaccagagccuggccuucauccggaaguccgacgagcuccugcacaacgugaacgucggcaagagcaccacgaacaucaugaucaccaccaucaucaucgugaucaucgugauccugcugcuccugaucgccgucgggcuguuccucuacugcaaggcccgcugaggacuaguacuggcugcaucucccuuuccucuguccuccauccuucucccaggauggugaagggggaccugguacccagugauccccaccccaggauccuaaaucaugacuuaccugcuaauaaaaacucauuggaaaagugagaagaucuaaaaaaaaaaaaaaaaaaaaaaaaaaaaaaaaaaaaaaaaaaaaaaaaaaaaaaaaaaaaaaaaugcaucccccccccccccccccccccccccccccccaaaggcucuuuucagagccaccagaauu

SEQ ID NO: 12202 - RNA, 2037 nt, Artificial Sequence
  mRNA product Design c-3 comprising derived and/or modified sequence from HRSV(Memphis-37)__AIY60640.1__F-del (opt2)
gggagaguccgcucagccagguugcagaagcggcuuagcguguguccuaaucuucucucugcguguagguaggccugugccgcaaacaagcuuaccauggagcuccccauccucaagaccaacgccaucaccaccauccucgccgccgucacccucugcuucgccuccucccagaacaucaccgaggaguucuaccaguccaccugcuccgccgucuccaagggcuaccucuccgcccuccgcaccggcugguacaccuccgucaucaccaucgagcucuccaacaucaaggagaacaagugcaacggcaccgacgccaaggucaagcucaucaagcaggagcucgacaaguacaagaacgccgucaccgagcuccagcuccucaugcaguccacccccgccgccaacaaccgcgcccgccgcgagcucccccgcuucaugaacuacacccucaacaacaccaagaacaacaacgucacccucuccaagaagcgcaagcgccgcuuccucggcuuccuccucggcgucggcuccgccaucgccuccggcaucgccgucuccaagguccuccaccucgagggcgaggucaacaagaucaagaacgcccuccucuccaccaacaaggccgucgucucccucuccaacggcgucuccguccucaccuccaagguccucgaccucaagaacuacaucgacaagcagcuccuccccaucgucaacaagcaguccugcuccaucuccaacaucgagaccgucaucgaguuccagcagaagaacaaccgccuccucgagaucacccgcgaguucuccgucaacgccggcgucaccacccccgucuccaccuacaugcucaccaacuccgagcuccucucccucaucaacgacaugcccaucaccaacgaccagaagaagcucauguccaacaacguccagaucguccgccagcaguccuacuccaucauguccaucaucaaggaggagguccucgccuacgucguccagcucccccucuacggcgucaucgacacccccugcuggaagcuccacaccuccccccucugcaccaccaacaccaaggagggcuccaacaucugccucacccgcaccgaccgcggcugguacugcgacaacgccggcuccgucuccuucuucccccaggccgagaccugcaagguccaguccaaccgcgucuucugcgacaccaugaacucccucacccuccccuccgaggucaaccucugcaacaucgacaucuucaaccccaaguacgacugcaagaucaugaccuccaagaccgacgucuccuccuccgucaucaccucccucggcgccaucgucuccugcuacggcaagaccaagugcaccgccuccaacaagaaccgcggcaucaucaagaccuucuccaacggcugcgacuacgucuccaacaagggcgucgacaccgucuccgucggcaacacccucuacuacgucaacaagcaggagggcaagucccucuacgucaagggcgagcccaucaucaacuucuacgacccccucgucuuccccuccgacgaguucgacgccuccaucucccaggucaacgagaagaucaaccagucccucgccuucauccgcaaguccgacgagcuccuccacaacgucaacgucggcaaguccaccaccaacaucaugaucaccaccaucaucaucgucaucaucgucauccuccuccuccucaucgccgucggccucuuccucuacugcaaggcccgcugaggacuaguacuggcugcaucucccuuuccucuguccuccauccuucucccaggauggugaagggggaccugguacccagugauccccaccccaggauccuaaaucaugacuuaccugcuaauaaaaacucauuggaaaagugagaagaucuaaaaaaaaaaaaaaaaaaaaaaaaaaaaaaaaaaaaaaaaaaaaaaaaaaaaaaaaaaaaaaaaugcaucccccccccccccccccccccccccccccccaaaggcucuuuucagagccaccagaauu

SEQ ID NO: 12203 - RNA, 2037 nt, Artificial Sequence
  mRNA product Design c-3 comprising derived and/or modified sequence from HRSV(Memphis-37)__AIY60640.1__F-del (opt3)
gggagaguccgcucagccagguugcagaagcggcuuagcguguguccuaaucuucucucugcguguagguaggccugugccgcaaacaagcuuaccauggagcugcccauccucaagaccaacgccauuacaacuauacuugcugcagugacgcugugcuucgccagcucccagaauaucaccgaagaguuuuaccaaucuacauguucagcggucaguaaaggcuauuugagcgcuuuaagaacugggugguacaccuccguuauuacaaucgaacugucuaacauuaaggagaauaaaugcaacggaaccgacgccaaggugaaacuaaucaagcaggaacucgauaaguauaaaaaugcaguaacugagcugcagcuucugaugcagucgaccccugccgcuaacaauagggcacggcgcgaguugccacgauucaugaacuacacacucaauaacacgaagaauaacaaugugacucugagcaaaaagcguaaaagaagguuucuggguuuccucuuaggcgucgggucagccauagcuaguggaaucgccguguccaagguucugcaccuugaaggcgaggugaacaagauuaaaaaugcguugcugucuaccaacaaggcagucgugagccuauccaacgguguaucaguucucacaaguaaagugcuggaccuuaagaauuauaucgauaaacaacuguugccgauugucaacaagcagagcuguucuaucuccaauauagaaacugugauugaguuucagcagaaaaacaaucggcuccuggagaucacccgcgaguucucagugaacgccggggucacaacccccguuagcacguacauguuaacuaauagugaacugcucucucuuauuaacgacaugccuaucacaaaugaucaaaagaagcugauguccaacaaugugcagaucguaagacagcagagcuauucgauuaugucuauaaucaaagaagagguguuggcuuacgucgugcaacuaccacuguacggaguuauugacacccccugcuggaagcuccauacuuccccucuguguacaaccaacacgaaagaaggcucaaauaucugccuuaccaggacagaucggggcugguauugugacaacgccgggagugugagcuuuuucccacaggcagagacuugcaagguccaguccaaucgcguguuuugugauaccaugaacucucugacauugcccagcgagguaaaccucugcaauauagacauuuucaacccuaaauacgauuguaagaucaugacuucaaagaccgacguuaguuccagcgugaucacaucucugggagcuauugucucaugcuaugguaaaaccaagugcacugccaguaauaaaaaccgaggcaucauuaagacguuuagcaaugggugugauuacguguccaacaaaggagucgacacagugucuguuggcaauaccuuauauuacgugaacaagcaagaagguaagucgcuguauguaaaaggggagccaauaaucaauuucuacgacccgcuagucuuucccagcgaugaguucgacgcguccauuucacaggugaacgaaaagaucaaucagagucucgccuucaucagaaaaucugaugaacugcuucacaacguuaaugugggaaagagcacuaccaacauuaugauaacaaccaucauuaucgucauuaucgugauauugcugcuccugaucgcaguaggccuuuuucuguacugcaaagcuaggugaggacuaguacuggcugcaucucccuuuccucuguccuccauccuucucccaggauggugaagggggaccugguacccagugauccccaccccaggauccuaaaucaugacuuaccugcuaauaaaaacucauuggaaaagugagaagaucuaaaaaaaaaaaaaaaaaaaaaaaaaaaaaaaaaaaaaaaaaaaaaaaaaaaaaaaaaaaaaaaaugcaucccccccccccccccccccccccccccccccaaaggcucuuuucagagccaccagaauu

SEQ ID NO: 12204 - RNA, 2037 nt, Artificial Sequence
  mRNA product Design c-3 comprising derived and/or modified sequence from HRSV(Memphis-37)__AIY60640.1__F-del (opt4)
gggagaguccgcucagccagguugcagaagcggcuuagcguguguccuaaucuucucucugcguguagguaggccugugccgcaaacaagcuuaccauggagcugcccauccugaagaccaacgccaucaccaccauccuggccgccgugacccugugcuucgccagcagccagaacaucaccgaggaguucuaccagagcaccugcagcgccgugagcaagggcuaccugagcgcccugagaaccggcugguacaccagcgugaucaccaucgagcugagcaacaucaaggagaacaagugcaacggcaccgacgccaaggugaagcugaucaagcaggagcuggacaaguacaagaacgccgugaccgagcugcagcugcugaugcagagcacccccgccgccaacaacagagccagaagagagcugcccagauucaugaacuacacccugaacaacaccaagaacaacaacgugacccugagcaagaagagaaagagaagauuccugggcuuccugcugggcgugggcagcgccaucgccagcggcaucgccgugagcaaggugcugcaccuggagggcgaggugaacaagaucaagaacgcccugcugagcaccaacaaggccguggugagccugagcaacggcgugagcgugcugaccagcaaggugcuggaccugaagaacuacaucgacaagcagcugcugcccaucgugaacaagcagagcugcagcaucagcaacaucgagaccgugaucgaguuccagcagaagaacaacagacugcuggagaucaccagagaguucagcgugaacgccggcgugaccacccccgugagcaccuacaugcugaccaacagcgagcugcugagccugaucaacgacaugcccaucaccaacgaccagaagaagcugaugagcaacaacgugcagaucgugagacagcagagcuacagcaucaugagcaucaucaaggaggaggugcuggccuacguggugcagcugccccuguacggcgugaucgacacccccugcuggaagcugcacaccagcccccugugcaccaccaacaccaaggagggcagcaacaucugccugaccagaaccgacagaggcugguacugcgacaacgccggcagcgugagcuucuucccccaggccgagaccugcaaggugcagagcaacagaguguucugcgacaccaugaacagccugacccugcccagcgaggugaaccugugcaacaucgacaucuucaaccccaaguacgacugcaagaucaugaccagcaagaccgacgugagcagcagcgugaucaccagccugggcgccaucgugagcugcuacggcaagaccaagugcaccgccagcaacaagaacagaggcaucaucaagaccuucagcaacggcugcgacuacgugagcaacaagggcguggacaccgugagcgugggcaacacccuguacuacgugaacaagcaggagggcaagagccuguacgugaagggcgagcccaucaucaacuucuacgacccccugguguuccccagcgacgaguucgacgccagcaucagccaggugaacgagaagaucaaccagagccuggccuucaucagaaagagcgacgagcugcugcacaacgugaacgugggcaagagcaccaccaacaucaugaucaccaccaucaucaucgugaucaucgugauccugcugcugcugaucgccgugggccuguuccuguacugcaaggccagaugaggacuaguacuggcugcaucucccuuuccucuguccuccauccuucucccaggauggugaagggggaccugguacccagugauccccaccccaggauccuaaaucaugacuuaccugcuaauaaaaacucauuggaaaagugagaagaucuaaaaaaaaaaaaaaaaaaaaaaaaaaaaaaaaaaaaaaaaaaaaaaaaaaaaaaaaaaaaaaaaugcaucccccccccccccccccccccccccccccccaaaggcucuuuucagagccaccagaauu

SEQ ID NO: 12205 - RNA, 2037 nt, Artificial Sequence
  mRNA product Design c-3 comprising derived and/or modified sequence from HRSV(Memphis-37)__AIY60640.1__F-del (opt5)
gggagaguccgcucagccagguugcagaagcggcuuagcguguguccuaaucuucucucugcguguagguaggccugugccgcaaacaagcuuaccauggagcugcccauccucaagaccaacgccauuacaacgauccuggcugccgugacccuuugcuucgcgagcucccagaauauuacagaagaguuuuaccaaucuaccuguagcgcugucuccaaaggcuaucugucugcccucagaacagggugguacaccagcguuaucacaauugaacuguccaacaucaaggagaauaaaugcaacggaaccgacgccaaggugaaacuuaucaagcaggaacuggauaaguauaaaaaugcugugacggagcuccagcugcugaugcagucuaccccugccgcuaacaaucgggcccgcagagagcucccgcgguucaugaacuacacacugaauaacaccaagaauaacaaugucacacuuagcaaaaagcgcaaaagacgguuucugggcuuccuccugggggugggauccgcgauugccagcggcaucgcuguuucuaaggugcuucaccuggaaggggaggucaacaagauuaaaaaugcccuccuguccaccaacaaggcugugguuagccugucuaacggaguguccguccucacgagcaaagugcuggaccuuaagaauuauaucgauaaacaacugcuccccauugugaacaagcagucuuguuccaucagcaauauugaaacagucaucgaguuucagcagaaaaacaaucgccugcuugagaucaccagagaauuuuccguuaacgccggcgugacaaccccugugucuaccuacaugcugacaaauagcgagcuccugucccugauuaacgacaugcccaucacgaaugaucaaaagaagcucaugagcaacaauguccagauugugcggcagcagucuuauuccaucaugagcauuaucaaagaagagguucuggcguacgugguccaacuuccucuguacggcgugaucgacacccccugcuggaagcuccauacaucuccucuguguaccacaaacaccaaagaagggagcaauauuugccuuacgcgcacagauagaggaugguauugugacaacgccggcuccguuucuuucuucccgcaggcugagaccugcaaggugcagagcaaucgggucuuuugugauaccaugaacucccugacacuccccagcgaggugaaccugugcaauaucgacauuuucaacccuaaauacgauuguaagaucaugaccucuaagacagacgucuccagcucugugauuacgucccugggggccaucguuagcugcuauggaaaaaccaagugcacagcuuccaauaaaaaccgcggcaucauuaagaccuuuucuaaugggugugauuacgugagcaacaaaggagucgacacaguguccguuggcaauacccucuauuacgugaacaagcaagaaggcaagucucuguaugucaaaggggagcccaucauuaauuucuacgacccucuuguguuucccagcgaugaguucgacgccuccaucagccaggugaacgaaaagauuaaucagucucuggccuucaucagaaaauccgaugaacuccugcacaacguuaaugucggaaagagcacgaccaacauuaugaucacaaccaucauuaucgugauuaucgugauucugcuucuccugaucgcugucggccuguuucucuacugcaaagcgcggugaggacuaguacuggcugcaucucccuuuccucuguccuccauccuucucccaggauggugaagggggaccugguacccagugauccccaccccaggauccuaaaucaugacuuaccugcuaauaaaaacucauuggaaaagugagaagaucuaaaaaaaaaaaaaaaaaaaaaaaaaaaaaaaaaaaaaaaaaaaaaaaaaaaaaaaaaaaaaaaaugcaucccccccccccccccccccccccccccccccaaaggcucuuuucagagccaccagaauu

SEQ ID NO: 12206 - RNA, 2037 nt, Artificial Sequence
  mRNA product Design c-3 comprising derived and/or modified sequence from HRSV(Memphis-37)__AIY60640.1__F-del (opt6)
gggagaguccgcucagccagguugcagaagcggcuuagcguguguccuaaucuucucucugcguguagguaggccugugccgcaaacaagcuuaccauggaacucccaauauuaaaaacuaacgcaaucacaaccauauuagcagccgucacucuaugcuuugccuccucacaaaauauaacagaagaauuuuaccaauccacaugcucagccguuagcaaaggauaucuaucagcccuaagaacaggcugguauacuucaguaauaacaauagaacuaucaaauauaaaagaaaacaaaugcaacggaaccgacgcuaaaguaaagcucauaaaacaagaauuagacaaauacaaaaaugcaguaacagaacuacaacuccuaaugcaaucaaccccagccgccaauaacagagcuagacgagaacuaccccgauucaugaauuacacacuaaacaacacaaaaaacaacaauguaacacucucaaaaaaaagaaaacgaagauucuuagguuuucuccugggaguaggaucagcaaucgcuuccggaaucgcagucaguaaaguccuucaccuugaaggcgaaguaaacaaaauaaaaaaugcacuacuaucuacaaauaaagcaguaguaucccuauccaauggcgucucaguauuaaccucaaaaguacucgaccuuaaaaauuauauagacaaacaauuacuacccauagucaauaaacaauccuguuccauaucaaacauagaaacaguaaucgaauuucaacaaaaaaacaacagauuacuagaaauaacacgcgaauuuucagucaacgccggaguaaccacacccgucucaacauacaugcuaaccaacuccgaacuacuaucacuuaucaacgacaugccaauaacaaaugaccaaaaaaaacucaugucaaacaacguacaaauaguccgccaacaaucauacucuauaaugucuauuaucaaagaagaaguucucgcauacguaguacaacuaccacuauauggugucauagacacaccauguuggaaacuccauacaucacccuuauguacaaccaauacaaaagaaggcucaaacaucugccuaacucgaacagaccgaggaugguacugcgacaaugcaggaucugucucauucuucccucaagcagaaacauguaaaguucaaucuaauagaguuuucugcgauacaaugaacucacuaacucuaccaucagaaguaaaucucuguaauauugacauauucaacccaaaauacgauugcaagaucaugacaucaaaaacugacguaucauccucagucaucaccucauuaggagcaaucguaagcuguuacgggaaaacaaaaugcaccgcuucuaacaaaaauagaggaauaauuaaaaccuucucaaacggaugcgauuacgucuccaauaaaggaguagauacaguaagcguaggaaauacucuauacuacgucaauaaacaagaaggaaaaucacuuuaugucaaaggagaacccauaauaaauuucuacgacccauuagucuucccaucagaugaauuugacgcauccauaucccaagucaacgaaaaaaucaaucaaucacuagcauucauacgaaaaucagacgaacuacuacacaacguuaacguaggaaaaucaacaaccaacaucaugauaaccacuauaauaaucgucauaauagucauccuauuauuacuaauagccguaggccuuuuccuauacuguaaagcuagauaaggacuaguacuggcugcaucucccuuuccucuguccuccauccuucucccaggauggugaagggggaccugguacccagugauccccaccccaggauccuaaaucaugacuuaccugcuaauaaaaacucauuggaaaagugagaagaucuaaaaaaaaaaaaaaaaaaaaaaaaaaaaaaaaaaaaaaaaaaaaaaaaaaaaaaaaaaaaaaaaugcaucccccccccccccccccccccccccccccccaaaggcucuuuucagagccaccagaauu

SEQ ID NO: 12207 - RNA, 2037 nt, Artificial Sequence
  mRNA product Design c-3 comprising derived and/or modified sequence from HRSV(Memphis-37)__AIY60640.1__F-del (opt11)
gggagaguccgcucagccagguugcagaagcggcuuagcguguguccuaaucuucucucugcguguagguaggccugugccgcaaacaagcuuaccauggaacucccgauccucaaaaccaacgccaucaccacuauccucgccgccguaacccucugcuucgccucaucccaaaacaucaccgaagaauuuuaccaauccacaugcuccgccgucuccaaagguuaccucucagcccuccgcaccggcugguacaccuccguuaucaccaucgaacuuuccaacauaaaagagaacaagugcaacggcaccgacgcaaaaguaaaacuaaucaaacaagaacuagacaaauacaaaaacgccgucaccgaacuccagcuccucaugcaaucgacgcccgccgccaacaaccgagcaaggcgcgaacuuccacgcuucaugaacuacacccucaacaacacuaaaaacaacaacgugacccuauccaaaaagcguaaacgccgauuccuagguuuccuucucggugucggcuccgccauugccuccggcaucgcuguuuccaaaguccuccaccucgaaggcgaaguaaacaagauaaaaaacgcccuccucucuacaaacaaggccgugguaucgcucucuaacggcgucucuguacucaccuccaaaguccucgaccucaaaaacuacaucgacaagcaacuccucccuaucgucaauaaacaauccugcuccauuuccaacaucgaaacagugaucgaauuucaacaaaaaaacaaccgauuacuagaaaucacccgcgaauuuucagucaacgccggcgucacaacgccagucucaaccuacaugcucaccaacucagaacucuuaucacucaucaacgacaugcccaucacuaacgaccagaaaaaacugauguccaacaacgugcaaauaguccgccaacaguccuacuccaucauguccauaaucaaggaggaggugcucgccuacguaguccaacucccccucuacggagucauugacaccccuugcuggaaacuacacaccuccccucucugcaccaccaacaccaaagaaggcagcaacaucugccuaaccaggacggaccgaggaugguacugcgacaaugcaggcuccgucagcuucuucccacaagccgaaacaugcaaaguucaaucaaaccguguauucugcgacaccaugaacucacucacccuccccucagaaguaaaccuaugcaacauagauaucuucaaccccaaauacgacugcaaaauuaugaccuccaaaaccgaugucuccagcuccguuaucacgucacucggcgccaucgucuccugcuacggcaagaccaaaugcaccgccuccaacaaaaaccgcggaauaaucaaaacauucucuaacggcugcgacuacgucuccaauaaaggcgucgacaccgucuccgugggcaacacgcuguacuacgucaacaaacaagaaggcaaaucucuuuacgucaaaggugaaccaaucaucaacuucuacgacccccucguauuccccuccgacgaauuugacgcgagcaucucccaagucaacgaaaagaucaaccaaucccucgccuucauccgaaaaagcgacgaacuccuccacaacgucaacgucggcaaaaguaccacaaacauuaugaucaccaccaucaucauagucaucaucgucauccugcuccuacuaauagccgucggccucuucuuguacugcaaggcacgaugaggacuaguacuggcugcaucucccuuuccucuguccuccauccuucucccaggauggugaagggggaccugguacccagugauccccaccccaggauccuaaaucaugacuuaccugcuaauaaaaacucauuggaaaagugagaagaucuaaaaaaaaaaaaaaaaaaaaaaaaaaaaaaaaaaaaaaaaaaaaaaaaaaaaaaaaaaaaaaaaugcaucccccccccccccccccccccccccccccccaaaggcucuuuucagagccaccagaauu

SEQ ID NO: 12208 - RNA, 2033 nt, Artificial Sequence
  mRNA product Design c-4 comprising derived and/or modified sequence from HRSV(Memphis-37)__AIY60640.1__F-del (wt)
gggagaguccgcucagccagguugcagaagcggcuuagcguguguccuaaucuucucucugcguguagguaggccugugccgcaaacaagcuuaccauggaguugccaauccucaaaacaaaugcaauuaccacaauccuugcugcagucacacucuguuucgcuuccagucaaaacaucacugaagaauuuuaucaaucaacaugcagugcaguuagcaaaggcuaucuuagugcuuuaagaacugguugguauacuaguguuauaacuauagaauuaaguaauaucaaggaaaauaaguguaauggaacagaugcuaagguaaaauugauaaaacaagaauuagauaaauauaaaaaugcuguaacagaauugcaguugcucaugcaaagcacaccagcagccaacaaucgagccagaagagaacuaccaagguuuaugaauuauacacucaacaauaccaaaaauaacaauguaacauuaagcaagaaaaggaaaagaagauuucuuggcuuuuuguuagguguuggaucugcaaucgccaguggcauugcuguaucuaaaguccugcaccuagaaggggaagugaacaaaaucaaaaaugcucuacuauccacaaacaaggcuguagucagcuuaucaaauggaguuagugucuuaaccagcaaaguguuagaccucaaaaacuauauagauaaacaguuguuacccauugugaacaagcaaagcugcagcauaucaaacauugaaacugugauagaauuccaacaaaagaacaacagacuacuagagauuaccagggaauuuaguguuaaugcagguguaacuacaccuguaagcacuuauauguuaacaaauagugaauuauuaucauuaaucaaugauaugccuauaacaaaugaucagaaaaaguuaauguccaacaauguucaaauaguuagacagcaaaguuacucuaucauguccauaauaaaggaggaagucuuagcauauguaguucaauuaccacuauaugguguaauagauacaccuuguuggaaacuacacacauccccucuaugcacaaccaacacaaaggaaggguccaacaucuguuuaacaagaaccgacagaggaugguacugugacaaugcaggaucagugucuuucuucccacaagcugaaacaugcaaaguucaaucgaaucgaguauuuugugacacaaugaacagucuaacauuaccaagugaaguaaaucucugcaacauugacauauucaacccuaaauaugauugcaaaauuaugacuucaaaaacagaugugagcagcuccguuaucacaucucuaggagccauugugucaugcuauggcaaaacuaaauguacagcauccaauaaaaaucguggaaucauaaagacauuuucuaacgggugugauuauguaucaaauaaggggguggacacuguaucuguagguaauacauuauauuauguaaauaagcaagaaggaaaaagccucuauguaaaaggugaaccaauaauaaauuucuaugacccauuaguguucccuucugaugaauuugaugcaucaauaucucaagucaaugagaagauuaaccagagccuagcauuuauucguaaauccgaugaauuauuacauaauguaaauguugguaaauccaccacaaauaucaugauaacuacuauaauuauagugauuauaguaauauuguuauuauuaauugcaguugggcuguuccuauacugcaaggccagaugaggacuaguggaagcauuuuccuggcugauuaaaagaaauuacucagcuauggucaucuguuccuguuagaaggcuaugcagcauauuauauacuaugcgcauguuaugaaaugcauaauaaaaaauuuuaaaaaaucuaaaagaucuaaaaaaaaaaaaaaaaaaaaaaaaaaaaaaaaaaaaaaaaaaaaaaaaaaaaaaaaaaaaaaaaugcaucccccccccccccccccccccccccccccccaaaggcucuuuucagagccaccagaauu

SEQ ID NO: 12209 - RNA, 2033 nt, Artificial Sequence
  mRNA product Design c-4 comprising derived and/or modified sequence from HRSV(Memphis-37)__AIY60640.1__F-del (opt1)
gggagaguccgcucagccagguugcagaagcggcuuagcguguguccuaaucuucucucugcguguagguaggccugugccgcaaacaagcuuaccauggagcugcccauccucaagaccaacgccaucaccacgauccuggccgcggugacccugugcuucgccagcucccagaacaucaccgaggaguucuaccagagcacgugcuccgccgucagcaagggcuaccucuccgcccugcgcaccgggugguacaccagcgugaucaccaucgagcuguccaacaucaaggagaacaagugcaacggcaccgacgccaaggugaagcucaucaagcaggagcuggacaaguacaagaacgcggucacggagcugcagcuccugaugcagagcaccccggccgccaacaaccgggcccgccgggagcugccccgcuucaugaacuacacccucaacaacaccaagaacaacaacgugacgcuguccaagaagcggaagcgccgguuccugggguuccuccugggcguggggagcgcgaucgccuccggcaucgccgucagcaaggugcugcaccucgagggcgaggugaacaagaucaagaacgcccugcuguccaccaacaaggccgucgugagccucuccaacggggugagcguccugaccuccaaggugcuggaccucaagaacuacaucgacaagcagcugcugcccaucgugaacaagcagagcugcuccaucagcaacaucgagaccgucaucgaguuccagcagaagaacaaccgccuccuggagaucacgcgggaguucagcgugaacgcgggcgugaccacccccgucuccaccuacaugcugacgaacagcgagcuccugucccugaucaacgacaugccgaucaccaacgaccagaagaagcucaugagcaacaacgugcagaucgugcgccagcaguccuacagcaucauguccaucaucaaggaggagguccuggccuacguggugcagcugccccucuacggggucaucgacacccccugcuggaagcugcacaccagcccccugugcacgaccaacaccaaggagggcuccaacaucugccucacccggacggaccgcgggugguacugcgacaacgccggcagcguguccuucuucccgcaggccgagaccugcaagguccagagcaaccggguguucugcgacaccaugaacucccugacccugcccagcgaggugaaccucugcaacaucgacaucuucaaccccaaguacgacugcaagaucaugacguccaagaccgacgucagcuccagcgugaucaccucccugggcgccaucgugagcugcuacgggaagaccaagugcacggcgagcaacaagaaccgcggcaucaucaagaccuucuccaacgggugcgacuacgucagcaacaagggcguggacaccguguccgucggcaacacccuguacuacgugaacaagcaggagggcaagagccucuacgugaagggggagcccaucaucaacuucuacgacccgcuggucuuccccuccgacgaguucgacgccagcaucucccaggugaacgagaagaucaaccagagccuggccuucauccggaaguccgacgagcuccugcacaacgugaacgucggcaagagcaccacgaacaucaugaucaccaccaucaucaucgugaucaucgugauccugcugcuccugaucgccgucgggcuguuccucuacugcaaggcccgcugaggacuaguggaagcauuuuccuggcugauuaaaagaaauuacucagcuauggucaucuguuccuguuagaaggcuaugcagcauauuauauacuaugcgcauguuaugaaaugcauaauaaaaaauuuuaaaaaaucuaaaagaucuaaaaaaaaaaaaaaaaaaaaaaaaaaaaaaaaaaaaaaaaaaaaaaaaaaaaaaaaaaaaaaaaugcaucccccccccccccccccccccccccccccccaaaggcucuuuucagagccaccagaauu

SEQ ID NO: 12210 - RNA, 2033 nt, Artificial Sequence
  mRNA product Design c-4 comprising derived and/or modified sequence from HRSV(Memphis-37)__AIY60640.1__F-del (opt2)
gggagaguccgcucagccagguugcagaagcggcuuagcguguguccuaaucuucucucugcguguagguaggccugugccgcaaacaagcuuaccauggagcuccccauccucaagaccaacgccaucaccaccauccucgccgccgucacccucugcuucgccuccucccagaacaucaccgaggaguucuaccaguccaccugcuccgccgucuccaagggcuaccucuccgcccuccgcaccggcugguacaccuccgucaucaccaucgagcucuccaacaucaaggagaacaagugcaacggcaccgacgccaaggucaagcucaucaagcaggagcucgacaaguacaagaacgccgucaccgagcuccagcuccucaugcaguccacccccgccgccaacaaccgcgcccgccgcgagcucccccgcuucaugaacuacacccucaacaacaccaagaacaacaacgucacccucuccaagaagcgcaagcgccgcuuccucggcuuccuccucggcgucggcuccgccaucgccuccggcaucgccgucuccaagguccuccaccucgagggcgaggucaacaagaucaagaacgcccuccucuccaccaacaaggccgucgucucccucuccaacggcgucuccguccucaccuccaagguccucgaccucaagaacuacaucgacaagcagcuccuccccaucgucaacaagcaguccugcuccaucuccaacaucgagaccgucaucgaguuccagcagaagaacaaccgccuccucgagaucacccgcgaguucuccgucaacgccggcgucaccacccccgucuccaccuacaugcucaccaacuccgagcuccucucccucaucaacgacaugcccaucaccaacgaccagaagaagcucauguccaacaacguccagaucguccgccagcaguccuacuccaucauguccaucaucaaggaggagguccucgccuacgucguccagcucccccucuacggcgucaucgacacccccugcuggaagcuccacaccuccccccucugcaccaccaacaccaaggagggcuccaacaucugccucacccgcaccgaccgcggcugguacugcgacaacgccggcuccgucuccuucuucccccaggccgagaccugcaagguccaguccaaccgcgucuucugcgacaccaugaacucccucacccuccccuccgaggucaaccucugcaacaucgacaucuucaaccccaaguacgacugcaagaucaugaccuccaagaccgacgucuccuccuccgucaucaccucccucggcgccaucgucuccugcuacggcaagaccaagugcaccgccuccaacaagaaccgcggcaucaucaagaccuucuccaacggcugcgacuacgucuccaacaagggcgucgacaccgucuccgucggcaacacccucuacuacgucaacaagcaggagggcaagucccucuacgucaagggcgagcccaucaucaacuucuacgacccccucgucuuccccuccgacgaguucgacgccuccaucucccaggucaacgagaagaucaaccagucccucgccuucauccgcaaguccgacgagcuccuccacaacgucaacgucggcaaguccaccaccaacaucaugaucaccaccaucaucaucgucaucaucgucauccuccuccuccucaucgccgucggccucuuccucuacugcaaggcccgcugaggacuaguggaagcauuuuccuggcugauuaaaagaaauuacucagcuauggucaucuguuccuguuagaaggcuaugcagcauauuauauacuaugcgcauguuaugaaaugcauaauaaaaaauuuuaaaaaaucuaaaagaucuaaaaaaaaaaaaaaaaaaaaaaaaaaaaaaaaaaaaaaaaaaaaaaaaaaaaaaaaaaaaaaaaugcaucccccccccccccccccccccccccccccccaaaggcucuuuucagagccaccagaauu

SEQ ID NO: 12211 - RNA, 2033 nt, Artificial Sequence
  mRNA product Design c-4 comprising derived and/or modified sequence from HRSV(Memphis-37)__AIY60640.1__F-del (opt3)
gggagaguccgcucagccagguugcagaagcggcuuagcguguguccuaaucuucucucugcguguagguaggccugugccgcaaacaagcuuaccauggagcugcccauccucaagaccaacgccauuacaacuauacuugcugcagugacgcugugcuucgccagcucccagaauaucaccgaagaguuuuaccaaucuacauguucagcggucaguaaaggcuauuugagcgcuuuaagaacugggugguacaccuccguuauuacaaucgaacugucuaacauuaaggagaauaaaugcaacggaaccgacgccaaggugaaacuaaucaagcaggaacucgauaaguauaaaaaugcaguaacugagcugcagcuucugaugcagucgaccccugccgcuaacaauagggcacggcgcgaguugccacgauucaugaacuacacacucaauaacacgaagaauaacaaugugacucugagcaaaaagcguaaaagaagguuucuggguuuccucuuaggcgucgggucagccauagcuaguggaaucgccguguccaagguucugcaccuugaaggcgaggugaacaagauuaaaaaugcguugcugucuaccaacaaggcagucgugagccuauccaacgguguaucaguucucacaaguaaagugcuggaccuuaagaauuauaucgauaaacaacuguugccgauugucaacaagcagagcuguucuaucuccaauauagaaacugugauugaguuucagcagaaaaacaaucggcuccuggagaucacccgcgaguucucagugaacgccggggucacaacccccguuagcacguacauguuaacuaauagugaacugcucucucuuauuaacgacaugccuaucacaaaugaucaaaagaagcugauguccaacaaugugcagaucguaagacagcagagcuauucgauuaugucuauaaucaaagaagagguguuggcuuacgucgugcaacuaccacuguacggaguuauugacacccccugcuggaagcuccauacuuccccucuguguacaaccaacacgaaagaaggcucaaauaucugccuuaccaggacagaucggggcugguauugugacaacgccgggagugugagcuuuuucccacaggcagagacuugcaagguccaguccaaucgcguguuuugugauaccaugaacucucugacauugcccagcgagguaaaccucugcaauauagacauuuucaacccuaaauacgauuguaagaucaugacuucaaagaccgacguuaguuccagcgugaucacaucucugggagcuauugucucaugcuaugguaaaaccaagugcacugccaguaauaaaaaccgaggcaucauuaagacguuuagcaaugggugugauuacguguccaacaaaggagucgacacagugucuguuggcaauaccuuauauuacgugaacaagcaagaagguaagucgcuguauguaaaaggggagccaauaaucaauuucuacgacccgcuagucuuucccagcgaugaguucgacgcguccauuucacaggugaacgaaaagaucaaucagagucucgccuucaucagaaaaucugaugaacugcuucacaacguuaaugugggaaagagcacuaccaacauuaugauaacaaccaucauuaucgucauuaucgugauauugcugcuccugaucgcaguaggccuuuuucuguacugcaaagcuaggugaggacuaguggaagcauuuuccuggcugauuaaaagaaauuacucagcuauggucaucuguuccuguuagaaggcuaugcagcauauuauauacuaugcgcauguuaugaaaugcauaauaaaaaauuuuaaaaaaucuaaaagaucuaaaaaaaaaaaaaaaaaaaaaaaaaaaaaaaaaaaaaaaaaaaaaaaaaaaaaaaaaaaaaaaaugcaucccccccccccccccccccccccccccccccaaaggcucuuuucagagccaccagaauu

SEQ ID NO: 12212 - RNA, 2033 nt, Artificial Sequence
  mRNA product Design c-4 comprising derived and/or modified sequence from HRSV(Memphis-37)__AIY60640.1__F-del (opt4)
gggagaguccgcucagccagguugcagaagcggcuuagcguguguccuaaucuucucucugcguguagguaggccugugccgcaaacaagcuuaccauggagcugcccauccugaagaccaacgccaucaccaccauccuggccgccgugacccugugcuucgccagcagccagaacaucaccgaggaguucuaccagagcaccugcagcgccgugagcaagggcuaccugagcgcccugagaaccggcugguacaccagcgugaucaccaucgagcugagcaacaucaaggagaacaagugcaacggcaccgacgccaaggugaagcugaucaagcaggagcuggacaaguacaagaacgccgugaccgagcugcagcugcugaugcagagcacccccgccgccaacaacagagccagaagagagcugcccagauucaugaacuacacccugaacaacaccaagaacaacaacgugacccugagcaagaagagaaagagaagauuccugggcuuccugcugggcgugggcagcgccaucgccagcggcaucgccgugagcaaggugcugcaccuggagggcgaggugaacaagaucaagaacgcccugcugagcaccaacaaggccguggugagccugagcaacggcgugagcgugcugaccagcaaggugcuggaccugaagaacuacaucgacaagcagcugcugcccaucgugaacaagcagagcugcagcaucagcaacaucgagaccgugaucgaguuccagcagaagaacaacagacugcuggagaucaccagagaguucagcgugaacgccggcgugaccacccccgugagcaccuacaugcugaccaacagcgagcugcugagccugaucaacgacaugcccaucaccaacgaccagaagaagcugaugagcaacaacgugcagaucgugagacagcagagcuacagcaucaugagcaucaucaaggaggaggugcuggccuacguggugcagcugccccuguacggcgugaucgacacccccugcuggaagcugcacaccagcccccugugcaccaccaacaccaaggagggcagcaacaucugccugaccagaaccgacagaggcugguacugcgacaacgccggcagcgugagcuucuucccccaggccgagaccugcaaggugcagagcaacagaguguucugcgacaccaugaacagccugacccugcccagcgaggugaaccugugcaacaucgacaucuucaaccccaaguacgacugcaagaucaugaccagcaagaccgacgugagcagcagcgugaucaccagccugggcgccaucgugagcugcuacggcaagaccaagugcaccgccagcaacaagaacagaggcaucaucaagaccuucagcaacggcugcgacuacgugagcaacaagggcguggacaccgugagcgugggcaacacccuguacuacgugaacaagcaggagggcaagagccuguacgugaagggcgagcccaucaucaacuucuacgacccccugguguuccccagcgacgaguucgacgccagcaucagccaggugaacgagaagaucaaccagagccuggccuucaucagaaagagcgacgagcugcugcacaacgugaacgugggcaagagcaccaccaacaucaugaucaccaccaucaucaucgugaucaucgugauccugcugcugcugaucgccgugggccuguuccuguacugcaaggccagaugaggacuaguggaagcauuuuccuggcugauuaaaagaaauuacucagcuauggucaucuguuccuguuagaaggcuaugcagcauauuauauacuaugcgcauguuaugaaaugcauaauaaaaaauuuuaaaaaaucuaaaagaucuaaaaaaaaaaaaaaaaaaaaaaaaaaaaaaaaaaaaaaaaaaaaaaaaaaaaaaaaaaaaaaaaugcaucccccccccccccccccccccccccccccccaaaggcucuuuucagagccaccagaauu

SEQ ID NO: 12213 - RNA, 2033 nt, Artificial Sequence
  mRNA product Design c-4 comprising derived and/or modified sequence from HRSV(Memphis-37)__AIY60640.1__F-del (opt5)
gggagaguccgcucagccagguugcagaagcggcuuagcguguguccuaaucuucucucugcguguagguaggccugugccgcaaacaagcuuaccauggagcugcccauccucaagaccaacgccauuacaacgauccuggcugccgugacccuuugcuucgcgagcucccagaauauuacagaagaguuuuaccaaucuaccuguagcgcugucuccaaaggcuaucugucugcccucagaacagggugguacaccagcguuaucacaauugaacuguccaacaucaaggagaauaaaugcaacggaaccgacgccaaggugaaacuuaucaagcaggaacuggauaaguauaaaaaugcugugacggagcuccagcugcugaugcagucuaccccugccgcuaacaaucgggcccgcagagagcucccgcgguucaugaacuacacacugaauaacaccaagaauaacaaugucacacuuagcaaaaagcgcaaaagacgguuucugggcuuccuccugggggugggauccgcgauugccagcggcaucgcuguuucuaaggugcuucaccuggaaggggaggucaacaagauuaaaaaugcccuccuguccaccaacaaggcugugguuagccugucuaacggaguguccguccucacgagcaaagugcuggaccuuaagaauuauaucgauaaacaacugcuccccauugugaacaagcagucuuguuccaucagcaauauugaaacagucaucgaguuucagcagaaaaacaaucgccugcuugagaucaccagagaauuuuccguuaacgccggcgugacaaccccugugucuaccuacaugcugacaaauagcgagcuccugucccugauuaacgacaugcccaucacgaaugaucaaaagaagcucaugagcaacaauguccagauugugcggcagcagucuuauuccaucaugagcauuaucaaagaagagguucuggcguacgugguccaacuuccucuguacggcgugaucgacacccccugcuggaagcuccauacaucuccucuguguaccacaaacaccaaagaagggagcaauauuugccuuacgcgcacagauagaggaugguauugugacaacgccggcuccguuucuuucuucccgcaggcugagaccugcaaggugcagagcaaucgggucuuuugugauaccaugaacucccugacacuccccagcgaggugaaccugugcaauaucgacauuuucaacccuaaauacgauuguaagaucaugaccucuaagacagacgucuccagcucugugauuacgucccugggggccaucguuagcugcuauggaaaaaccaagugcacagcuuccaauaaaaaccgcggcaucauuaagaccuuuucuaaugggugugauuacgugagcaacaaaggagucgacacaguguccguuggcaauacccucuauuacgugaacaagcaagaaggcaagucucuguaugucaaaggggagcccaucauuaauuucuacgacccucuuguguuucccagcgaugaguucgacgccuccaucagccaggugaacgaaaagauuaaucagucucuggccuucaucagaaaauccgaugaacuccugcacaacguuaaugucggaaagagcacgaccaacauuaugaucacaaccaucauuaucgugauuaucgugauucugcuucuccugaucgcugucggccuguuucucuacugcaaagcgcggugaggacuaguggaagcauuuuccuggcugauuaaaagaaauuacucagcuauggucaucuguuccuguuagaaggcuaugcagcauauuauauacuaugcgcauguuaugaaaugcauaauaaaaaauuuuaaaaaaucuaaaagaucuaaaaaaaaaaaaaaaaaaaaaaaaaaaaaaaaaaaaaaaaaaaaaaaaaaaaaaaaaaaaaaaaugcaucccccccccccccccccccccccccccccccaaaggcucuuuucagagccaccagaauu

SEQ ID NO: 12214 - RNA, 2033 nt, Artificial Sequence
  mRNA product Design c-4 comprising derived and/or modified sequence from HRSV(Memphis-37)__AIY60640.1__F-del (opt6)
gggagaguccgcucagccagguugcagaagcggcuuagcguguguccuaaucuucucucugcguguagguaggccugugccgcaaacaagcuuaccauggaacucccaauauuaaaaacuaacgcaaucacaaccauauuagcagccgucacucuaugcuuugccuccucacaaaauauaacagaagaauuuuaccaauccacaugcucagccguuagcaaaggauaucuaucagcccuaagaacaggcugguauacuucaguaauaacaauagaacuaucaaauauaaaagaaaacaaaugcaacggaaccgacgcuaaaguaaagcucauaaaacaagaauuagacaaauacaaaaaugcaguaacagaacuacaacuccuaaugcaaucaaccccagccgccaauaacagagcuagacgagaacuaccccgauucaugaauuacacacuaaacaacacaaaaaacaacaauguaacacucucaaaaaaaagaaaacgaagauucuuagguuuucuccugggaguaggaucagcaaucgcuuccggaaucgcagucaguaaaguccuucaccuugaaggcgaaguaaacaaaauaaaaaaugcacuacuaucuacaaauaaagcaguaguaucccuauccaauggcgucucaguauuaaccucaaaaguacucgaccuuaaaaauuauauagacaaacaauuacuacccauagucaauaaacaauccuguuccauaucaaacauagaaacaguaaucgaauuucaacaaaaaaacaacagauuacuagaaauaacacgcgaauuuucagucaacgccggaguaaccacacccgucucaacauacaugcuaaccaacuccgaacuacuaucacuuaucaacgacaugccaauaacaaaugaccaaaaaaaacucaugucaaacaacguacaaauaguccgccaacaaucauacucuauaaugucuauuaucaaagaagaaguucucgcauacguaguacaacuaccacuauauggugucauagacacaccauguuggaaacuccauacaucacccuuauguacaaccaauacaaaagaaggcucaaacaucugccuaacucgaacagaccgaggaugguacugcgacaaugcaggaucugucucauucuucccucaagcagaaacauguaaaguucaaucuaauagaguuuucugcgauacaaugaacucacuaacucuaccaucagaaguaaaucucuguaauauugacauauucaacccaaaauacgauugcaagaucaugacaucaaaaacugacguaucauccucagucaucaccucauuaggagcaaucguaagcuguuacgggaaaacaaaaugcaccgcuucuaacaaaaauagaggaauaauuaaaaccuucucaaacggaugcgauuacgucuccaauaaaggaguagauacaguaagcguaggaaauacucuauacuacgucaauaaacaagaaggaaaaucacuuuaugucaaaggagaacccauaauaaauuucuacgacccauuagucuucccaucagaugaauuugacgcauccauaucccaagucaacgaaaaaaucaaucaaucacuagcauucauacgaaaaucagacgaacuacuacacaacguuaacguaggaaaaucaacaaccaacaucaugauaaccacuauaauaaucgucauaauagucauccuauuauuacuaauagccguaggccuuuuccuauacuguaaagcuagauaaggacuaguggaagcauuuuccuggcugauuaaaagaaauuacucagcuauggucaucuguuccuguuagaaggcuaugcagcauauuauauacuaugcgcauguuaugaaaugcauaauaaaaaauuuuaaaaaaucuaaaagaucuaaaaaaaaaaaaaaaaaaaaaaaaaaaaaaaaaaaaaaaaaaaaaaaaaaaaaaaaaaaaaaaaugcaucccccccccccccccccccccccccccccccaaaggcucuuuucagagccaccagaauu

SEQ ID NO: 12215 - RNA, 2033 nt, Artificial Sequence
  mRNA product Design c-4 comprising derived and/or modified sequence from HRSV(Memphis-37)__AIY60640.1__F-del (opt11)
gggagaguccgcucagccagguugcagaagcggcuuagcguguguccuaaucuucucucugcguguagguaggccugugccgcaaacaagcuuaccauggaacucccgauccucaaaaccaacgccaucaccacuauccucgccgccguaacccucugcuucgccucaucccaaaacaucaccgaagaauuuuaccaauccacaugcuccgccgucuccaaagguuaccucucagcccuccgcaccggcugguacaccuccguuaucaccaucgaacuuuccaacauaaaagagaacaagugcaacggcaccgacgcaaaaguaaaacuaaucaaacaagaacuagacaaauacaaaaacgccgucaccgaacuccagcuccucaugcaaucgacgcccgccgccaacaaccgagcaaggcgcgaacuuccacgcuucaugaacuacacccucaacaacacuaaaaacaacaacgugacccuauccaaaaagcguaaacgccgauuccuagguuuccuucucggugucggcuccgccauugccuccggcaucgcuguuuccaaaguccuccaccucgaaggcgaaguaaacaagauaaaaaacgcccuccucucuacaaacaaggccgugguaucgcucucuaacggcgucucuguacucaccuccaaaguccucgaccucaaaaacuacaucgacaagcaacuccucccuaucgucaauaaacaauccugcuccauuuccaacaucgaaacagugaucgaauuucaacaaaaaaacaaccgauuacuagaaaucacccgcgaauuuucagucaacgccggcgucacaacgccagucucaaccuacaugcucaccaacucagaacucuuaucacucaucaacgacaugcccaucacuaacgaccagaaaaaacugauguccaacaacgugcaaauaguccgccaacaguccuacuccaucauguccauaaucaaggaggaggugcucgccuacguaguccaacucccccucuacggagucauugacaccccuugcuggaaacuacacaccuccccucucugcaccaccaacaccaaagaaggcagcaacaucugccuaaccaggacggaccgaggaugguacugcgacaaugcaggcuccgucagcuucuucccacaagccgaaacaugcaaaguucaaucaaaccguguauucugcgacaccaugaacucacucacccuccccucagaaguaaaccuaugcaacauagauaucuucaaccccaaauacgacugcaaaauuaugaccuccaaaaccgaugucuccagcuccguuaucacgucacucggcgccaucgucuccugcuacggcaagaccaaaugcaccgccuccaacaaaaaccgcggaauaaucaaaacauucucuaacggcugcgacuacgucuccaauaaaggcgucgacaccgucuccgugggcaacacgcuguacuacgucaacaaacaagaaggcaaaucucuuuacgucaaaggugaaccaaucaucaacuucuacgacccccucguauuccccuccgacgaauuugacgcgagcaucucccaagucaacgaaaagaucaaccaaucccucgccuucauccgaaaaagcgacgaacuccuccacaacgucaacgucggcaaaaguaccacaaacauuaugaucaccaccaucaucauagucaucaucgucauccugcuccuacuaauagccgucggccucuucuuguacugcaaggcacgaugaggacuaguggaagcauuuuccuggcugauuaaaagaaauuacucagcuauggucaucuguuccuguuagaaggcuaugcagcauauuauauacuaugcgcauguuaugaaaugcauaauaaaaaauuuuaaaaaaucuaaaagaucuaaaaaaaaaaaaaaaaaaaaaaaaaaaaaaaaaaaaaaaaaaaaaaaaaaaaaaaaaaaaaaaaugcaucccccccccccccccccccccccccccccccaaaggcucuuuucagagccaccagaauu

SEQ ID NO: 12216 - RNA, 1951 nt, Artificial Sequence
  mRNA product Design c-5 comprising derived and/or modified sequence from HRSV(Memphis-37)__AIY60640.1__F-del (wt)
gggagagcggcucggccauuuugucccagucaguccggaggcugcggcugcagaaguaccgccugcggaguaacugcaaagaagcuuaccauggaguugccaauccucaaaacaaaugcaauuaccacaauccuugcugcagucacacucuguuucgcuuccagucaaaacaucacugaagaauuuuaucaaucaacaugcagugcaguuagcaaaggcuaucuuagugcuuuaagaacugguugguauacuaguguuauaacuauagaauuaaguaauaucaaggaaaauaaguguaauggaacagaugcuaagguaaaauugauaaaacaagaauuagauaaauauaaaaaugcuguaacagaauugcaguugcucaugcaaagcacaccagcagccaacaaucgagccagaagagaacuaccaagguuuaugaauuauacacucaacaauaccaaaaauaacaauguaacauuaagcaagaaaaggaaaagaagauuucuuggcuuuuuguuagguguuggaucugcaaucgccaguggcauugcuguaucuaaaguccugcaccuagaaggggaagugaacaaaaucaaaaaugcucuacuauccacaaacaaggcuguagucagcuuaucaaauggaguuagugucuuaaccagcaaaguguuagaccucaaaaacuauauagauaaacaguuguuacccauugugaacaagcaaagcugcagcauaucaaacauugaaacugugauagaauuccaacaaaagaacaacagacuacuagagauuaccagggaauuuaguguuaaugcagguguaacuacaccuguaagcacuuauauguuaacaaauagugaauuauuaucauuaaucaaugauaugccuauaacaaaugaucagaaaaaguuaauguccaacaauguucaaauaguuagacagcaaaguuacucuaucauguccauaauaaaggaggaagucuuagcauauguaguucaauuaccacuauaugguguaauagauacaccuuguuggaaacuacacacauccccucuaugcacaaccaacacaaaggaaggguccaacaucuguuuaacaagaaccgacagaggaugguacugugacaaugcaggaucagugucuuucuucccacaagcugaaacaugcaaaguucaaucgaaucgaguauuuugugacacaaugaacagucuaacauuaccaagugaaguaaaucucugcaacauugacauauucaacccuaaauaugauugcaaaauuaugacuucaaaaacagaugugagcagcuccguuaucacaucucuaggagccauugugucaugcuauggcaaaacuaaauguacagcauccaauaaaaaucguggaaucauaaagacauuuucuaacgggugugauuauguaucaaauaaggggguggacacuguaucuguagguaauacauuauauuauguaaauaagcaagaaggaaaaagccucuauguaaaaggugaaccaauaauaaauuucuaugacccauuaguguucccuucugaugaauuugaugcaucaauaucucaagucaaugagaagauuaaccagagccuagcauuuauucguaaauccgaugaauuauuacauaauguaaauguugguaaauccaccacaaauaucaugauaacuacuauaauuauagugauuauaguaauauuguuauuauuaauugcaguugggcuguuccuauacugcaaggccagaugaggacuagucccuguucccagagcccacuuuuuuuucuuuuuuugaaauaaaauagccugucuuucagaucuaaaaaaaaaaaaaaaaaaaaaaaaaaaaaaaaaaaaaaaaaaaaaaaaaaaaaaaaaaaaaaaaugcaucccccccccccccccccccccccccccccccaaaggcucuuuucagagccaccagaauu

SEQ ID NO: 12217 - RNA, 1951 nt, Artificial Sequence
  mRNA product Design c-5 comprising derived and/or modified sequence from HRSV(Memphis-37)__AIY60640.1__F-del (opt1)
gggagagcggcucggccauuuugucccagucaguccggaggcugcggcugcagaaguaccgccugcggaguaacugcaaagaagcuuaccauggagcugcccauccucaagaccaacgccaucaccacgauccuggccgcggugacccugugcuucgccagcucccagaacaucaccgaggaguucuaccagagcacgugcuccgccgucagcaagggcuaccucuccgcccugcgcaccgggugguacaccagcgugaucaccaucgagcuguccaacaucaaggagaacaagugcaacggcaccgacgccaaggugaagcucaucaagcaggagcuggacaaguacaagaacgcggucacggagcugcagcuccugaugcagagcaccccggccgccaacaaccgggcccgccgggagcugccccgcuucaugaacuacacccucaacaacaccaagaacaacaacgugacgcuguccaagaagcggaagcgccgguuccugggguuccuccugggcguggggagcgcgaucgccuccggcaucgccgucagcaaggugcugcaccucgagggcgaggugaacaagaucaagaacgcccugcuguccaccaacaaggccgucgugagccucuccaacggggugagcguccugaccuccaaggugcuggaccucaagaacuacaucgacaagcagcugcugcccaucgugaacaagcagagcugcuccaucagcaacaucgagaccgucaucgaguuccagcagaagaacaaccgccuccuggagaucacgcgggaguucagcgugaacgcgggcgugaccacccccgucuccaccuacaugcugacgaacagcgagcuccugucccugaucaacgacaugccgaucaccaacgaccagaagaagcucaugagcaacaacgugcagaucgugcgccagcaguccuacagcaucauguccaucaucaaggaggagguccuggccuacguggugcagcugccccucuacggggucaucgacacccccugcuggaagcugcacaccagcccccugugcacgaccaacaccaaggagggcuccaacaucugccucacccggacggaccgcgggugguacugcgacaacgccggcagcguguccuucuucccgcaggccgagaccugcaagguccagagcaaccggguguucugcgacaccaugaacucccugacccugcccagcgaggugaaccucugcaacaucgacaucuucaaccccaaguacgacugcaagaucaugacguccaagaccgacgucagcuccagcgugaucaccucccugggcgccaucgugagcugcuacgggaagaccaagugcacggcgagcaacaagaaccgcggcaucaucaagaccuucuccaacgggugcgacuacgucagcaacaagggcguggacaccguguccgucggcaacacccuguacuacgugaacaagcaggagggcaagagccucuacgugaagggggagcccaucaucaacuucuacgacccgcuggucuuccccuccgacgaguucgacgccagcaucucccaggugaacgagaagaucaaccagagccuggccuucauccggaaguccgacgagcuccugcacaacgugaacgucggcaagagcaccacgaacaucaugaucaccaccaucaucaucgugaucaucgugauccugcugcuccugaucgccgucgggcuguuccucuacugcaaggcccgcugaggacuagucccuguucccagagcccacuuuuuuuucuuuuuuugaaauaaaauagccugucuuucagaucuaaaaaaaaaaaaaaaaaaaaaaaaaaaaaaaaaaaaaaaaaaaaaaaaaaaaaaaaaaaaaaaaugcaucccccccccccccccccccccccccccccccaaaggcucuuuucagagccaccagaauu

SEQ ID NO: 12218 - RNA, 1951 nt, Artificial Sequence
  mRNA product Design c-5 comprising derived and/or modified sequence from HRSV(Memphis-37)__AIY60640.1__F-del (opt2)
gggagagcggcucggccauuuugucccagucaguccggaggcugcggcugcagaaguaccgccugcggaguaacugcaaagaagcuuaccauggagcuccccauccucaagaccaacgccaucaccaccauccucgccgccgucacccucugcuucgccuccucccagaacaucaccgaggaguucuaccaguccaccugcuccgccgucuccaagggcuaccucuccgcccuccgcaccggcugguacaccuccgucaucaccaucgagcucuccaacaucaaggagaacaagugcaacggcaccgacgccaaggucaagcucaucaagcaggagcucgacaaguacaagaacgccgucaccgagcuccagcuccucaugcaguccacccccgccgccaacaaccgcgcccgccgcgagcucccccgcuucaugaacuacacccucaacaacaccaagaacaacaacgucacccucuccaagaagcgcaagcgccgcuuccucggcuuccuccucggcgucggcuccgccaucgccuccggcaucgccgucuccaagguccuccaccucgagggcgaggucaacaagaucaagaacgcccuccucuccaccaacaaggccgucgucucccucuccaacggcgucuccguccucaccuccaagguccucgaccucaagaacuacaucgacaagcagcuccuccccaucgucaacaagcaguccugcuccaucuccaacaucgagaccgucaucgaguuccagcagaagaacaaccgccuccucgagaucacccgcgaguucuccgucaacgccggcgucaccacccccgucuccaccuacaugcucaccaacuccgagcuccucucccucaucaacgacaugcccaucaccaacgaccagaagaagcucauguccaacaacguccagaucguccgccagcaguccuacuccaucauguccaucaucaaggaggagguccucgccuacgucguccagcucccccucuacggcgucaucgacacccccugcuggaagcuccacaccuccccccucugcaccaccaacaccaaggagggcuccaacaucugccucacccgcaccgaccgcggcugguacugcgacaacgccggcuccgucuccuucuucccccaggccgagaccugcaagguccaguccaaccgcgucuucugcgacaccaugaacucccucacccuccccuccgaggucaaccucugcaacaucgacaucuucaaccccaaguacgacugcaagaucaugaccuccaagaccgacgucuccuccuccgucaucaccucccucggcgccaucgucuccugcuacggcaagaccaagugcaccgccuccaacaagaaccgcggcaucaucaagaccuucuccaacggcugcgacuacgucuccaacaagggcgucgacaccgucuccgucggcaacacccucuacuacgucaacaagcaggagggcaagucccucuacgucaagggcgagcccaucaucaacuucuacgacccccucgucuuccccuccgacgaguucgacgccuccaucucccaggucaacgagaagaucaaccagucccucgccuucauccgcaaguccgacgagcuccuccacaacgucaacgucggcaaguccaccaccaacaucaugaucaccaccaucaucaucgucaucaucgucauccuccuccuccucaucgccgucggccucuuccucuacugcaaggcccgcugaggacuagucccuguucccagagcccacuuuuuuuucuuuuuuugaaauaaaauagccugucuuucagaucuaaaaaaaaaaaaaaaaaaaaaaaaaaaaaaaaaaaaaaaaaaaaaaaaaaaaaaaaaaaaaaaaugcaucccccccccccccccccccccccccccccccaaaggcucuuuucagagccaccagaauu

SEQ ID NO: 12219 - RNA, 1951 nt, Artificial Sequence
  mRNA product Design c-5 comprising derived and/or modified sequence from HRSV(Memphis-37)__AIY60640.1__F-del (opt3)
gggagagcggcucggccauuuugucccagucaguccggaggcugcggcugcagaaguaccgccugcggaguaacugcaaagaagcuuaccauggagcugcccauccucaagaccaacgccauuacaacuauacuugcugcagugacgcugugcuucgccagcucccagaauaucaccgaagaguuuuaccaaucuacauguucagcggucaguaaaggcuauuugagcgcuuuaagaacugggugguacaccuccguuauuacaaucgaacugucuaacauuaaggagaauaaaugcaacggaaccgacgccaaggugaaacuaaucaagcaggaacucgauaaguauaaaaaugcaguaacugagcugcagcuucugaugcagucgaccccugccgcuaacaauagggcacggcgcgaguugccacgauucaugaacuacacacucaauaacacgaagaauaacaaugugacucugagcaaaaagcguaaaagaagguuucuggguuuccucuuaggcgucgggucagccauagcuaguggaaucgccguguccaagguucugcaccuugaaggcgaggugaacaagauuaaaaaugcguugcugucuaccaacaaggcagucgugagccuauccaacgguguaucaguucucacaaguaaagugcuggaccuuaagaauuauaucgauaaacaacuguugccgauugucaacaagcagagcuguucuaucuccaauauagaaacugugauugaguuucagcagaaaaacaaucggcuccuggagaucacccgcgaguucucagugaacgccggggucacaacccccguuagcacguacauguuaacuaauagugaacugcucucucuuauuaacgacaugccuaucacaaaugaucaaaagaagcugauguccaacaaugugcagaucguaagacagcagagcuauucgauuaugucuauaaucaaagaagagguguuggcuuacgucgugcaacuaccacuguacggaguuauugacacccccugcuggaagcuccauacuuccccucuguguacaaccaacacgaaagaaggcucaaauaucugccuuaccaggacagaucggggcugguauugugacaacgccgggagugugagcuuuuucccacaggcagagacuugcaagguccaguccaaucgcguguuuugugauaccaugaacucucugacauugcccagcgagguaaaccucugcaauauagacauuuucaacccuaaauacgauuguaagaucaugacuucaaagaccgacguuaguuccagcgugaucacaucucugggagcuauugucucaugcuaugguaaaaccaagugcacugccaguaauaaaaaccgaggcaucauuaagacguuuagcaaugggugugauuacguguccaacaaaggagucgacacagugucuguuggcaauaccuuauauuacgugaacaagcaagaagguaagucgcuguauguaaaaggggagccaauaaucaauuucuacgacccgcuagucuuucccagcgaugaguucgacgcguccauuucacaggugaacgaaaagaucaaucagagucucgccuucaucagaaaaucugaugaacugcuucacaacguuaaugugggaaagagcacuaccaacauuaugauaacaaccaucauuaucgucauuaucgugauauugcugcuccugaucgcaguaggccuuuuucuguacugcaaagcuaggugaggacuagucccuguucccagagcccacuuuuuuuucuuuuuuugaaauaaaauagccugucuuucagaucuaaaaaaaaaaaaaaaaaaaaaaaaaaaaaaaaaaaaaaaaaaaaaaaaaaaaaaaaaaaaaaaaugcaucccccccccccccccccccccccccccccccaaaggcucuuuucagagccaccagaauu

SEQ ID NO: 12220 - RNA, 1951 nt, Artificial Sequence
  mRNA product Design c-5 comprising derived and/or modified sequence from HRSV(Memphis-37)__AIY60640.1__F-del (opt4)
gggagagcggcucggccauuuugucccagucaguccggaggcugcggcugcagaaguaccgccugcggaguaacugcaaagaagcuuaccauggagcugcccauccugaagaccaacgccaucaccaccauccuggccgccgugacccugugcuucgccagcagccagaacaucaccgaggaguucuaccagagcaccugcagcgccgugagcaagggcuaccugagcgcccugagaaccggcugguacaccagcgugaucaccaucgagcugagcaacaucaaggagaacaagugcaacggcaccgacgccaaggugaagcugaucaagcaggagcuggacaaguacaagaacgccgugaccgagcugcagcugcugaugcagagcacccccgccgccaacaacagagccagaagagagcugcccagauucaugaacuacacccugaacaacaccaagaacaacaacgugacccugagcaagaagagaaagagaagauuccugggcuuccugcugggcgugggcagcgccaucgccagcggcaucgccgugagcaaggugcugcaccuggagggcgaggugaacaagaucaagaacgcccugcugagcaccaacaaggccguggugagccugagcaacggcgugagcgugcugaccagcaaggugcuggaccugaagaacuacaucgacaagcagcugcugcccaucgugaacaagcagagcugcagcaucagcaacaucgagaccgugaucgaguuccagcagaagaacaacagacugcuggagaucaccagagaguucagcgugaacgccggcgugaccacccccgugagcaccuacaugcugaccaacagcgagcugcugagccugaucaacgacaugcccaucaccaacgaccagaagaagcugaugagcaacaacgugcagaucgugagacagcagagcuacagcaucaugagcaucaucaaggaggaggugcuggccuacguggugcagcugccccuguacggcgugaucgacacccccugcuggaagcugcacaccagcccccugugcaccaccaacaccaaggagggcagcaacaucugccugaccagaaccgacagaggcugguacugcgacaacgccggcagcgugagcuucuucccccaggccgagaccugcaaggugcagagcaacagaguguucugcgacaccaugaacagccugacccugcccagcgaggugaaccugugcaacaucgacaucuucaaccccaaguacgacugcaagaucaugaccagcaagaccgacgugagcagcagcgugaucaccagccugggcgccaucgugagcugcuacggcaagaccaagugcaccgccagcaacaagaacagaggcaucaucaagaccuucagcaacggcugcgacuacgugagcaacaagggcguggacaccgugagcgugggcaacacccuguacuacgugaacaagcaggagggcaagagccuguacgugaagggcgagcccaucaucaacuucuacgacccccugguguuccccagcgacgaguucgacgccagcaucagccaggugaacgagaagaucaaccagagccuggccuucaucagaaagagcgacgagcugcugcacaacgugaacgugggcaagagcaccaccaacaucaugaucaccaccaucaucaucgugaucaucgugauccugcugcugcugaucgccgugggccuguuccuguacugcaaggccagaugaggacuagucccuguucccagagcccacuuuuuuuucuuuuuuugaaauaaaauagccugucuuucagaucuaaaaaaaaaaaaaaaaaaaaaaaaaaaaaaaaaaaaaaaaaaaaaaaaaaaaaaaaaaaaaaaaugcaucccccccccccccccccccccccccccccccaaaggcucuuuucagagccaccagaauu

SEQ ID NO: 12221 - RNA, 1951 nt, Artificial Sequence
  mRNA product Design c-5 comprising derived and/or modified sequence from HRSV(Memphis-37)__AIY60640.1__F-del (opt5)
gggagagcggcucggccauuuugucccagucaguccggaggcugcggcugcagaaguaccgccugcggaguaacugcaaagaagcuuaccauggagcugcccauccucaagaccaacgccauuacaacgauccuggcugccgugacccuuugcuucgcgagcucccagaauauuacagaagaguuuuaccaaucuaccuguagcgcugucuccaaaggcuaucugucugcccucagaacagggugguacaccagcguuaucacaauugaacuguccaacaucaaggagaauaaaugcaacggaaccgacgccaaggugaaacuuaucaagcaggaacuggauaaguauaaaaaugcugugacggagcuccagcugcugaugcagucuaccccugccgcuaacaaucgggcccgcagagagcucccgcgguucaugaacuacacacugaauaacaccaagaauaacaaugucacacuuagcaaaaagcgcaaaagacgguuucugggcuuccuccugggggugggauccgcgauugccagcggcaucgcuguuucuaaggugcuucaccuggaaggggaggucaacaagauuaaaaaugcccuccuguccaccaacaaggcugugguuagccugucuaacggaguguccguccucacgagcaaagugcuggaccuuaagaauuauaucgauaaacaacugcuccccauugugaacaagcagucuuguuccaucagcaauauugaaacagucaucgaguuucagcagaaaaacaaucgccugcuugagaucaccagagaauuuuccguuaacgccggcgugacaaccccugugucuaccuacaugcugacaaauagcgagcuccugucccugauuaacgacaugcccaucacgaaugaucaaaagaagcucaugagcaacaauguccagauugugcggcagcagucuuauuccaucaugagcauuaucaaagaagagguucuggcguacgugguccaacuuccucuguacggcgugaucgacacccccugcuggaagcuccauacaucuccucuguguaccacaaacaccaaagaagggagcaauauuugccuuacgcgcacagauagaggaugguauugugacaacgccggcuccguuucuuucuucccgcaggcugagaccugcaaggugcagagcaaucgggucuuuugugauaccaugaacucccugacacuccccagcgaggugaaccugugcaauaucgacauuuucaacccuaaauacgauuguaagaucaugaccucuaagacagacgucuccagcucugugauuacgucccugggggccaucguuagcugcuauggaaaaaccaagugcacagcuuccaauaaaaaccgcggcaucauuaagaccuuuucuaaugggugugauuacgugagcaacaaaggagucgacacaguguccguuggcaauacccucuauuacgugaacaagcaagaaggcaagucucuguaugucaaaggggagcccaucauuaauuucuacgacccucuuguguuucccagcgaugaguucgacgccuccaucagccaggugaacgaaaagauuaaucagucucuggccuucaucagaaaauccgaugaacuccugcacaacguuaaugucggaaagagcacgaccaacauuaugaucacaaccaucauuaucgugauuaucgugauucugcuucuccugaucgcugucggccuguuucucuacugcaaagcgcggugaggacuagucccuguucccagagcccacuuuuuuuucuuuuuuugaaauaaaauagccugucuuucagaucuaaaaaaaaaaaaaaaaaaaaaaaaaaaaaaaaaaaaaaaaaaaaaaaaaaaaaaaaaaaaaaaaugcaucccccccccccccccccccccccccccccccaaaggcucuuuucagagccaccagaauu

SEQ ID NO: 12222 - RNA, 1951 nt, Artificial Sequence
  mRNA product Design c-5 comprising derived and/or modified sequence from HRSV(Memphis-37)__AIY60640.1__F-del (opt6)
gggagagcggcucggccauuuugucccagucaguccggaggcugcggcugcagaaguaccgccugcggaguaacugcaaagaagcuuaccauggaacucccaauauuaaaaacuaacgcaaucacaaccauauuagcagccgucacucuaugcuuugccuccucacaaaauauaacagaagaauuuuaccaauccacaugcucagccguuagcaaaggauaucuaucagcccuaagaacaggcugguauacuucaguaauaacaauagaacuaucaaauauaaaagaaaacaaaugcaacggaaccgacgcuaaaguaaagcucauaaaacaagaauuagacaaauacaaaaaugcaguaacagaacuacaacuccuaaugcaaucaaccccagccgccaauaacagagcuagacgagaacuaccccgauucaugaauuacacacuaaacaacacaaaaaacaacaauguaacacucucaaaaaaaagaaaacgaagauucuuagguuuucuccugggaguaggaucagcaaucgcuuccggaaucgcagucaguaaaguccuucaccuugaaggcgaaguaaacaaaauaaaaaaugcacuacuaucuacaaauaaagcaguaguaucccuauccaauggcgucucaguauuaaccucaaaaguacucgaccuuaaaaauuauauagacaaacaauuacuacccauagucaauaaacaauccuguuccauaucaaacauagaaacaguaaucgaauuucaacaaaaaaacaacagauuacuagaaauaacacgcgaauuuucagucaacgccggaguaaccacacccgucucaacauacaugcuaaccaacuccgaacuacuaucacuuaucaacgacaugccaauaacaaaugaccaaaaaaaacucaugucaaacaacguacaaauaguccgccaacaaucauacucuauaaugucuauuaucaaagaagaaguucucgcauacguaguacaacuaccacuauauggugucauagacacaccauguuggaaacuccauacaucacccuuauguacaaccaauacaaaagaaggcucaaacaucugccuaacucgaacagaccgaggaugguacugcgacaaugcaggaucugucucauucuucccucaagcagaaacauguaaaguucaaucuaauagaguuuucugcgauacaaugaacucacuaacucuaccaucagaaguaaaucucuguaauauugacauauucaacccaaaauacgauugcaagaucaugacaucaaaaacugacguaucauccucagucaucaccucauuaggagcaaucguaagcuguuacgggaaaacaaaaugcaccgcuucuaacaaaaauagaggaauaauuaaaaccuucucaaacggaugcgauuacgucuccaauaaaggaguagauacaguaagcguaggaaauacucuauacuacgucaauaaacaagaaggaaaaucacuuuaugucaaaggagaacccauaauaaauuucuacgacccauuagucuucccaucagaugaauuugacgcauccauaucccaagucaacgaaaaaaucaaucaaucacuagcauucauacgaaaaucagacgaacuacuacacaacguuaacguaggaaaaucaacaaccaacaucaugauaaccacuauaauaaucgucauaauagucauccuauuauuacuaauagccguaggccuuuuccuauacuguaaagcuagauaaggacuagucccuguucccagagcccacuuuuuuuucuuuuuuugaaauaaaauagccugucuuucagaucuaaaaaaaaaaaaaaaaaaaaaaaaaaaaaaaaaaaaaaaaaaaaaaaaaaaaaaaaaaaaaaaaugcaucccccccccccccccccccccccccccccccaaaggcucuuuucagagccaccagaauu

SEQ ID NO: 12223 - RNA, 1951 nt, Artificial Sequence
  mRNA product Design c-5 comprising derived and/or modified sequence from HRSV(Memphis-37)__AIY60640.1__F-del (opt11)
gggagagcggcucggccauuuugucccagucaguccggaggcugcggcugcagaaguaccgccugcggaguaacugcaaagaagcuuaccauggaacucccgauccucaaaaccaacgccaucaccacuauccucgccgccguaacccucugcuucgccucaucccaaaacaucaccgaagaauuuuaccaauccacaugcuccgccgucuccaaagguuaccucucagcccuccgcaccggcugguacaccuccguuaucaccaucgaacuuuccaacauaaaagagaacaagugcaacggcaccgacgcaaaaguaaaacuaaucaaacaagaacuagacaaauacaaaaacgccgucaccgaacuccagcuccucaugcaaucgacgcccgccgccaacaaccgagcaaggcgcgaacuuccacgcuucaugaacuacacccucaacaacacuaaaaacaacaacgugacccuauccaaaaagcguaaacgccgauuccuagguuuccuucucggugucggcuccgccauugccuccggcaucgcuguuuccaaaguccuccaccucgaaggcgaaguaaacaagauaaaaaacgcccuccucucuacaaacaaggccgugguaucgcucucuaacggcgucucuguacucaccuccaaaguccucgaccucaaaaacuacaucgacaagcaacuccucccuaucgucaauaaacaauccugcuccauuuccaacaucgaaacagugaucgaauuucaacaaaaaaacaaccgauuacuagaaaucacccgcgaauuuucagucaacgccggcgucacaacgccagucucaaccuacaugcucaccaacucagaacucuuaucacucaucaacgacaugcccaucacuaacgaccagaaaaaacugauguccaacaacgugcaaauaguccgccaacaguccuacuccaucauguccauaaucaaggaggaggugcucgccuacguaguccaacucccccucuacggagucauugacaccccuugcuggaaacuacacaccuccccucucugcaccaccaacaccaaagaaggcagcaacaucugccuaaccaggacggaccgaggaugguacugcgacaaugcaggcuccgucagcuucuucccacaagccgaaacaugcaaaguucaaucaaaccguguauucugcgacaccaugaacucacucacccuccccucagaaguaaaccuaugcaacauagauaucuucaaccccaaauacgacugcaaaauuaugaccuccaaaaccgaugucuccagcuccguuaucacgucacucggcgccaucgucuccugcuacggcaagaccaaaugcaccgccuccaacaaaaaccgcggaauaaucaaaacauucucuaacggcugcgacuacgucuccaauaaaggcgucgacaccgucuccgugggcaacacgcuguacuacgucaacaaacaagaaggcaaaucucuuuacgucaaaggugaaccaaucaucaacuucuacgacccccucguauuccccuccgacgaauuugacgcgagcaucucccaagucaacgaaaagaucaaccaaucccucgccuucauccgaaaaagcgacgaacuccuccacaacgucaacgucggcaaaaguaccacaaacauuaugaucaccaccaucaucauagucaucaucgucauccugcuccuacuaauagccgucggccucuucuuguacugcaaggcacgaugaggacuagucccuguucccagagcccacuuuuuuuucuuuuuuugaaauaaaauagccugucuuucagaucuaaaaaaaaaaaaaaaaaaaaaaaaaaaaaaaaaaaaaaaaaaaaaaaaaaaaaaaaaaaaaaaaugcaucccccccccccccccccccccccccccccccaaaggcucuuuucagagccaccagaauu

SEQ ID NO: 12224 - RNA, 1960 nt, Artificial Sequence
  mRNA product Design d-1 comprising derived and/or modified sequence from HRSV(Memphis-37)__AIY60640.1__F-del (wt)
gggagacccgugacccggaaguuguacggcuacgcgacuuucccucccacaaacccucgcgcccuuccuuuccuacuugggcccggcagaaagcuuaccauggaguugccaauccucaaaacaaaugcaauuaccacaauccuugcugcagucacacucuguuucgcuuccagucaaaacaucacugaagaauuuuaucaaucaacaugcagugcaguuagcaaaggcuaucuuagugcuuuaagaacugguugguauacuaguguuauaacuauagaauuaaguaauaucaaggaaaauaaguguaauggaacagaugcuaagguaaaauugauaaaacaagaauuagauaaauauaaaaaugcuguaacagaauugcaguugcucaugcaaagcacaccagcagccaacaaucgagccagaagagaacuaccaagguuuaugaauuauacacucaacaauaccaaaaauaacaauguaacauuaagcaagaaaaggaaaagaagauuucuuggcuuuuuguuagguguuggaucugcaaucgccaguggcauugcuguaucuaaaguccugcaccuagaaggggaagugaacaaaaucaaaaaugcucuacuauccacaaacaaggcuguagucagcuuaucaaauggaguuagugucuuaaccagcaaaguguuagaccucaaaaacuauauagauaaacaguuguuacccauugugaacaagcaaagcugcagcauaucaaacauugaaacugugauagaauuccaacaaaagaacaacagacuacuagagauuaccagggaauuuaguguuaaugcagguguaacuacaccuguaagcacuuauauguuaacaaauagugaauuauuaucauuaaucaaugauaugccuauaacaaaugaucagaaaaaguuaauguccaacaauguucaaauaguuagacagcaaaguuacucuaucauguccauaauaaaggaggaagucuuagcauauguaguucaauuaccacuauaugguguaauagauacaccuuguuggaaacuacacacauccccucuaugcacaaccaacacaaaggaaggguccaacaucuguuuaacaagaaccgacagaggaugguacugugacaaugcaggaucagugucuuucuucccacaagcugaaacaugcaaaguucaaucgaaucgaguauuuugugacacaaugaacagucuaacauuaccaagugaaguaaaucucugcaacauugacauauucaacccuaaauaugauugcaaaauuaugacuucaaaaacagaugugagcagcuccguuaucacaucucuaggagccauugugucaugcuauggcaaaacuaaauguacagcauccaauaaaaaucguggaaucauaaagacauuuucuaacgggugugauuauguaucaaauaaggggguggacacuguaucuguagguaauacauuauauuauguaaauaagcaagaaggaaaaagccucuauguaaaaggugaaccaauaauaaauuucuaugacccauuaguguucccuucugaugaauuugaugcaucaauaucucaagucaaugagaagauuaaccagagccuagcauuuauucguaaauccgaugaauuauuacauaauguaaauguugguaaauccaccacaaauaucaugauaacuacuauaauuauagugauuauaguaauauuguuauuauuaauugcaguugggcuguuccuauacugcaaggccagaugaggacuagucccuguucccagagcccacuuuuuuuucuuuuuuugaaauaaaauagccugucuuucagaucuaaaaaaaaaaaaaaaaaaaaaaaaaaaaaaaaaaaaaaaaaaaaaaaaaaaaaaaaaaaaaaaaugcaucccccccccccccccccccccccccccccccaaaggcucuuuucagagccaccagaauu

SEQ ID NO: 12225 - RNA, 1960 nt, Artificial Sequence
  mRNA product Design d-1 comprising derived and/or modified sequence from HRSV(Memphis-37)__AIY60640.1__F-del (opt1)
gggagacccgugacccggaaguuguacggcuacgcgacuuucccucccacaaacccucgcgcccuuccuuuccuacuugggcccggcagaaagcuuaccauggagcugcccauccucaagaccaacgccaucaccacgauccuggccgcggugacccugugcuucgccagcucccagaacaucaccgaggaguucuaccagagcacgugcuccgccgucagcaagggcuaccucuccgcccugcgcaccgggugguacaccagcgugaucaccaucgagcuguccaacaucaaggagaacaagugcaacggcaccgacgccaaggugaagcucaucaagcaggagcuggacaaguacaagaacgcggucacggagcugcagcuccugaugcagagcaccccggccgccaacaaccgggcccgccgggagcugccccgcuucaugaacuacacccucaacaacaccaagaacaacaacgugacgcuguccaagaagcggaagcgccgguuccugggguuccuccugggcguggggagcgcgaucgccuccggcaucgccgucagcaaggugcugcaccucgagggcgaggugaacaagaucaagaacgcccugcuguccaccaacaaggccgucgugagccucuccaacggggugagcguccugaccuccaaggugcuggaccucaagaacuacaucgacaagcagcugcugcccaucgugaacaagcagagcugcuccaucagcaacaucgagaccgucaucgaguuccagcagaagaacaaccgccuccuggagaucacgcgggaguucagcgugaacgcgggcgugaccacccccgucuccaccuacaugcugacgaacagcgagcuccugucccugaucaacgacaugccgaucaccaacgaccagaagaagcucaugagcaacaacgugcagaucgugcgccagcaguccuacagcaucauguccaucaucaaggaggagguccuggccuacguggugcagcugccccucuacggggucaucgacacccccugcuggaagcugcacaccagcccccugugcacgaccaacaccaaggagggcuccaacaucugccucacccggacggaccgcgggugguacugcgacaacgccggcagcguguccuucuucccgcaggccgagaccugcaagguccagagcaaccggguguucugcgacaccaugaacucccugacccugcccagcgaggugaaccucugcaacaucgacaucuucaaccccaaguacgacugcaagaucaugacguccaagaccgacgucagcuccagcgugaucaccucccugggcgccaucgugagcugcuacgggaagaccaagugcacggcgagcaacaagaaccgcggcaucaucaagaccuucuccaacgggugcgacuacgucagcaacaagggcguggacaccguguccgucggcaacacccuguacuacgugaacaagcaggagggcaagagccucuacgugaagggggagcccaucaucaacuucuacgacccgcuggucuuccccuccgacgaguucgacgccagcaucucccaggugaacgagaagaucaaccagagccuggccuucauccggaaguccgacgagcuccugcacaacgugaacgucggcaagagcaccacgaacaucaugaucaccaccaucaucaucgugaucaucgugauccugcugcuccugaucgccgucgggcuguuccucuacugcaaggcccgcugaggacuagucccuguucccagagcccacuuuuuuuucuuuuuuugaaauaaaauagccugucuuucagaucuaaaaaaaaaaaaaaaaaaaaaaaaaaaaaaaaaaaaaaaaaaaaaaaaaaaaaaaaaaaaaaaaugcaucccccccccccccccccccccccccccccccaaaggcucuuuucagagccaccagaauu

SEQ ID NO: 12226 - RNA, 1960 nt, Artificial Sequence
  mRNA product Design d-1 comprising derived and/or modified sequence from HRSV(Memphis-37)__AIY60640.1__F-del (opt2)
gggagacccgugacccggaaguuguacggcuacgcgacuuucccucccacaaacccucgcgcccuuccuuuccuacuugggcccggcagaaagcuuaccauggagcuccccauccucaagaccaacgccaucaccaccauccucgccgccgucacccucugcuucgccuccucccagaacaucaccgaggaguucuaccaguccaccugcuccgccgucuccaagggcuaccucuccgcccuccgcaccggcugguacaccuccgucaucaccaucgagcucuccaacaucaaggagaacaagugcaacggcaccgacgccaaggucaagcucaucaagcaggagcucgacaaguacaagaacgccgucaccgagcuccagcuccucaugcaguccacccccgccgccaacaaccgcgcccgccgcgagcucccccgcuucaugaacuacacccucaacaacaccaagaacaacaacgucacccucuccaagaagcgcaagcgccgcuuccucggcuuccuccucggcgucggcuccgccaucgccuccggcaucgccgucuccaagguccuccaccucgagggcgaggucaacaagaucaagaacgcccuccucuccaccaacaaggccgucgucucccucuccaacggcgucuccguccucaccuccaagguccucgaccucaagaacuacaucgacaagcagcuccuccccaucgucaacaagcaguccugcuccaucuccaacaucgagaccgucaucgaguuccagcagaagaacaaccgccuccucgagaucacccgcgaguucuccgucaacgccggcgucaccacccccgucuccaccuacaugcucaccaacuccgagcuccucucccucaucaacgacaugcccaucaccaacgaccagaagaagcucauguccaacaacguccagaucguccgccagcaguccuacuccaucauguccaucaucaaggaggagguccucgccuacgucguccagcucccccucuacggcgucaucgacacccccugcuggaagcuccacaccuccccccucugcaccaccaacaccaaggagggcuccaacaucugccucacccgcaccgaccgcggcugguacugcgacaacgccggcuccgucuccuucuucccccaggccgagaccugcaagguccaguccaaccgcgucuucugcgacaccaugaacucccucacccuccccuccgaggucaaccucugcaacaucgacaucuucaaccccaaguacgacugcaagaucaugaccuccaagaccgacgucuccuccuccgucaucaccucccucggcgccaucgucuccugcuacggcaagaccaagugcaccgccuccaacaagaaccgcggcaucaucaagaccuucuccaacggcugcgacuacgucuccaacaagggcgucgacaccgucuccgucggcaacacccucuacuacgucaacaagcaggagggcaagucccucuacgucaagggcgagcccaucaucaacuucuacgacccccucgucuuccccuccgacgaguucgacgccuccaucucccaggucaacgagaagaucaaccagucccucgccuucauccgcaaguccgacgagcuccuccacaacgucaacgucggcaaguccaccaccaacaucaugaucaccaccaucaucaucgucaucaucgucauccuccuccuccucaucgccgucggccucuuccucuacugcaaggcccgcugaggacuagucccuguucccagagcccacuuuuuuuucuuuuuuugaaauaaaauagccugucuuucagaucuaaaaaaaaaaaaaaaaaaaaaaaaaaaaaaaaaaaaaaaaaaaaaaaaaaaaaaaaaaaaaaaaugcaucccccccccccccccccccccccccccccccaaaggcucuuuucagagccaccagaauu

SEQ ID NO: 12227 - RNA, 1960 nt, Artificial Sequence
  mRNA product Design d-1 comprising derived and/or modified sequence from HRSV(Memphis-37)__AIY60640.1__F-del (opt3)
gggagacccgugacccggaaguuguacggcuacgcgacuuucccucccacaaacccucgcgcccuuccuuuccuacuugggcccggcagaaagcuuaccauggagcugcccauccucaagaccaacgccauuacaacuauacuugcugcagugacgcugugcuucgccagcucccagaauaucaccgaagaguuuuaccaaucuacauguucagcggucaguaaaggcuauuugagcgcuuuaagaacugggugguacaccuccguuauuacaaucgaacugucuaacauuaaggagaauaaaugcaacggaaccgacgccaaggugaaacuaaucaagcaggaacucgauaaguauaaaaaugcaguaacugagcugcagcuucugaugcagucgaccccugccgcuaacaauagggcacggcgcgaguugccacgauucaugaacuacacacucaauaacacgaagaauaacaaugugacucugagcaaaaagcguaaaagaagguuucuggguuuccucuuaggcgucgggucagccauagcuaguggaaucgccguguccaagguucugcaccuugaaggcgaggugaacaagauuaaaaaugcguugcugucuaccaacaaggcagucgugagccuauccaacgguguaucaguucucacaaguaaagugcuggaccuuaagaauuauaucgauaaacaacuguugccgauugucaacaagcagagcuguucuaucuccaauauagaaacugugauugaguuucagcagaaaaacaaucggcuccuggagaucacccgcgaguucucagugaacgccggggucacaacccccguuagcacguacauguuaacuaauagugaacugcucucucuuauuaacgacaugccuaucacaaaugaucaaaagaagcugauguccaacaaugugcagaucguaagacagcagagcuauucgauuaugucuauaaucaaagaagagguguuggcuuacgucgugcaacuaccacuguacggaguuauugacacccccugcuggaagcuccauacuuccccucuguguacaaccaacacgaaagaaggcucaaauaucugccuuaccaggacagaucggggcugguauugugacaacgccgggagugugagcuuuuucccacaggcagagacuugcaagguccaguccaaucgcguguuuugugauaccaugaacucucugacauugcccagcgagguaaaccucugcaauauagacauuuucaacccuaaauacgauuguaagaucaugacuucaaagaccgacguuaguuccagcgugaucacaucucugggagcuauugucucaugcuaugguaaaaccaagugcacugccaguaauaaaaaccgaggcaucauuaagacguuuagcaaugggugugauuacguguccaacaaaggagucgacacagugucuguuggcaauaccuuauauuacgugaacaagcaagaagguaagucgcuguauguaaaaggggagccaauaaucaauuucuacgacccgcuagucuuucccagcgaugaguucgacgcguccauuucacaggugaacgaaaagaucaaucagagucucgccuucaucagaaaaucugaugaacugcuucacaacguuaaugugggaaagagcacuaccaacauuaugauaacaaccaucauuaucgucauuaucgugauauugcugcuccugaucgcaguaggccuuuuucuguacugcaaagcuaggugaggacuagucccuguucccagagcccacuuuuuuuucuuuuuuugaaauaaaauagccugucuuucagaucuaaaaaaaaaaaaaaaaaaaaaaaaaaaaaaaaaaaaaaaaaaaaaaaaaaaaaaaaaaaaaaaaugcaucccccccccccccccccccccccccccccccaaaggcucuuuucagagccaccagaauu

SEQ ID NO: 12228 - RNA, 1960 nt, Artificial Sequence
  mRNA product Design d-1 comprising derived and/or modified sequence from HRSV(Memphis-37)__AIY60640.1__F-del (opt4)
gggagacccgugacccggaaguuguacggcuacgcgacuuucccucccacaaacccucgcgcccuuccuuuccuacuugggcccggcagaaagcuuaccauggagcugcccauccugaagaccaacgccaucaccaccauccuggccgccgugacccugugcuucgccagcagccagaacaucaccgaggaguucuaccagagcaccugcagcgccgugagcaagggcuaccugagcgcccugagaaccggcugguacaccagcgugaucaccaucgagcugagcaacaucaaggagaacaagugcaacggcaccgacgccaaggugaagcugaucaagcaggagcuggacaaguacaagaacgccgugaccgagcugcagcugcugaugcagagcacccccgccgccaacaacagagccagaagagagcugcccagauucaugaacuacacccugaacaacaccaagaacaacaacgugacccugagcaagaagagaaagagaagauuccugggcuuccugcugggcgugggcagcgccaucgccagcggcaucgccgugagcaaggugcugcaccuggagggcgaggugaacaagaucaagaacgcccugcugagcaccaacaaggccguggugagccugagcaacggcgugagcgugcugaccagcaaggugcuggaccugaagaacuacaucgacaagcagcugcugcccaucgugaacaagcagagcugcagcaucagcaacaucgagaccgugaucgaguuccagcagaagaacaacagacugcuggagaucaccagagaguucagcgugaacgccggcgugaccacccccgugagcaccuacaugcugaccaacagcgagcugcugagccugaucaacgacaugcccaucaccaacgaccagaagaagcugaugagcaacaacgugcagaucgugagacagcagagcuacagcaucaugagcaucaucaaggaggaggugcuggccuacguggugcagcugccccuguacggcgugaucgacacccccugcuggaagcugcacaccagcccccugugcaccaccaacaccaaggagggcagcaacaucugccugaccagaaccgacagaggcugguacugcgacaacgccggcagcgugagcuucuucccccaggccgagaccugcaaggugcagagcaacagaguguucugcgacaccaugaacagccugacccugcccagcgaggugaaccugugcaacaucgacaucuucaaccccaaguacgacugcaagaucaugaccagcaagaccgacgugagcagcagcgugaucaccagccugggcgccaucgugagcugcuacggcaagaccaagugcaccgccagcaacaagaacagaggcaucaucaagaccuucagcaacggcugcgacuacgugagcaacaagggcguggacaccgugagcgugggcaacacccuguacuacgugaacaagcaggagggcaagagccuguacgugaagggcgagcccaucaucaacuucuacgacccccugguguuccccagcgacgaguucgacgccagcaucagccaggugaacgagaagaucaaccagagccuggccuucaucagaaagagcgacgagcugcugcacaacgugaacgugggcaagagcaccaccaacaucaugaucaccaccaucaucaucgugaucaucgugauccugcugcugcugaucgccgugggccuguuccuguacugcaaggccagaugaggacuagucccuguucccagagcccacuuuuuuuucuuuuuuugaaauaaaauagccugucuuucagaucuaaaaaaaaaaaaaaaaaaaaaaaaaaaaaaaaaaaaaaaaaaaaaaaaaaaaaaaaaaaaaaaaugcaucccccccccccccccccccccccccccccccaaaggcucuuuucagagccaccagaauu

SEQ ID NO: 12229 - RNA, 1960 nt, Artificial Sequence
  mRNA product Design d-1 comprising derived and/or modified sequence from HRSV(Memphis-37)__AIY60640.1__F-del (opt5)
gggagacccgugacccggaaguuguacggcuacgcgacuuucccucccacaaacccucgcgcccuuccuuuccuacuugggcccggcagaaagcuuaccauggagcugcccauccucaagaccaacgccauuacaacgauccuggcugccgugacccuuugcuucgcgagcucccagaauauuacagaagaguuuuaccaaucuaccuguagcgcugucuccaaaggcuaucugucugcccucagaacagggugguacaccagcguuaucacaauugaacuguccaacaucaaggagaauaaaugcaacggaaccgacgccaaggugaaacuuaucaagcaggaacuggauaaguauaaaaaugcugugacggagcuccagcugcugaugcagucuaccccugccgcuaacaaucgggcccgcagagagcucccgcgguucaugaacuacacacugaauaacaccaagaauaacaaugucacacuuagcaaaaagcgcaaaagacgguuucugggcuuccuccugggggugggauccgcgauugccagcggcaucgcuguuucuaaggugcuucaccuggaaggggaggucaacaagauuaaaaaugcccuccuguccaccaacaaggcugugguuagccugucuaacggaguguccguccucacgagcaaagugcuggaccuuaagaauuauaucgauaaacaacugcuccccauugugaacaagcagucuuguuccaucagcaauauugaaacagucaucgaguuucagcagaaaaacaaucgccugcuugagaucaccagagaauuuuccguuaacgccggcgugacaaccccugugucuaccuacaugcugacaaauagcgagcuccugucccugauuaacgacaugcccaucacgaaugaucaaaagaagcucaugagcaacaauguccagauugugcggcagcagucuuauuccaucaugagcauuaucaaagaagagguucuggcguacgugguccaacuuccucuguacggcgugaucgacacccccugcuggaagcuccauacaucuccucuguguaccacaaacaccaaagaagggagcaauauuugccuuacgcgcacagauagaggaugguauugugacaacgccggcuccguuucuuucuucccgcaggcugagaccugcaaggugcagagcaaucgggucuuuugugauaccaugaacucccugacacuccccagcgaggugaaccugugcaauaucgacauuuucaacccuaaauacgauuguaagaucaugaccucuaagacagacgucuccagcucugugauuacgucccugggggccaucguuagcugcuauggaaaaaccaagugcacagcuuccaauaaaaaccgcggcaucauuaagaccuuuucuaaugggugugauuacgugagcaacaaaggagucgacacaguguccguuggcaauacccucuauuacgugaacaagcaagaaggcaagucucuguaugucaaaggggagcccaucauuaauuucuacgacccucuuguguuucccagcgaugaguucgacgccuccaucagccaggugaacgaaaagauuaaucagucucuggccuucaucagaaaauccgaugaacuccugcacaacguuaaugucggaaagagcacgaccaacauuaugaucacaaccaucauuaucgugauuaucgugauucugcuucuccugaucgcugucggccuguuucucuacugcaaagcgcggugaggacuagucccuguucccagagcccacuuuuuuuucuuuuuuugaaauaaaauagccugucuuucagaucuaaaaaaaaaaaaaaaaaaaaaaaaaaaaaaaaaaaaaaaaaaaaaaaaaaaaaaaaaaaaaaaaugcaucccccccccccccccccccccccccccccccaaaggcucuuuucagagccaccagaauu

SEQ ID NO: 12230 - RNA, 1960 nt, Artificial Sequence
  mRNA product Design d-1 comprising derived and/or modified sequence from HRSV(Memphis-37)__AIY60640.1__F-del (opt6)
gggagacccgugacccggaaguuguacggcuacgcgacuuucccucccacaaacccucgcgcccuuccuuuccuacuugggcccggcagaaagcuuaccauggaacucccaauauuaaaaacuaacgcaaucacaaccauauuagcagccgucacucuaugcuuugccuccucacaaaauauaacagaagaauuuuaccaauccacaugcucagccguuagcaaaggauaucuaucagcccuaagaacaggcugguauacuucaguaauaacaauagaacuaucaaauauaaaagaaaacaaaugcaacggaaccgacgcuaaaguaaagcucauaaaacaagaauuagacaaauacaaaaaugcaguaacagaacuacaacuccuaaugcaaucaaccccagccgccaauaacagagcuagacgagaacuaccccgauucaugaauuacacacuaaacaacacaaaaaacaacaauguaacacucucaaaaaaaagaaaacgaagauucuuagguuuucuccugggaguaggaucagcaaucgcuuccggaaucgcagucaguaaaguccuucaccuugaaggcgaaguaaacaaaauaaaaaaugcacuacuaucuacaaauaaagcaguaguaucccuauccaauggcgucucaguauuaaccucaaaaguacucgaccuuaaaaauuauauagacaaacaauuacuacccauagucaauaaacaauccuguuccauaucaaacauagaaacaguaaucgaauuucaacaaaaaaacaacagauuacuagaaauaacacgcgaauuuucagucaacgccggaguaaccacacccgucucaacauacaugcuaaccaacuccgaacuacuaucacuuaucaacgacaugccaauaacaaaugaccaaaaaaaacucaugucaaacaacguacaaauaguccgccaacaaucauacucuauaaugucuauuaucaaagaagaaguucucgcauacguaguacaacuaccacuauauggugucauagacacaccauguuggaaacuccauacaucacccuuauguacaaccaauacaaaagaaggcucaaacaucugccuaacucgaacagaccgaggaugguacugcgacaaugcaggaucugucucauucuucccucaagcagaaacauguaaaguucaaucuaauagaguuuucugcgauacaaugaacucacuaacucuaccaucagaaguaaaucucuguaauauugacauauucaacccaaaauacgauugcaagaucaugacaucaaaaacugacguaucauccucagucaucaccucauuaggagcaaucguaagcuguuacgggaaaacaaaaugcaccgcuucuaacaaaaauagaggaauaauuaaaaccuucucaaacggaugcgauuacgucuccaauaaaggaguagauacaguaagcguaggaaauacucuauacuacgucaauaaacaagaaggaaaaucacuuuaugucaaaggagaacccauaauaaauuucuacgacccauuagucuucccaucagaugaauuugacgcauccauaucccaagucaacgaaaaaaucaaucaaucacuagcauucauacgaaaaucagacgaacuacuacacaacguuaacguaggaaaaucaacaaccaacaucaugauaaccacuauaauaaucgucauaauagucauccuauuauuacuaauagccguaggccuuuuccuauacuguaaagcuagauaaggacuagucccuguucccagagcccacuuuuuuuucuuuuuuugaaauaaaauagccugucuuucagaucuaaaaaaaaaaaaaaaaaaaaaaaaaaaaaaaaaaaaaaaaaaaaaaaaaaaaaaaaaaaaaaaaugcaucccccccccccccccccccccccccccccccaaaggcucuuuucagagccaccagaauu

SEQ ID NO: 12231 - RNA, 1960 nt, Artificial Sequence
  mRNA product Design d-1 comprising derived and/or modified sequence from HRSV(Memphis-37)__AIY60640.1__F-del (opt11)
gggagacccgugacccggaaguuguacggcuacgcgacuuucccucccacaaacccucgcgcccuuccuuuccuacuugggcccggcagaaagcuuaccauggaacucccgauccucaaaaccaacgccaucaccacuauccucgccgccguaacccucugcuucgccucaucccaaaacaucaccgaagaauuuuaccaauccacaugcuccgccgucuccaaagguuaccucucagcccuccgcaccggcugguacaccuccguuaucaccaucgaacuuuccaacauaaaagagaacaagugcaacggcaccgacgcaaaaguaaaacuaaucaaacaagaacuagacaaauacaaaaacgccgucaccgaacuccagcuccucaugcaaucgacgcccgccgccaacaaccgagcaaggcgcgaacuuccacgcuucaugaacuacacccucaacaacacuaaaaacaacaacgugacccuauccaaaaagcguaaacgccgauuccuagguuuccuucucggugucggcuccgccauugccuccggcaucgcuguuuccaaaguccuccaccucgaaggcgaaguaaacaagauaaaaaacgcccuccucucuacaaacaaggccgugguaucgcucucuaacggcgucucuguacucaccuccaaaguccucgaccucaaaaacuacaucgacaagcaacuccucccuaucgucaauaaacaauccugcuccauuuccaacaucgaaacagugaucgaauuucaacaaaaaaacaaccgauuacuagaaaucacccgcgaauuuucagucaacgccggcgucacaacgccagucucaaccuacaugcucaccaacucagaacucuuaucacucaucaacgacaugcccaucacuaacgaccagaaaaaacugauguccaacaacgugcaaauaguccgccaacaguccuacuccaucauguccauaaucaaggaggaggugcucgccuacguaguccaacucccccucuacggagucauugacaccccuugcuggaaacuacacaccuccccucucugcaccaccaacaccaaagaaggcagcaacaucugccuaaccaggacggaccgaggaugguacugcgacaaugcaggcuccgucagcuucuucccacaagccgaaacaugcaaaguucaaucaaaccguguauucugcgacaccaugaacucacucacccuccccucagaaguaaaccuaugcaacauagauaucuucaaccccaaauacgacugcaaaauuaugaccuccaaaaccgaugucuccagcuccguuaucacgucacucggcgccaucgucuccugcuacggcaagaccaaaugcaccgccuccaacaaaaaccgcggaauaaucaaaacauucucuaacggcugcgacuacgucuccaauaaaggcgucgacaccgucuccgugggcaacacgcuguacuacgucaacaaacaagaaggcaaaucucuuuacgucaaaggugaaccaaucaucaacuucuacgacccccucguauuccccuccgacgaauuugacgcgagcaucucccaagucaacgaaaagaucaaccaaucccucgccuucauccgaaaaagcgacgaacuccuccacaacgucaacgucggcaaaaguaccacaaacauuaugaucaccaccaucaucauagucaucaucgucauccugcuccuacuaauagccgucggccucuucuuguacugcaaggcacgaugaggacuagucccuguucccagagcccacuuuuuuuucuuuuuuugaaauaaaauagccugucuuucagaucuaaaaaaaaaaaaaaaaaaaaaaaaaaaaaaaaaaaaaaaaaaaaaaaaaaaaaaaaaaaaaaaaugcaucccccccccccccccccccccccccccccccaaaggcucuuuucagagccaccagaauu

SEQ ID NO: 12232 - RNA, 2015 nt, Artificial Sequence
  mRNA product Design d-2 comprising derived and/or modified sequence from HRSV(Memphis-37)__AIY60640.1__F-del (wt)
gggagagcggcucggccauuuugucccagucaguccggaggcugcggcugcagaaguaccgccugcggaguaacugcaaagaagcuuaccauggaguugccaauccucaaaacaaaugcaauuaccacaauccuugcugcagucacacucuguuucgcuuccagucaaaacaucacugaagaauuuuaucaaucaacaugcagugcaguuagcaaaggcuaucuuagugcuuuaagaacugguugguauacuaguguuauaacuauagaauuaaguaauaucaaggaaaauaaguguaauggaacagaugcuaagguaaaauugauaaaacaagaauuagauaaauauaaaaaugcuguaacagaauugcaguugcucaugcaaagcacaccagcagccaacaaucgagccagaagagaacuaccaagguuuaugaauuauacacucaacaauaccaaaaauaacaauguaacauuaagcaagaaaaggaaaagaagauuucuuggcuuuuuguuagguguuggaucugcaaucgccaguggcauugcuguaucuaaaguccugcaccuagaaggggaagugaacaaaaucaaaaaugcucuacuauccacaaacaaggcuguagucagcuuaucaaauggaguuagugucuuaaccagcaaaguguuagaccucaaaaacuauauagauaaacaguuguuacccauugugaacaagcaaagcugcagcauaucaaacauugaaacugugauagaauuccaacaaaagaacaacagacuacuagagauuaccagggaauuuaguguuaaugcagguguaacuacaccuguaagcacuuauauguuaacaaauagugaauuauuaucauuaaucaaugauaugccuauaacaaaugaucagaaaaaguuaauguccaacaauguucaaauaguuagacagcaaaguuacucuaucauguccauaauaaaggaggaagucuuagcauauguaguucaauuaccacuauaugguguaauagauacaccuuguuggaaacuacacacauccccucuaugcacaaccaacacaaaggaaggguccaacaucuguuuaacaagaaccgacagaggaugguacugugacaaugcaggaucagugucuuucuucccacaagcugaaacaugcaaaguucaaucgaaucgaguauuuugugacacaaugaacagucuaacauuaccaagugaaguaaaucucugcaacauugacauauucaacccuaaauaugauugcaaaauuaugacuucaaaaacagaugugagcagcuccguuaucacaucucuaggagccauugugucaugcuauggcaaaacuaaauguacagcauccaauaaaaaucguggaaucauaaagacauuuucuaacgggugugauuauguaucaaauaaggggguggacacuguaucuguagguaauacauuauauuauguaaauaagcaagaaggaaaaagccucuauguaaaaggugaaccaauaauaaauuucuaugacccauuaguguucccuucugaugaauuugaugcaucaauaucucaagucaaugagaagauuaaccagagccuagcauuuauucguaaauccgaugaauuauuacauaauguaaauguugguaaauccaccacaaauaucaugauaacuacuauaauuauagugauuauaguaauauuguuauuauuaauugcaguugggcuguuccuauacugcaaggccagaugaggacuaguaauaaggaaacuguaugaaugucugugggcaggaagugaagagauccuucuguaaagguuuuuggaauuaugucugcugaauaauaaacuuuuuugaaauaauaaaucugguagaaaaaugagaucuaaaaaaaaaaaaaaaaaaaaaaaaaaaaaaaaaaaaaaaaaaaaaaaaaaaaaaaaaaaaaaaaugcaucccccccccccccccccccccccccccccccaaaggcucuuuucagagccaccagaauu

SEQ ID NO: 12233 - RNA, 2015 nt, Artificial Sequence
  mRNA product Design d-2 comprising derived and/or modified sequence from HRSV(Memphis-37)__AIY60640.1__F-del (opt1)
gggagagcggcucggccauuuugucccagucaguccggaggcugcggcugcagaaguaccgccugcggaguaacugcaaagaagcuuaccauggagcugcccauccucaagaccaacgccaucaccacgauccuggccgcggugacccugugcuucgccagcucccagaacaucaccgaggaguucuaccagagcacgugcuccgccgucagcaagggcuaccucuccgcccugcgcaccgggugguacaccagcgugaucaccaucgagcuguccaacaucaaggagaacaagugcaacggcaccgacgccaaggugaagcucaucaagcaggagcuggacaaguacaagaacgcggucacggagcugcagcuccugaugcagagcaccccggccgccaacaaccgggcccgccgggagcugccccgcuucaugaacuacacccucaacaacaccaagaacaacaacgugacgcuguccaagaagcggaagcgccgguuccugggguuccuccugggcguggggagcgcgaucgccuccggcaucgccgucagcaaggugcugcaccucgagggcgaggugaacaagaucaagaacgcccugcuguccaccaacaaggccgucgugagccucuccaacggggugagcguccugaccuccaaggugcuggaccucaagaacuacaucgacaagcagcugcugcccaucgugaacaagcagagcugcuccaucagcaacaucgagaccgucaucgaguuccagcagaagaacaaccgccuccuggagaucacgcgggaguucagcgugaacgcgggcgugaccacccccgucuccaccuacaugcugacgaacagcgagcuccugucccugaucaacgacaugccgaucaccaacgaccagaagaagcucaugagcaacaacgugcagaucgugcgccagcaguccuacagcaucauguccaucaucaaggaggagguccuggccuacguggugcagcugccccucuacggggucaucgacacccccugcuggaagcugcacaccagcccccugugcacgaccaacaccaaggagggcuccaacaucugccucacccggacggaccgcgggugguacugcgacaacgccggcagcguguccuucuucccgcaggccgagaccugcaagguccagagcaaccggguguucugcgacaccaugaacucccugacccugcccagcgaggugaaccucugcaacaucgacaucuucaaccccaaguacgacugcaagaucaugacguccaagaccgacgucagcuccagcgugaucaccucccugggcgccaucgugagcugcuacgggaagaccaagugcacggcgagcaacaagaaccgcggcaucaucaagaccuucuccaacgggugcgacuacgucagcaacaagggcguggacaccguguccgucggcaacacccuguacuacgugaacaagcaggagggcaagagccucuacgugaagggggagcccaucaucaacuucuacgacccgcuggucuuccccuccgacgaguucgacgccagcaucucccaggugaacgagaagaucaaccagagccuggccuucauccggaaguccgacgagcuccugcacaacgugaacgucggcaagagcaccacgaacaucaugaucaccaccaucaucaucgugaucaucgugauccugcugcuccugaucgccgucgggcuguuccucuacugcaaggcccgcugaggacuaguaauaaggaaacuguaugaaugucugugggcaggaagugaagagauccuucuguaaagguuuuuggaauuaugucugcugaauaauaaacuuuuuugaaauaauaaaucugguagaaaaaugagaucuaaaaaaaaaaaaaaaaaaaaaaaaaaaaaaaaaaaaaaaaaaaaaaaaaaaaaaaaaaaaaaaaugcaucccccccccccccccccccccccccccccccaaaggcucuuuucagagccaccagaauu

SEQ ID NO: 12234 - RNA, 2015 nt, Artificial Sequence
  mRNA product Design d-2 comprising derived and/or modified sequence from HRSV(Memphis-37)__AIY60640.1__F-del (opt2)
gggagagcggcucggccauuuugucccagucaguccggaggcugcggcugcagaaguaccgccugcggaguaacugcaaagaagcuuaccauggagcuccccauccucaagaccaacgccaucaccaccauccucgccgccgucacccucugcuucgccuccucccagaacaucaccgaggaguucuaccaguccaccugcuccgccgucuccaagggcuaccucuccgcccuccgcaccggcugguacaccuccgucaucaccaucgagcucuccaacaucaaggagaacaagugcaacggcaccgacgccaaggucaagcucaucaagcaggagcucgacaaguacaagaacgccgucaccgagcuccagcuccucaugcaguccacccccgccgccaacaaccgcgcccgccgcgagcucccccgcuucaugaacuacacccucaacaacaccaagaacaacaacgucacccucuccaagaagcgcaagcgccgcuuccucggcuuccuccucggcgucggcuccgccaucgccuccggcaucgccgucuccaagguccuccaccucgagggcgaggucaacaagaucaagaacgcccuccucuccaccaacaaggccgucgucucccucuccaacggcgucuccguccucaccuccaagguccucgaccucaagaacuacaucgacaagcagcuccuccccaucgucaacaagcaguccugcuccaucuccaacaucgagaccgucaucgaguuccagcagaagaacaaccgccuccucgagaucacccgcgaguucuccgucaacgccggcgucaccacccccgucuccaccuacaugcucaccaacuccgagcuccucucccucaucaacgacaugcccaucaccaacgaccagaagaagcucauguccaacaacguccagaucguccgccagcaguccuacuccaucauguccaucaucaaggaggagguccucgccuacgucguccagcucccccucuacggcgucaucgacacccccugcuggaagcuccacaccuccccccucugcaccaccaacaccaaggagggcuccaacaucugccucacccgcaccgaccgcggcugguacugcgacaacgccggcuccgucuccuucuucccccaggccgagaccugcaagguccaguccaaccgcgucuucugcgacaccaugaacucccucacccuccccuccgaggucaaccucugcaacaucgacaucuucaaccccaaguacgacugcaagaucaugaccuccaagaccgacgucuccuccuccgucaucaccucccucggcgccaucgucuccugcuacggcaagaccaagugcaccgccuccaacaagaaccgcggcaucaucaagaccuucuccaacggcugcgacuacgucuccaacaagggcgucgacaccgucuccgucggcaacacccucuacuacgucaacaagcaggagggcaagucccucuacgucaagggcgagcccaucaucaacuucuacgacccccucgucuuccccuccgacgaguucgacgccuccaucucccaggucaacgagaagaucaaccagucccucgccuucauccgcaaguccgacgagcuccuccacaacgucaacgucggcaaguccaccaccaacaucaugaucaccaccaucaucaucgucaucaucgucauccuccuccuccucaucgccgucggccucuuccucuacugcaaggcccgcugaggacuaguaauaaggaaacuguaugaaugucugugggcaggaagugaagagauccuucuguaaagguuuuuggaauuaugucugcugaauaauaaacuuuuuugaaauaauaaaucugguagaaaaaugagaucuaaaaaaaaaaaaaaaaaaaaaaaaaaaaaaaaaaaaaaaaaaaaaaaaaaaaaaaaaaaaaaaaugcaucccccccccccccccccccccccccccccccaaaggcucuuuucagagccaccagaauu

SEQ ID NO: 12235 - RNA, 2015 nt, Artificial Sequence
  mRNA product Design d-2 comprising derived and/or modified sequence from HRSV(Memphis-37)__AIY60640.1__F-del (opt3)
gggagagcggcucggccauuuugucccagucaguccggaggcugcggcugcagaaguaccgccugcggaguaacugcaaagaagcuuaccauggagcugcccauccucaagaccaacgccauuacaacuauacuugcugcagugacgcugugcuucgccagcucccagaauaucaccgaagaguuuuaccaaucuacauguucagcggucaguaaaggcuauuugagcgcuuuaagaacugggugguacaccuccguuauuacaaucgaacugucuaacauuaaggagaauaaaugcaacggaaccgacgccaaggugaaacuaaucaagcaggaacucgauaaguauaaaaaugcaguaacugagcugcagcuucugaugcagucgaccccugccgcuaacaauagggcacggcgcgaguugccacgauucaugaacuacacacucaauaacacgaagaauaacaaugugacucugagcaaaaagcguaaaagaagguuucuggguuuccucuuaggcgucgggucagccauagcuaguggaaucgccguguccaagguucugcaccuugaaggcgaggugaacaagauuaaaaaugcguugcugucuaccaacaaggcagucgugagccuauccaacgguguaucaguucucacaaguaaagugcuggaccuuaagaauuauaucgauaaacaacuguugccgauugucaacaagcagagcuguucuaucuccaauauagaaacugugauugaguuucagcagaaaaacaaucggcuccuggagaucacccgcgaguucucagugaacgccggggucacaacccccguuagcacguacauguuaacuaauagugaacugcucucucuuauuaacgacaugccuaucacaaaugaucaaaagaagcugauguccaacaaugugcagaucguaagacagcagagcuauucgauuaugucuauaaucaaagaagagguguuggcuuacgucgugcaacuaccacuguacggaguuauugacacccccugcuggaagcuccauacuuccccucuguguacaaccaacacgaaagaaggcucaaauaucugccuuaccaggacagaucggggcugguauugugacaacgccgggagugugagcuuuuucccacaggcagagacuugcaagguccaguccaaucgcguguuuugugauaccaugaacucucugacauugcccagcgagguaaaccucugcaauauagacauuuucaacccuaaauacgauuguaagaucaugacuucaaagaccgacguuaguuccagcgugaucacaucucugggagcuauugucucaugcuaugguaaaaccaagugcacugccaguaauaaaaaccgaggcaucauuaagacguuuagcaaugggugugauuacguguccaacaaaggagucgacacagugucuguuggcaauaccuuauauuacgugaacaagcaagaagguaagucgcuguauguaaaaggggagccaauaaucaauuucuacgacccgcuagucuuucccagcgaugaguucgacgcguccauuucacaggugaacgaaaagaucaaucagagucucgccuucaucagaaaaucugaugaacugcuucacaacguuaaugugggaaagagcacuaccaacauuaugauaacaaccaucauuaucgucauuaucgugauauugcugcuccugaucgcaguaggccuuuuucuguacugcaaagcuaggugaggacuaguaauaaggaaacuguaugaaugucugugggcaggaagugaagagauccuucuguaaagguuuuuggaauuaugucugcugaauaauaaacuuuuuugaaauaauaaaucugguagaaaaaugagaucuaaaaaaaaaaaaaaaaaaaaaaaaaaaaaaaaaaaaaaaaaaaaaaaaaaaaaaaaaaaaaaaaugcaucccccccccccccccccccccccccccccccaaaggcucuuuucagagccaccagaauu

SEQ ID NO: 12236 - RNA, 2015 nt, Artificial Sequence
  mRNA product Design d-2 comprising derived and/or modified sequence from HRSV(Memphis-37)__AIY60640.1__F-del (opt4)
gggagagcggcucggccauuuugucccagucaguccggaggcugcggcugcagaaguaccgccugcggaguaacugcaaagaagcuuaccauggagcugcccauccugaagaccaacgccaucaccaccauccuggccgccgugacccugugcuucgccagcagccagaacaucaccgaggaguucuaccagagcaccugcagcgccgugagcaagggcuaccugagcgcccugagaaccggcugguacaccagcgugaucaccaucgagcugagcaacaucaaggagaacaagugcaacggcaccgacgccaaggugaagcugaucaagcaggagcuggacaaguacaagaacgccgugaccgagcugcagcugcugaugcagagcacccccgccgccaacaacagagccagaagagagcugcccagauucaugaacuacacccugaacaacaccaagaacaacaacgugacccugagcaagaagagaaagagaagauuccugggcuuccugcugggcgugggcagcgccaucgccagcggcaucgccgugagcaaggugcugcaccuggagggcgaggugaacaagaucaagaacgcccugcugagcaccaacaaggccguggugagccugagcaacggcgugagcgugcugaccagcaaggugcuggaccugaagaacuacaucgacaagcagcugcugcccaucgugaacaagcagagcugcagcaucagcaacaucgagaccgugaucgaguuccagcagaagaacaacagacugcuggagaucaccagagaguucagcgugaacgccggcgugaccacccccgugagcaccuacaugcugaccaacagcgagcugcugagccugaucaacgacaugcccaucaccaacgaccagaagaagcugaugagcaacaacgugcagaucgugagacagcagagcuacagcaucaugagcaucaucaaggaggaggugcuggccuacguggugcagcugccccuguacggcgugaucgacacccccugcuggaagcugcacaccagcccccugugcaccaccaacaccaaggagggcagcaacaucugccugaccagaaccgacagaggcugguacugcgacaacgccggcagcgugagcuucuucccccaggccgagaccugcaaggugcagagcaacagaguguucugcgacaccaugaacagccugacccugcccagcgaggugaaccugugcaacaucgacaucuucaaccccaaguacgacugcaagaucaugaccagcaagaccgacgugagcagcagcgugaucaccagccugggcgccaucgugagcugcuacggcaagaccaagugcaccgccagcaacaagaacagaggcaucaucaagaccuucagcaacggcugcgacuacgugagcaacaagggcguggacaccgugagcgugggcaacacccuguacuacgugaacaagcaggagggcaagagccuguacgugaagggcgagcccaucaucaacuucuacgacccccugguguuccccagcgacgaguucgacgccagcaucagccaggugaacgagaagaucaaccagagccuggccuucaucagaaagagcgacgagcugcugcacaacgugaacgugggcaagagcaccaccaacaucaugaucaccaccaucaucaucgugaucaucgugauccugcugcugcugaucgccgugggccuguuccuguacugcaaggccagaugaggacuaguaauaaggaaacuguaugaaugucugugggcaggaagugaagagauccuucuguaaagguuuuuggaauuaugucugcugaauaauaaacuuuuuugaaauaauaaaucugguagaaaaaugagaucuaaaaaaaaaaaaaaaaaaaaaaaaaaaaaaaaaaaaaaaaaaaaaaaaaaaaaaaaaaaaaaaaugcaucccccccccccccccccccccccccccccccaaaggcucuuuucagagccaccagaauu

SEQ ID NO: 12237 - RNA, 2015 nt, Artificial Sequence
  mRNA product Design d-2 comprising derived and/or modified sequence from HRSV(Memphis-37)__AIY60640.1__F-del (opt5)
gggagagcggcucggccauuuugucccagucaguccggaggcugcggcugcagaaguaccgccugcggaguaacugcaaagaagcuuaccauggagcugcccauccucaagaccaacgccauuacaacgauccuggcugccgugacccuuugcuucgcgagcucccagaauauuacagaagaguuuuaccaaucuaccuguagcgcugucuccaaaggcuaucugucugcccucagaacagggugguacaccagcguuaucacaauugaacuguccaacaucaaggagaauaaaugcaacggaaccgacgccaaggugaaacuuaucaagcaggaacuggauaaguauaaaaaugcugugacggagcuccagcugcugaugcagucuaccccugccgcuaacaaucgggcccgcagagagcucccgcgguucaugaacuacacacugaauaacaccaagaauaacaaugucacacuuagcaaaaagcgcaaaagacgguuucugggcuuccuccugggggugggauccgcgauugccagcggcaucgcuguuucuaaggugcuucaccuggaaggggaggucaacaagauuaaaaaugcccuccuguccaccaacaaggcugugguuagccugucuaacggaguguccguccucacgagcaaagugcuggaccuuaagaauuauaucgauaaacaacugcuccccauugugaacaagcagucuuguuccaucagcaauauugaaacagucaucgaguuucagcagaaaaacaaucgccugcuugagaucaccagagaauuuuccguuaacgccggcgugacaaccccugugucuaccuacaugcugacaaauagcgagcuccugucccugauuaacgacaugcccaucacgaaugaucaaaagaagcucaugagcaacaauguccagauugugcggcagcagucuuauuccaucaugagcauuaucaaagaagagguucuggcguacgugguccaacuuccucuguacggcgugaucgacacccccugcuggaagcuccauacaucuccucuguguaccacaaacaccaaagaagggagcaauauuugccuuacgcgcacagauagaggaugguauugugacaacgccggcuccguuucuuucuucccgcaggcugagaccugcaaggugcagagcaaucgggucuuuugugauaccaugaacucccugacacuccccagcgaggugaaccugugcaauaucgacauuuucaacccuaaauacgauuguaagaucaugaccucuaagacagacgucuccagcucugugauuacgucccugggggccaucguuagcugcuauggaaaaaccaagugcacagcuuccaauaaaaaccgcggcaucauuaagaccuuuucuaaugggugugauuacgugagcaacaaaggagucgacacaguguccguuggcaauacccucuauuacgugaacaagcaagaaggcaagucucuguaugucaaaggggagcccaucauuaauuucuacgacccucuuguguuucccagcgaugaguucgacgccuccaucagccaggugaacgaaaagauuaaucagucucuggccuucaucagaaaauccgaugaacuccugcacaacguuaaugucggaaagagcacgaccaacauuaugaucacaaccaucauuaucgugauuaucgugauucugcuucuccugaucgcugucggccuguuucucuacugcaaagcgcggugaggacuaguaauaaggaaacuguaugaaugucugugggcaggaagugaagagauccuucuguaaagguuuuuggaauuaugucugcugaauaauaaacuuuuuugaaauaauaaaucugguagaaaaaugagaucuaaaaaaaaaaaaaaaaaaaaaaaaaaaaaaaaaaaaaaaaaaaaaaaaaaaaaaaaaaaaaaaaugcaucccccccccccccccccccccccccccccccaaaggcucuuuucagagccaccagaauu

SEQ ID NO: 12238 - RNA, 2015 nt, Artificial Sequence
  mRNA product Design d-2 comprising derived and/or modified sequence from HRSV(Memphis-37)__AIY60640.1__F-del (opt6)
gggagagcggcucggccauuuugucccagucaguccggaggcugcggcugcagaaguaccgccugcggaguaacugcaaagaagcuuaccauggaacucccaauauuaaaaacuaacgcaaucacaaccauauuagcagccgucacucuaugcuuugccuccucacaaaauauaacagaagaauuuuaccaauccacaugcucagccguuagcaaaggauaucuaucagcccuaagaacaggcugguauacuucaguaauaacaauagaacuaucaaauauaaaagaaaacaaaugcaacggaaccgacgcuaaaguaaagcucauaaaacaagaauuagacaaauacaaaaaugcaguaacagaacuacaacuccuaaugcaaucaaccccagccgccaauaacagagcuagacgagaacuaccccgauucaugaauuacacacuaaacaacacaaaaaacaacaauguaacacucucaaaaaaaagaaaacgaagauucuuagguuuucuccugggaguaggaucagcaaucgcuuccggaaucgcagucaguaaaguccuucaccuugaaggcgaaguaaacaaaauaaaaaaugcacuacuaucuacaaauaaagcaguaguaucccuauccaauggcgucucaguauuaaccucaaaaguacucgaccuuaaaaauuauauagacaaacaauuacuacccauagucaauaaacaauccuguuccauaucaaacauagaaacaguaaucgaauuucaacaaaaaaacaacagauuacuagaaauaacacgcgaauuuucagucaacgccggaguaaccacacccgucucaacauacaugcuaaccaacuccgaacuacuaucacuuaucaacgacaugccaauaacaaaugaccaaaaaaaacucaugucaaacaacguacaaauaguccgccaacaaucauacucuauaaugucuauuaucaaagaagaaguucucgcauacguaguacaacuaccacuauauggugucauagacacaccauguuggaaacuccauacaucacccuuauguacaaccaauacaaaagaaggcucaaacaucugccuaacucgaacagaccgaggaugguacugcgacaaugcaggaucugucucauucuucccucaagcagaaacauguaaaguucaaucuaauagaguuuucugcgauacaaugaacucacuaacucuaccaucagaaguaaaucucuguaauauugacauauucaacccaaaauacgauugcaagaucaugacaucaaaaacugacguaucauccucagucaucaccucauuaggagcaaucguaagcuguuacgggaaaacaaaaugcaccgcuucuaacaaaaauagaggaauaauuaaaaccuucucaaacggaugcgauuacgucuccaauaaaggaguagauacaguaagcguaggaaauacucuauacuacgucaauaaacaagaaggaaaaucacuuuaugucaaaggagaacccauaauaaauuucuacgacccauuagucuucccaucagaugaauuugacgcauccauaucccaagucaacgaaaaaaucaaucaaucacuagcauucauacgaaaaucagacgaacuacuacacaacguuaacguaggaaaaucaacaaccaacaucaugauaaccacuauaauaaucgucauaauagucauccuauuauuacuaauagccguaggccuuuuccuauacuguaaagcuagauaaggacuaguaauaaggaaacuguaugaaugucugugggcaggaagugaagagauccuucuguaaagguuuuuggaauuaugucugcugaauaauaaacuuuuuugaaauaauaaaucugguagaaaaaugagaucuaaaaaaaaaaaaaaaaaaaaaaaaaaaaaaaaaaaaaaaaaaaaaaaaaaaaaaaaaaaaaaaaugcaucccccccccccccccccccccccccccccccaaaggcucuuuucagagccaccagaauu

SEQ ID NO: 12239 - RNA, 2015 nt, Artificial Sequence
  mRNA product Design d-2 comprising derived and/or modified sequence from HRSV(Memphis-37)__AIY60640.1__F-del (opt11)
gggagagcggcucggccauuuugucccagucaguccggaggcugcggcugcagaaguaccgccugcggaguaacugcaaagaagcuuaccauggaacucccgauccucaaaaccaacgccaucaccacuauccucgccgccguaacccucugcuucgccucaucccaaaacaucaccgaagaauuuuaccaauccacaugcuccgccgucuccaaagguuaccucucagcccuccgcaccggcugguacaccuccguuaucaccaucgaacuuuccaacauaaaagagaacaagugcaacggcaccgacgcaaaaguaaaacuaaucaaacaagaacuagacaaauacaaaaacgccgucaccgaacuccagcuccucaugcaaucgacgcccgccgccaacaaccgagcaaggcgcgaacuuccacgcuucaugaacuacacccucaacaacacuaaaaacaacaacgugacccuauccaaaaagcguaaacgccgauuccuagguuuccuucucggugucggcuccgccauugccuccggcaucgcuguuuccaaaguccuccaccucgaaggcgaaguaaacaagauaaaaaacgcccuccucucuacaaacaaggccgugguaucgcucucuaacggcgucucuguacucaccuccaaaguccucgaccucaaaaacuacaucgacaagcaacuccucccuaucgucaauaaacaauccugcuccauuuccaacaucgaaacagugaucgaauuucaacaaaaaaacaaccgauuacuagaaaucacccgcgaauuuucagucaacgccggcgucacaacgccagucucaaccuacaugcucaccaacucagaacucuuaucacucaucaacgacaugcccaucacuaacgaccagaaaaaacugauguccaacaacgugcaaauaguccgccaacaguccuacuccaucauguccauaaucaaggaggaggugcucgccuacguaguccaacucccccucuacggagucauugacaccccuugcuggaaacuacacaccuccccucucugcaccaccaacaccaaagaaggcagcaacaucugccuaaccaggacggaccgaggaugguacugcgacaaugcaggcuccgucagcuucuucccacaagccgaaacaugcaaaguucaaucaaaccguguauucugcgacaccaugaacucacucacccuccccucagaaguaaaccuaugcaacauagauaucuucaaccccaaauacgacugcaaaauuaugaccuccaaaaccgaugucuccagcuccguuaucacgucacucggcgccaucgucuccugcuacggcaagaccaaaugcaccgccuccaacaaaaaccgcggaauaaucaaaacauucucuaacggcugcgacuacgucuccaauaaaggcgucgacaccgucuccgugggcaacacgcuguacuacgucaacaaacaagaaggcaaaucucuuuacgucaaaggugaaccaaucaucaacuucuacgacccccucguauuccccuccgacgaauuugacgcgagcaucucccaagucaacgaaaagaucaaccaaucccucgccuucauccgaaaaagcgacgaacuccuccacaacgucaacgucggcaaaaguaccacaaacauuaugaucaccaccaucaucauagucaucaucgucauccugcuccuacuaauagccgucggccucuucuuguacugcaaggcacgaugaggacuaguaauaaggaaacuguaugaaugucugugggcaggaagugaagagauccuucuguaaagguuuuuggaauuaugucugcugaauaauaaacuuuuuugaaauaauaaaucugguagaaaaaugagaucuaaaaaaaaaaaaaaaaaaaaaaaaaaaaaaaaaaaaaaaaaaaaaaaaaaaaaaaaaaaaaaaaugcaucccccccccccccccccccccccccccccccaaaggcucuuuucagagccaccagaauu

SEQ ID NO: 12240 - RNA, 2331 nt, Artificial Sequence
  mRNA product Design d-3 comprising derived and/or modified sequence from HRSV(Memphis-37)__AIY60640.1__F-del (wt)
gggagagggcgcuuggcuugcaaggacccugagcugcggcauugaagcacacccaacccaacucgacugaagucagccucacugaaccggaucugagaaucuucucucucugggcuugccagggcucuccgaaccuagcuagcauccucuucaauuccaacuagaaagcuuaccauggaguugccaauccucaaaacaaaugcaauuaccacaauccuugcugcagucacacucuguuucgcuuccagucaaaacaucacugaagaauuuuaucaaucaacaugcagugcaguuagcaaaggcuaucuuagugcuuuaagaacugguugguauacuaguguuauaacuauagaauuaaguaauaucaaggaaaauaaguguaauggaacagaugcuaagguaaaauugauaaaacaagaauuagauaaauauaaaaaugcuguaacagaauugcaguugcucaugcaaagcacaccagcagccaacaaucgagccagaagagaacuaccaagguuuaugaauuauacacucaacaauaccaaaaauaacaauguaacauuaagcaagaaaaggaaaagaagauuucuuggcuuuuuguuagguguuggaucugcaaucgccaguggcauugcuguaucuaaaguccugcaccuagaaggggaagugaacaaaaucaaaaaugcucuacuauccacaaacaaggcuguagucagcuuaucaaauggaguuagugucuuaaccagcaaaguguuagaccucaaaaacuauauagauaaacaguuguuacccauugugaacaagcaaagcugcagcauaucaaacauugaaacugugauagaauuccaacaaaagaacaacagacuacuagagauuaccagggaauuuaguguuaaugcagguguaacuacaccuguaagcacuuauauguuaacaaauagugaauuauuaucauuaaucaaugauaugccuauaacaaaugaucagaaaaaguuaauguccaacaauguucaaauaguuagacagcaaaguuacucuaucauguccauaauaaaggaggaagucuuagcauauguaguucaauuaccacuauaugguguaauagauacaccuuguuggaaacuacacacauccccucuaugcacaaccaacacaaaggaaggguccaacaucuguuuaacaagaaccgacagaggaugguacugugacaaugcaggaucagugucuuucuucccacaagcugaaacaugcaaaguucaaucgaaucgaguauuuugugacacaaugaacagucuaacauuaccaagugaaguaaaucucugcaacauugacauauucaacccuaaauaugauugcaaaauuaugacuucaaaaacagaugugagcagcuccguuaucacaucucuaggagccauugugucaugcuauggcaaaacuaaauguacagcauccaauaaaaaucguggaaucauaaagacauuuucuaacgggugugauuauguaucaaauaaggggguggacacuguaucuguagguaauacauuauauuauguaaauaagcaagaaggaaaaagccucuauguaaaaggugaaccaauaauaaauuucuaugacccauuaguguucccuucugaugaauuugaugcaucaauaucucaagucaaugagaagauuaaccagagccuagcauuuauucguaaauccgaugaauuauuacauaauguaaauguugguaaauccaccacaaauaucaugauaacuacuauaauuauagugauuauaguaauauuguuauuauuaauugcaguugggcuguuccuauacugcaaggccagaugaggacuagugaagggaacacccaaauuuaauucagccuuaagcacaauuaauuaagagugaaacguaauuguacaagcaguuggucacccaccauagggcaugaucaacaccgcaaccuuuccuuuuucccccagugauucugaaaaaccccucuucccuucagcuugcuuagauguuccaaauuuaguaagcuuaaggcggccuacagaagaaaaagaaaaaaaaggccacaaaaguucccucucacuuucaguaaauaaaauaaaagcagcaacagaaauaaagaaauaaaugaaauucaaaaugaaauaaauauuguguugugcagcauuaaaaaaucaauaaaaauuaaaaaugagcaagaucuaaaaaaaaaaaaaaaaaaaaaaaaaaaaaaaaaaaaaaaaaaaaaaaaaaaaaaaaaaaaaaaaugcaucccccccccccccccccccccccccccccccaaaggcucuuuucagagccaccagaauu

SEQ ID NO: 12241 - RNA, 2331 nt, Artificial Sequence
  mRNA product Design d-3 comprising derived and/or modified sequence from HRSV(Memphis-37)__AIY60640.1__F-del (opt1)
gggagagggcgcuuggcuugcaaggacccugagcugcggcauugaagcacacccaacccaacucgacugaagucagccucacugaaccggaucugagaaucuucucucucugggcuugccagggcucuccgaaccuagcuagcauccucuucaauuccaacuagaaagcuuaccauggagcugcccauccucaagaccaacgccaucaccacgauccuggccgcggugacccugugcuucgccagcucccagaacaucaccgaggaguucuaccagagcacgugcuccgccgucagcaagggcuaccucuccgcccugcgcaccgggugguacaccagcgugaucaccaucgagcuguccaacaucaaggagaacaagugcaacggcaccgacgccaaggugaagcucaucaagcaggagcuggacaaguacaagaacgcggucacggagcugcagcuccugaugcagagcaccccggccgccaacaaccgggcccgccgggagcugccccgcuucaugaacuacacccucaacaacaccaagaacaacaacgugacgcuguccaagaagcggaagcgccgguuccugggguuccuccugggcguggggagcgcgaucgccuccggcaucgccgucagcaaggugcugcaccucgagggcgaggugaacaagaucaagaacgcccugcuguccaccaacaaggccgucgugagccucuccaacggggugagcguccugaccuccaaggugcuggaccucaagaacuacaucgacaagcagcugcugcccaucgugaacaagcagagcugcuccaucagcaacaucgagaccgucaucgaguuccagcagaagaacaaccgccuccuggagaucacgcgggaguucagcgugaacgcgggcgugaccacccccgucuccaccuacaugcugacgaacagcgagcuccugucccugaucaacgacaugccgaucaccaacgaccagaagaagcucaugagcaacaacgugcagaucgugcgccagcaguccuacagcaucauguccaucaucaaggaggagguccuggccuacguggugcagcugccccucuacggggucaucgacacccccugcuggaagcugcacaccagcccccugugcacgaccaacaccaaggagggcuccaacaucugccucacccggacggaccgcgggugguacugcgacaacgccggcagcguguccuucuucccgcaggccgagaccugcaagguccagagcaaccggguguucugcgacaccaugaacucccugacccugcccagcgaggugaaccucugcaacaucgacaucuucaaccccaaguacgacugcaagaucaugacguccaagaccgacgucagcuccagcgugaucaccucccugggcgccaucgugagcugcuacgggaagaccaagugcacggcgagcaacaagaaccgcggcaucaucaagaccuucuccaacgggugcgacuacgucagcaacaagggcguggacaccguguccgucggcaacacccuguacuacgugaacaagcaggagggcaagagccucuacgugaagggggagcccaucaucaacuucuacgacccgcuggucuuccccuccgacgaguucgacgccagcaucucccaggugaacgagaagaucaaccagagccuggccuucauccggaaguccgacgagcuccugcacaacgugaacgucggcaagagcaccacgaacaucaugaucaccaccaucaucaucgugaucaucgugauccugcugcuccugaucgccgucgggcuguuccucuacugcaaggcccgcugaggacuagugaagggaacacccaaauuuaauucagccuuaagcacaauuaauuaagagugaaacguaauuguacaagcaguuggucacccaccauagggcaugaucaacaccgcaaccuuuccuuuuucccccagugauucugaaaaaccccucuucccuucagcuugcuuagauguuccaaauuuaguaagcuuaaggcggccuacagaagaaaaagaaaaaaaaggccacaaaaguucccucucacuuucaguaaauaaaauaaaagcagcaacagaaauaaagaaauaaaugaaauucaaaaugaaauaaauauuguguugugcagcauuaaaaaaucaauaaaaauuaaaaaugagcaagaucuaaaaaaaaaaaaaaaaaaaaaaaaaaaaaaaaaaaaaaaaaaaaaaaaaaaaaaaaaaaaaaaaugcaucccccccccccccccccccccccccccccccaaaggcucuuuucagagccaccagaauu

SEQ ID NO: 12242 - RNA, 2331 nt, Artificial Sequence
  mRNA product Design d-3 comprising derived and/or modified sequence from HRSV(Memphis-37)__AIY60640.1__F-del (opt2)
gggagagggcgcuuggcuugcaaggacccugagcugcggcauugaagcacacccaacccaacucgacugaagucagccucacugaaccggaucugagaaucuucucucucugggcuugccagggcucuccgaaccuagcuagcauccucuucaauuccaacuagaaagcuuaccauggagcuccccauccucaagaccaacgccaucaccaccauccucgccgccgucacccucugcuucgccuccucccagaacaucaccgaggaguucuaccaguccaccugcuccgccgucuccaagggcuaccucuccgcccuccgcaccggcugguacaccuccgucaucaccaucgagcucuccaacaucaaggagaacaagugcaacggcaccgacgccaaggucaagcucaucaagcaggagcucgacaaguacaagaacgccgucaccgagcuccagcuccucaugcaguccacccccgccgccaacaaccgcgcccgccgcgagcucccccgcuucaugaacuacacccucaacaacaccaagaacaacaacgucacccucuccaagaagcgcaagcgccgcuuccucggcuuccuccucggcgucggcuccgccaucgccuccggcaucgccgucuccaagguccuccaccucgagggcgaggucaacaagaucaagaacgcccuccucuccaccaacaaggccgucgucucccucuccaacggcgucuccguccucaccuccaagguccucgaccucaagaacuacaucgacaagcagcuccuccccaucgucaacaagcaguccugcuccaucuccaacaucgagaccgucaucgaguuccagcagaagaacaaccgccuccucgagaucacccgcgaguucuccgucaacgccggcgucaccacccccgucuccaccuacaugcucaccaacuccgagcuccucucccucaucaacgacaugcccaucaccaacgaccagaagaagcucauguccaacaacguccagaucguccgccagcaguccuacuccaucauguccaucaucaaggaggagguccucgccuacgucguccagcucccccucuacggcgucaucgacacccccugcuggaagcuccacaccuccccccucugcaccaccaacaccaaggagggcuccaacaucugccucacccgcaccgaccgcggcugguacugcgacaacgccggcuccgucuccuucuucccccaggccgagaccugcaagguccaguccaaccgcgucuucugcgacaccaugaacucccucacccuccccuccgaggucaaccucugcaacaucgacaucuucaaccccaaguacgacugcaagaucaugaccuccaagaccgacgucuccuccuccgucaucaccucccucggcgccaucgucuccugcuacggcaagaccaagugcaccgccuccaacaagaaccgcggcaucaucaagaccuucuccaacggcugcgacuacgucuccaacaagggcgucgacaccgucuccgucggcaacacccucuacuacgucaacaagcaggagggcaagucccucuacgucaagggcgagcccaucaucaacuucuacgacccccucgucuuccccuccgacgaguucgacgccuccaucucccaggucaacgagaagaucaaccagucccucgccuucauccgcaaguccgacgagcuccuccacaacgucaacgucggcaaguccaccaccaacaucaugaucaccaccaucaucaucgucaucaucgucauccuccuccuccucaucgccgucggccucuuccucuacugcaaggcccgcugaggacuagugaagggaacacccaaauuuaauucagccuuaagcacaauuaauuaagagugaaacguaauuguacaagcaguuggucacccaccauagggcaugaucaacaccgcaaccuuuccuuuuucccccagugauucugaaaaaccccucuucccuucagcuugcuuagauguuccaaauuuaguaagcuuaaggcggccuacagaagaaaaagaaaaaaaaggccacaaaaguucccucucacuuucaguaaauaaaauaaaagcagcaacagaaauaaagaaauaaaugaaauucaaaaugaaauaaauauuguguugugcagcauuaaaaaaucaauaaaaauuaaaaaugagcaagaucuaaaaaaaaaaaaaaaaaaaaaaaaaaaaaaaaaaaaaaaaaaaaaaaaaaaaaaaaaaaaaaaaugcaucccccccccccccccccccccccccccccccaaaggcucuuuucagagccaccagaauu

SEQ ID NO: 12243 - RNA, 2331 nt, Artificial Sequence
  mRNA product Design d-3 comprising derived and/or modified sequence from HRSV(Memphis-37)__AIY60640.1__F-del (opt3)
gggagagggcgcuuggcuugcaaggacccugagcugcggcauugaagcacacccaacccaacucgacugaagucagccucacugaaccggaucugagaaucuucucucucugggcuugccagggcucuccgaaccuagcuagcauccucuucaauuccaacuagaaagcuuaccauggagcugcccauccucaagaccaacgccauuacaacuauacuugcugcagugacgcugugcuucgccagcucccagaauaucaccgaagaguuuuaccaaucuacauguucagcggucaguaaaggcuauuugagcgcuuuaagaacugggugguacaccuccguuauuacaaucgaacugucuaacauuaaggagaauaaaugcaacggaaccgacgccaaggugaaacuaaucaagcaggaacucgauaaguauaaaaaugcaguaacugagcugcagcuucugaugcagucgaccccugccgcuaacaauagggcacggcgcgaguugccacgauucaugaacuacacacucaauaacacgaagaauaacaaugugacucugagcaaaaagcguaaaagaagguuucuggguuuccucuuaggcgucgggucagccauagcuaguggaaucgccguguccaagguucugcaccuugaaggcgaggugaacaagauuaaaaaugcguugcugucuaccaacaaggcagucgugagccuauccaacgguguaucaguucucacaaguaaagugcuggaccuuaagaauuauaucgauaaacaacuguugccgauugucaacaagcagagcuguucuaucuccaauauagaaacugugauugaguuucagcagaaaaacaaucggcuccuggagaucacccgcgaguucucagugaacgccggggucacaacccccguuagcacguacauguuaacuaauagugaacugcucucucuuauuaacgacaugccuaucacaaaugaucaaaagaagcugauguccaacaaugugcagaucguaagacagcagagcuauucgauuaugucuauaaucaaagaagagguguuggcuuacgucgugcaacuaccacuguacggaguuauugacacccccugcuggaagcuccauacuuccccucuguguacaaccaacacgaaagaaggcucaaauaucugccuuaccaggacagaucggggcugguauugugacaacgccgggagugugagcuuuuucccacaggcagagacuugcaagguccaguccaaucgcguguuuugugauaccaugaacucucugacauugcccagcgagguaaaccucugcaauauagacauuuucaacccuaaauacgauuguaagaucaugacuucaaagaccgacguuaguuccagcgugaucacaucucugggagcuauugucucaugcuaugguaaaaccaagugcacugccaguaauaaaaaccgaggcaucauuaagacguuuagcaaugggugugauuacguguccaacaaaggagucgacacagugucuguuggcaauaccuuauauuacgugaacaagcaagaagguaagucgcuguauguaaaaggggagccaauaaucaauuucuacgacccgcuagucuuucccagcgaugaguucgacgcguccauuucacaggugaacgaaaagaucaaucagagucucgccuucaucagaaaaucugaugaacugcuucacaacguuaaugugggaaagagcacuaccaacauuaugauaacaaccaucauuaucgucauuaucgugauauugcugcuccugaucgcaguaggccuuuuucuguacugcaaagcuaggugaggacuagugaagggaacacccaaauuuaauucagccuuaagcacaauuaauuaagagugaaacguaauuguacaagcaguuggucacccaccauagggcaugaucaacaccgcaaccuuuccuuuuucccccagugauucugaaaaaccccucuucccuucagcuugcuuagauguuccaaauuuaguaagcuuaaggcggccuacagaagaaaaagaaaaaaaaggccacaaaaguucccucucacuuucaguaaauaaaauaaaagcagcaacagaaauaaagaaauaaaugaaauucaaaaugaaauaaauauuguguugugcagcauuaaaaaaucaauaaaaauuaaaaaugagcaagaucuaaaaaaaaaaaaaaaaaaaaaaaaaaaaaaaaaaaaaaaaaaaaaaaaaaaaaaaaaaaaaaaaugcaucccccccccccccccccccccccccccccccaaaggcucuuuucagagccaccagaauu

SEQ ID NO: 12244 - RNA, 2331 nt, Artificial Sequence
  mRNA product Design d-3 comprising derived and/or modified sequence from HRSV(Memphis-37)__AIY60640.1__F-del (opt4)
gggagagggcgcuuggcuugcaaggacccugagcugcggcauugaagcacacccaacccaacucgacugaagucagccucacugaaccggaucugagaaucuucucucucugggcuugccagggcucuccgaaccuagcuagcauccucuucaauuccaacuagaaagcuuaccauggagcugcccauccugaagaccaacgccaucaccaccauccuggccgccgugacccugugcuucgccagcagccagaacaucaccgaggaguucuaccagagcaccugcagcgccgugagcaagggcuaccugagcgcccugagaaccggcugguacaccagcgugaucaccaucgagcugagcaacaucaaggagaacaagugcaacggcaccgacgccaaggugaagcugaucaagcaggagcuggacaaguacaagaacgccgugaccgagcugcagcugcugaugcagagcacccccgccgccaacaacagagccagaagagagcugcccagauucaugaacuacacccugaacaacaccaagaacaacaacgugacccugagcaagaagagaaagagaagauuccugggcuuccugcugggcgugggcagcgccaucgccagcggcaucgccgugagcaaggugcugcaccuggagggcgaggugaacaagaucaagaacgcccugcugagcaccaacaaggccguggugagccugagcaacggcgugagcgugcugaccagcaaggugcuggaccugaagaacuacaucgacaagcagcugcugcccaucgugaacaagcagagcugcagcaucagcaacaucgagaccgugaucgaguuccagcagaagaacaacagacugcuggagaucaccagagaguucagcgugaacgccggcgugaccacccccgugagcaccuacaugcugaccaacagcgagcugcugagccugaucaacgacaugcccaucaccaacgaccagaagaagcugaugagcaacaacgugcagaucgugagacagcagagcuacagcaucaugagcaucaucaaggaggaggugcuggccuacguggugcagcugccccuguacggcgugaucgacacccccugcuggaagcugcacaccagcccccugugcaccaccaacaccaaggagggcagcaacaucugccugaccagaaccgacagaggcugguacugcgacaacgccggcagcgugagcuucuucccccaggccgagaccugcaaggugcagagcaacagaguguucugcgacaccaugaacagccugacccugcccagcgaggugaaccugugcaacaucgacaucuucaaccccaaguacgacugcaagaucaugaccagcaagaccgacgugagcagcagcgugaucaccagccugggcgccaucgugagcugcuacggcaagaccaagugcaccgccagcaacaagaacagaggcaucaucaagaccuucagcaacggcugcgacuacgugagcaacaagggcguggacaccgugagcgugggcaacacccuguacuacgugaacaagcaggagggcaagagccuguacgugaagggcgagcccaucaucaacuucuacgacccccugguguuccccagcgacgaguucgacgccagcaucagccaggugaacgagaagaucaaccagagccuggccuucaucagaaagagcgacgagcugcugcacaacgugaacgugggcaagagcaccaccaacaucaugaucaccaccaucaucaucgugaucaucgugauccugcugcugcugaucgccgugggccuguuccuguacugcaaggccagaugaggacuagugaagggaacacccaaauuuaauucagccuuaagcacaauuaauuaagagugaaacguaauuguacaagcaguuggucacccaccauagggcaugaucaacaccgcaaccuuuccuuuuucccccagugauucugaaaaaccccucuucccuucagcuugcuuagauguuccaaauuuaguaagcuuaaggcggccuacagaagaaaaagaaaaaaaaggccacaaaaguucccucucacuuucaguaaauaaaauaaaagcagcaacagaaauaaagaaauaaaugaaauucaaaaugaaauaaauauuguguugugcagcauuaaaaaaucaauaaaaauuaaaaaugagcaagaucuaaaaaaaaaaaaaaaaaaaaaaaaaaaaaaaaaaaaaaaaaaaaaaaaaaaaaaaaaaaaaaaaugcaucccccccccccccccccccccccccccccccaaaggcucuuuucagagccaccagaauu

SEQ ID NO: 12245 - RNA, 2331 nt, Artificial Sequence
  mRNA product Design d-3 comprising derived and/or modified sequence from HRSV(Memphis-37)__AIY60640.1__F-del (opt5)
gggagagggcgcuuggcuugcaaggacccugagcugcggcauugaagcacacccaacccaacucgacugaagucagccucacugaaccggaucugagaaucuucucucucugggcuugccagggcucuccgaaccuagcuagcauccucuucaauuccaacuagaaagcuuaccauggagcugcccauccucaagaccaacgccauuacaacgauccuggcugccgugacccuuugcuucgcgagcucccagaauauuacagaagaguuuuaccaaucuaccuguagcgcugucuccaaaggcuaucugucugcccucagaacagggugguacaccagcguuaucacaauugaacuguccaacaucaaggagaauaaaugcaacggaaccgacgccaaggugaaacuuaucaagcaggaacuggauaaguauaaaaaugcugugacggagcuccagcugcugaugcagucuaccccugccgcuaacaaucgggcccgcagagagcucccgcgguucaugaacuacacacugaauaacaccaagaauaacaaugucacacuuagcaaaaagcgcaaaagacgguuucugggcuuccuccugggggugggauccgcgauugccagcggcaucgcuguuucuaaggugcuucaccuggaaggggaggucaacaagauuaaaaaugcccuccuguccaccaacaaggcugugguuagccugucuaacggaguguccguccucacgagcaaagugcuggaccuuaagaauuauaucgauaaacaacugcuccccauugugaacaagcagucuuguuccaucagcaauauugaaacagucaucgaguuucagcagaaaaacaaucgccugcuugagaucaccagagaauuuuccguuaacgccggcgugacaaccccugugucuaccuacaugcugacaaauagcgagcuccugucccugauuaacgacaugcccaucacgaaugaucaaaagaagcucaugagcaacaauguccagauugugcggcagcagucuuauuccaucaugagcauuaucaaagaagagguucuggcguacgugguccaacuuccucuguacggcgugaucgacacccccugcuggaagcuccauacaucuccucuguguaccacaaacaccaaagaagggagcaauauuugccuuacgcgcacagauagaggaugguauugugacaacgccggcuccguuucuuucuucccgcaggcugagaccugcaaggugcagagcaaucgggucuuuugugauaccaugaacucccugacacuccccagcgaggugaaccugugcaauaucgacauuuucaacccuaaauacgauuguaagaucaugaccucuaagacagacgucuccagcucugugauuacgucccugggggccaucguuagcugcuauggaaaaaccaagugcacagcuuccaauaaaaaccgcggcaucauuaagaccuuuucuaaugggugugauuacgugagcaacaaaggagucgacacaguguccguuggcaauacccucuauuacgugaacaagcaagaaggcaagucucuguaugucaaaggggagcccaucauuaauuucuacgacccucuuguguuucccagcgaugaguucgacgccuccaucagccaggugaacgaaaagauuaaucagucucuggccuucaucagaaaauccgaugaacuccugcacaacguuaaugucggaaagagcacgaccaacauuaugaucacaaccaucauuaucgugauuaucgugauucugcuucuccugaucgcugucggccuguuucucuacugcaaagcgcggugaggacuagugaagggaacacccaaauuuaauucagccuuaagcacaauuaauuaagagugaaacguaauuguacaagcaguuggucacccaccauagggcaugaucaacaccgcaaccuuuccuuuuucccccagugauucugaaaaaccccucuucccuucagcuugcuuagauguuccaaauuuaguaagcuuaaggcggccuacagaagaaaaagaaaaaaaaggccacaaaaguucccucucacuuucaguaaauaaaauaaaagcagcaacagaaauaaagaaauaaaugaaauucaaaaugaaauaaauauuguguugugcagcauuaaaaaaucaauaaaaauuaaaaaugagcaagaucuaaaaaaaaaaaaaaaaaaaaaaaaaaaaaaaaaaaaaaaaaaaaaaaaaaaaaaaaaaaaaaaaugcaucccccccccccccccccccccccccccccccaaaggcucuuuucagagccaccagaauu

SEQ ID NO: 12246 - RNA, 2331 nt, Artificial Sequence
  mRNA product Design d-3 comprising derived and/or modified sequence from HRSV(Memphis-37)__AIY60640.1__F-del (opt6)
gggagagggcgcuuggcuugcaaggacccugagcugcggcauugaagcacacccaacccaacucgacugaagucagccucacugaaccggaucugagaaucuucucucucugggcuugccagggcucuccgaaccuagcuagcauccucuucaauuccaacuagaaagcuuaccauggaacucccaauauuaaaaacuaacgcaaucacaaccauauuagcagccgucacucuaugcuuugccuccucacaaaauauaacagaagaauuuuaccaauccacaugcucagccguuagcaaaggauaucuaucagcccuaagaacaggcugguauacuucaguaauaacaauagaacuaucaaauauaaaagaaaacaaaugcaacggaaccgacgcuaaaguaaagcucauaaaacaagaauuagacaaauacaaaaaugcaguaacagaacuacaacuccuaaugcaaucaaccccagccgccaauaacagagcuagacgagaacuaccccgauucaugaauuacacacuaaacaacacaaaaaacaacaauguaacacucucaaaaaaaagaaaacgaagauucuuagguuuucuccugggaguaggaucagcaaucgcuuccggaaucgcagucaguaaaguccuucaccuugaaggcgaaguaaacaaaauaaaaaaugcacuacuaucuacaaauaaagcaguaguaucccuauccaauggcgucucaguauuaaccucaaaaguacucgaccuuaaaaauuauauagacaaacaauuacuacccauagucaauaaacaauccuguuccauaucaaacauagaaacaguaaucgaauuucaacaaaaaaacaacagauuacuagaaauaacacgcgaauuuucagucaacgccggaguaaccacacccgucucaacauacaugcuaaccaacuccgaacuacuaucacuuaucaacgacaugccaauaacaaaugaccaaaaaaaacucaugucaaacaacguacaaauaguccgccaacaaucauacucuauaaugucuauuaucaaagaagaaguucucgcauacguaguacaacuaccacuauauggugucauagacacaccauguuggaaacuccauacaucacccuuauguacaaccaauacaaaagaaggcucaaacaucugccuaacucgaacagaccgaggaugguacugcgacaaugcaggaucugucucauucuucccucaagcagaaacauguaaaguucaaucuaauagaguuuucugcgauacaaugaacucacuaacucuaccaucagaaguaaaucucuguaauauugacauauucaacccaaaauacgauugcaagaucaugacaucaaaaacugacguaucauccucagucaucaccucauuaggagcaaucguaagcuguuacgggaaaacaaaaugcaccgcuucuaacaaaaauagaggaauaauuaaaaccuucucaaacggaugcgauuacgucuccaauaaaggaguagauacaguaagcguaggaaauacucuauacuacgucaauaaacaagaaggaaaaucacuuuaugucaaaggagaacccauaauaaauuucuacgacccauuagucuucccaucagaugaauuugacgcauccauaucccaagucaacgaaaaaaucaaucaaucacuagcauucauacgaaaaucagacgaacuacuacacaacguuaacguaggaaaaucaacaaccaacaucaugauaaccacuauaauaaucgucauaauagucauccuauuauuacuaauagccguaggccuuuuccuauacuguaaagcuagauaaggacuagugaagggaacacccaaauuuaauucagccuuaagcacaauuaauuaagagugaaacguaauuguacaagcaguuggucacccaccauagggcaugaucaacaccgcaaccuuuccuuuuucccccagugauucugaaaaaccccucuucccuucagcuugcuuagauguuccaaauuuaguaagcuuaaggcggccuacagaagaaaaagaaaaaaaaggccacaaaaguucccucucacuuucaguaaauaaaauaaaagcagcaacagaaauaaagaaauaaaugaaauucaaaaugaaauaaauauuguguugugcagcauuaaaaaaucaauaaaaauuaaaaaugagcaagaucuaaaaaaaaaaaaaaaaaaaaaaaaaaaaaaaaaaaaaaaaaaaaaaaaaaaaaaaaaaaaaaaaugcaucccccccccccccccccccccccccccccccaaaggcucuuuucagagccaccagaauu

SEQ ID NO: 12247 - RNA, 2331 nt, Artificial Sequence
  mRNA product Design d-3 comprising derived and/or modified sequence from HRSV(Memphis-37)__AIY60640.1__F-del (opt11)
gggagagggcgcuuggcuugcaaggacccugagcugcggcauugaagcacacccaacccaacucgacugaagucagccucacugaaccggaucugagaaucuucucucucugggcuugccagggcucuccgaaccuagcuagcauccucuucaauuccaacuagaaagcuuaccauggaacucccgauccucaaaaccaacgccaucaccacuauccucgccgccguaacccucugcuucgccucaucccaaaacaucaccgaagaauuuuaccaauccacaugcuccgccgucuccaaagguuaccucucagcccuccgcaccggcugguacaccuccguuaucaccaucgaacuuuccaacauaaaagagaacaagugcaacggcaccgacgcaaaaguaaaacuaaucaaacaagaacuagacaaauacaaaaacgccgucaccgaacuccagcuccucaugcaaucgacgcccgccgccaacaaccgagcaaggcgcgaacuuccacgcuucaugaacuacacccucaacaacacuaaaaacaacaacgugacccuauccaaaaagcguaaacgccgauuccuagguuuccuucucggugucggcuccgccauugccuccggcaucgcuguuuccaaaguccuccaccucgaaggcgaaguaaacaagauaaaaaacgcccuccucucuacaaacaaggccgugguaucgcucucuaacggcgucucuguacucaccuccaaaguccucgaccucaaaaacuacaucgacaagcaacuccucccuaucgucaauaaacaauccugcuccauuuccaacaucgaaacagugaucgaauuucaacaaaaaaacaaccgauuacuagaaaucacccgcgaauuuucagucaacgccggcgucacaacgccagucucaaccuacaugcucaccaacucagaacucuuaucacucaucaacgacaugcccaucacuaacgaccagaaaaaacugauguccaacaacgugcaaauaguccgccaacaguccuacuccaucauguccauaaucaaggaggaggugcucgccuacguaguccaacucccccucuacggagucauugacaccccuugcuggaaacuacacaccuccccucucugcaccaccaacaccaaagaaggcagcaacaucugccuaaccaggacggaccgaggaugguacugcgacaaugcaggcuccgucagcuucuucccacaagccgaaacaugcaaaguucaaucaaaccguguauucugcgacaccaugaacucacucacccuccccucagaaguaaaccuaugcaacauagauaucuucaaccccaaauacgacugcaaaauuaugaccuccaaaaccgaugucuccagcuccguuaucacgucacucggcgccaucgucuccugcuacggcaagaccaaaugcaccgccuccaacaaaaaccgcggaauaaucaaaacauucucuaacggcugcgacuacgucuccaauaaaggcgucgacaccgucuccgugggcaacacgcuguacuacgucaacaaacaagaaggcaaaucucuuuacgucaaaggugaaccaaucaucaacuucuacgacccccucguauuccccuccgacgaauuugacgcgagcaucucccaagucaacgaaaagaucaaccaaucccucgccuucauccgaaaaagcgacgaacuccuccacaacgucaacgucggcaaaaguaccacaaacauuaugaucaccaccaucaucauagucaucaucgucauccugcuccuacuaauagccgucggccucuucuuguacugcaaggcacgaugaggacuagugaagggaacacccaaauuuaauucagccuuaagcacaauuaauuaagagugaaacguaauuguacaagcaguuggucacccaccauagggcaugaucaacaccgcaaccuuuccuuuuucccccagugauucugaaaaaccccucuucccuucagcuugcuuagauguuccaaauuuaguaagcuuaaggcggccuacagaagaaaaagaaaaaaaaggccacaaaaguucccucucacuuucaguaaauaaaauaaaagcagcaacagaaauaaagaaauaaaugaaauucaaaaugaaauaaauauuguguugugcagcauuaaaaaaucaauaaaaauuaaaaaugagcaagaucuaaaaaaaaaaaaaaaaaaaaaaaaaaaaaaaaaaaaaaaaaaaaaaaaaaaaaaaaaaaaaaaaugcaucccccccccccccccccccccccccccccccaaaggcucuuuucagagccaccagaauu

SEQ ID NO: 12248 - RNA, 2014 nt, Artificial Sequence
  mRNA product Design d-4 comprising derived and/or modified sequence from HRSV(Memphis-37)__AIY60640.1__F-del (wt)
gggagagucccgcagucggcguccagcggcucugcuuguucgugugugugucguugcaggccuuauucaagcuuaccauggaguugccaauccucaaaacaaaugcaauuaccacaauccuugcugcagucacacucuguuucgcuuccagucaaaacaucacugaagaauuuuaucaaucaacaugcagugcaguuagcaaaggcuaucuuagugcuuuaagaacugguugguauacuaguguuauaacuauagaauuaaguaauaucaaggaaaauaaguguaauggaacagaugcuaagguaaaauugauaaaacaagaauuagauaaauauaaaaaugcuguaacagaauugcaguugcucaugcaaagcacaccagcagccaacaaucgagccagaagagaacuaccaagguuuaugaauuauacacucaacaauaccaaaaauaacaauguaacauuaagcaagaaaaggaaaagaagauuucuuggcuuuuuguuagguguuggaucugcaaucgccaguggcauugcuguaucuaaaguccugcaccuagaaggggaagugaacaaaaucaaaaaugcucuacuauccacaaacaaggcuguagucagcuuaucaaauggaguuagugucuuaaccagcaaaguguuagaccucaaaaacuauauagauaaacaguuguuacccauugugaacaagcaaagcugcagcauaucaaacauugaaacugugauagaauuccaacaaaagaacaacagacuacuagagauuaccagggaauuuaguguuaaugcagguguaacuacaccuguaagcacuuauauguuaacaaauagugaauuauuaucauuaaucaaugauaugccuauaacaaaugaucagaaaaaguuaauguccaacaauguucaaauaguuagacagcaaaguuacucuaucauguccauaauaaaggaggaagucuuagcauauguaguucaauuaccacuauaugguguaauagauacaccuuguuggaaacuacacacauccccucuaugcacaaccaacacaaaggaaggguccaacaucuguuuaacaagaaccgacagaggaugguacugugacaaugcaggaucagugucuuucuucccacaagcugaaacaugcaaaguucaaucgaaucgaguauuuugugacacaaugaacagucuaacauuaccaagugaaguaaaucucugcaacauugacauauucaacccuaaauaugauugcaaaauuaugacuucaaaaacagaugugagcagcuccguuaucacaucucuaggagccauugugucaugcuauggcaaaacuaaauguacagcauccaauaaaaaucguggaaucauaaagacauuuucuaacgggugugauuauguaucaaauaaggggguggacacuguaucuguagguaauacauuauauuauguaaauaagcaagaaggaaaaagccucuauguaaaaggugaaccaauaauaaauuucuaugacccauuaguguucccuucugaugaauuugaugcaucaauaucucaagucaaugagaagauuaaccagagccuagcauuuauucguaaauccgaugaauuauuacauaauguaaauguugguaaauccaccacaaauaucaugauaacuacuauaauuauagugauuauaguaauauuguuauuauuaauugcaguugggcuguuccuauacugcaaggccagaugaggacuaguggaagcauuuuccuggcugauuaaaagaaauuacucagcuauggucaucuguuccuguuagaaggcuaugcagcauauuauauacuaugcgcauguuaugaaaugcauaauaaaaaauuuuaaaaaaucuaaaagaucuaaaaaaaaaaaaaaaaaaaaaaaaaaaaaaaaaaaaaaaaaaaaaaaaaaaaaaaaaaaaaaaaugcaucccccccccccccccccccccccccccccccaaaggcucuuuucagagccaccagaauu

SEQ ID NO: 12249 - RNA, 2014 nt, Artificial Sequence
  mRNA product Design d-4 comprising derived and/or modified sequence from HRSV(Memphis-37)__AIY60640.1__F-del (opt1)
gggagagucccgcagucggcguccagcggcucugcuuguucgugugugugucguugcaggccuuauucaagcuuaccauggagcugcccauccucaagaccaacgccaucaccacgauccuggccgcggugacccugugcuucgccagcucccagaacaucaccgaggaguucuaccagagcacgugcuccgccgucagcaagggcuaccucuccgcccugcgcaccgggugguacaccagcgugaucaccaucgagcuguccaacaucaaggagaacaagugcaacggcaccgacgccaaggugaagcucaucaagcaggagcuggacaaguacaagaacgcggucacggagcugcagcuccugaugcagagcaccccggccgccaacaaccgggcccgccgggagcugccccgcuucaugaacuacacccucaacaacaccaagaacaacaacgugacgcuguccaagaagcggaagcgccgguuccugggguuccuccugggcguggggagcgcgaucgccuccggcaucgccgucagcaaggugcugcaccucgagggcgaggugaacaagaucaagaacgcccugcuguccaccaacaaggccgucgugagccucuccaacggggugagcguccugaccuccaaggugcuggaccucaagaacuacaucgacaagcagcugcugcccaucgugaacaagcagagcugcuccaucagcaacaucgagaccgucaucgaguuccagcagaagaacaaccgccuccuggagaucacgcgggaguucagcgugaacgcgggcgugaccacccccgucuccaccuacaugcugacgaacagcgagcuccugucccugaucaacgacaugccgaucaccaacgaccagaagaagcucaugagcaacaacgugcagaucgugcgccagcaguccuacagcaucauguccaucaucaaggaggagguccuggccuacguggugcagcugccccucuacggggucaucgacacccccugcuggaagcugcacaccagcccccugugcacgaccaacaccaaggagggcuccaacaucugccucacccggacggaccgcgggugguacugcgacaacgccggcagcguguccuucuucccgcaggccgagaccugcaagguccagagcaaccggguguucugcgacaccaugaacucccugacccugcccagcgaggugaaccucugcaacaucgacaucuucaaccccaaguacgacugcaagaucaugacguccaagaccgacgucagcuccagcgugaucaccucccugggcgccaucgugagcugcuacgggaagaccaagugcacggcgagcaacaagaaccgcggcaucaucaagaccuucuccaacgggugcgacuacgucagcaacaagggcguggacaccguguccgucggcaacacccuguacuacgugaacaagcaggagggcaagagccucuacgugaagggggagcccaucaucaacuucuacgacccgcuggucuuccccuccgacgaguucgacgccagcaucucccaggugaacgagaagaucaaccagagccuggccuucauccggaaguccgacgagcuccugcacaacgugaacgucggcaagagcaccacgaacaucaugaucaccaccaucaucaucgugaucaucgugauccugcugcuccugaucgccgucgggcuguuccucuacugcaaggcccgcugaggacuaguggaagcauuuuccuggcugauuaaaagaaauuacucagcuauggucaucuguuccuguuagaaggcuaugcagcauauuauauacuaugcgcauguuaugaaaugcauaauaaaaaauuuuaaaaaaucuaaaagaucuaaaaaaaaaaaaaaaaaaaaaaaaaaaaaaaaaaaaaaaaaaaaaaaaaaaaaaaaaaaaaaaaugcaucccccccccccccccccccccccccccccccaaaggcucuuuucagagccaccagaauu

SEQ ID NO: 12250 - RNA, 2014 nt, Artificial Sequence
  mRNA product Design d-4 comprising derived and/or modified sequence from HRSV(Memphis-37)__AIY60640.1__F-del (opt2)
gggagagucccgcagucggcguccagcggcucugcuuguucgugugugugucguugcaggccuuauucaagcuuaccauggagcuccccauccucaagaccaacgccaucaccaccauccucgccgccgucacccucugcuucgccuccucccagaacaucaccgaggaguucuaccaguccaccugcuccgccgucuccaagggcuaccucuccgcccuccgcaccggcugguacaccuccgucaucaccaucgagcucuccaacaucaaggagaacaagugcaacggcaccgacgccaaggucaagcucaucaagcaggagcucgacaaguacaagaacgccgucaccgagcuccagcuccucaugcaguccacccccgccgccaacaaccgcgcccgccgcgagcucccccgcuucaugaacuacacccucaacaacaccaagaacaacaacgucacccucuccaagaagcgcaagcgccgcuuccucggcuuccuccucggcgucggcuccgccaucgccuccggcaucgccgucuccaagguccuccaccucgagggcgaggucaacaagaucaagaacgcccuccucuccaccaacaaggccgucgucucccucuccaacggcgucuccguccucaccuccaagguccucgaccucaagaacuacaucgacaagcagcuccuccccaucgucaacaagcaguccugcuccaucuccaacaucgagaccgucaucgaguuccagcagaagaacaaccgccuccucgagaucacccgcgaguucuccgucaacgccggcgucaccacccccgucuccaccuacaugcucaccaacuccgagcuccucucccucaucaacgacaugcccaucaccaacgaccagaagaagcucauguccaacaacguccagaucguccgccagcaguccuacuccaucauguccaucaucaaggaggagguccucgccuacgucguccagcucccccucuacggcgucaucgacacccccugcuggaagcuccacaccuccccccucugcaccaccaacaccaaggagggcuccaacaucugccucacccgcaccgaccgcggcugguacugcgacaacgccggcuccgucuccuucuucccccaggccgagaccugcaagguccaguccaaccgcgucuucugcgacaccaugaacucccucacccuccccuccgaggucaaccucugcaacaucgacaucuucaaccccaaguacgacugcaagaucaugaccuccaagaccgacgucuccuccuccgucaucaccucccucggcgccaucgucuccugcuacggcaagaccaagugcaccgccuccaacaagaaccgcggcaucaucaagaccuucuccaacggcugcgacuacgucuccaacaagggcgucgacaccgucuccgucggcaacacccucuacuacgucaacaagcaggagggcaagucccucuacgucaagggcgagcccaucaucaacuucuacgacccccucgucuuccccuccgacgaguucgacgccuccaucucccaggucaacgagaagaucaaccagucccucgccuucauccgcaaguccgacgagcuccuccacaacgucaacgucggcaaguccaccaccaacaucaugaucaccaccaucaucaucgucaucaucgucauccuccuccuccucaucgccgucggccucuuccucuacugcaaggcccgcugaggacuaguggaagcauuuuccuggcugauuaaaagaaauuacucagcuauggucaucuguuccuguuagaaggcuaugcagcauauuauauacuaugcgcauguuaugaaaugcauaauaaaaaauuuuaaaaaaucuaaaagaucuaaaaaaaaaaaaaaaaaaaaaaaaaaaaaaaaaaaaaaaaaaaaaaaaaaaaaaaaaaaaaaaaugcaucccccccccccccccccccccccccccccccaaaggcucuuuucagagccaccagaauu

SEQ ID NO: 12251 - RNA, 2014 nt, Artificial Sequence
  mRNA product Design d-4 comprising derived and/or modified sequence from HRSV(Memphis-37)__AIY60640.1__F-del (opt3)
gggagagucccgcagucggcguccagcggcucugcuuguucgugugugugucguugcaggccuuauucaagcuuaccauggagcugcccauccucaagaccaacgccauuacaacuauacuugcugcagugacgcugugcuucgccagcucccagaauaucaccgaagaguuuuaccaaucuacauguucagcggucaguaaaggcuauuugagcgcuuuaagaacugggugguacaccuccguuauuacaaucgaacugucuaacauuaaggagaauaaaugcaacggaaccgacgccaaggugaaacuaaucaagcaggaacucgauaaguauaaaaaugcaguaacugagcugcagcuucugaugcagucgaccccugccgcuaacaauagggcacggcgcgaguugccacgauucaugaacuacacacucaauaacacgaagaauaacaaugugacucugagcaaaaagcguaaaagaagguuucuggguuuccucuuaggcgucgggucagccauagcuaguggaaucgccguguccaagguucugcaccuugaaggcgaggugaacaagauuaaaaaugcguugcugucuaccaacaaggcagucgugagccuauccaacgguguaucaguucucacaaguaaagugcuggaccuuaagaauuauaucgauaaacaacuguugccgauugucaacaagcagagcuguucuaucuccaauauagaaacugugauugaguuucagcagaaaaacaaucggcuccuggagaucacccgcgaguucucagugaacgccggggucacaacccccguuagcacguacauguuaacuaauagugaacugcucucucuuauuaacgacaugccuaucacaaaugaucaaaagaagcugauguccaacaaugugcagaucguaagacagcagagcuauucgauuaugucuauaaucaaagaagagguguuggcuuacgucgugcaacuaccacuguacggaguuauugacacccccugcuggaagcuccauacuuccccucuguguacaaccaacacgaaagaaggcucaaauaucugccuuaccaggacagaucggggcugguauugugacaacgccgggagugugagcuuuuucccacaggcagagacuugcaagguccaguccaaucgcguguuuugugauaccaugaacucucugacauugcccagcgagguaaaccucugcaauauagacauuuucaacccuaaauacgauuguaagaucaugacuucaaagaccgacguuaguuccagcgugaucacaucucugggagcuauugucucaugcuaugguaaaaccaagugcacugccaguaauaaaaaccgaggcaucauuaagacguuuagcaaugggugugauuacguguccaacaaaggagucgacacagugucuguuggcaauaccuuauauuacgugaacaagcaagaagguaagucgcuguauguaaaaggggagccaauaaucaauuucuacgacccgcuagucuuucccagcgaugaguucgacgcguccauuucacaggugaacgaaaagaucaaucagagucucgccuucaucagaaaaucugaugaacugcuucacaacguuaaugugggaaagagcacuaccaacauuaugauaacaaccaucauuaucgucauuaucgugauauugcugcuccugaucgcaguaggccuuuuucuguacugcaaagcuaggugaggacuaguggaagcauuuuccuggcugauuaaaagaaauuacucagcuauggucaucuguuccuguuagaaggcuaugcagcauauuauauacuaugcgcauguuaugaaaugcauaauaaaaaauuuuaaaaaaucuaaaagaucuaaaaaaaaaaaaaaaaaaaaaaaaaaaaaaaaaaaaaaaaaaaaaaaaaaaaaaaaaaaaaaaaugcaucccccccccccccccccccccccccccccccaaaggcucuuuucagagccaccagaauu

SEQ ID NO: 12252 - RNA, 2014 nt, Artificial Sequence
  mRNA product Design d-4 comprising derived and/or modified sequence from HRSV(Memphis-37)__AIY60640.1__F-del (opt4)
gggagagucccgcagucggcguccagcggcucugcuuguucgugugugugucguugcaggccuuauucaagcuuaccauggagcugcccauccugaagaccaacgccaucaccaccauccuggccgccgugacccugugcuucgccagcagccagaacaucaccgaggaguucuaccagagcaccugcagcgccgugagcaagggcuaccugagcgcccugagaaccggcugguacaccagcgugaucaccaucgagcugagcaacaucaaggagaacaagugcaacggcaccgacgccaaggugaagcugaucaagcaggagcuggacaaguacaagaacgccgugaccgagcugcagcugcugaugcagagcacccccgccgccaacaacagagccagaagagagcugcccagauucaugaacuacacccugaacaacaccaagaacaacaacgugacccugagcaagaagagaaagagaagauuccugggcuuccugcugggcgugggcagcgccaucgccagcggcaucgccgugagcaaggugcugcaccuggagggcgaggugaacaagaucaagaacgcccugcugagcaccaacaaggccguggugagccugagcaacggcgugagcgugcugaccagcaaggugcuggaccugaagaacuacaucgacaagcagcugcugcccaucgugaacaagcagagcugcagcaucagcaacaucgagaccgugaucgaguuccagcagaagaacaacagacugcuggagaucaccagagaguucagcgugaacgccggcgugaccacccccgugagcaccuacaugcugaccaacagcgagcugcugagccugaucaacgacaugcccaucaccaacgaccagaagaagcugaugagcaacaacgugcagaucgugagacagcagagcuacagcaucaugagcaucaucaaggaggaggugcuggccuacguggugcagcugccccuguacggcgugaucgacacccccugcuggaagcugcacaccagcccccugugcaccaccaacaccaaggagggcagcaacaucugccugaccagaaccgacagaggcugguacugcgacaacgccggcagcgugagcuucuucccccaggccgagaccugcaaggugcagagcaacagaguguucugcgacaccaugaacagccugacccugcccagcgaggugaaccugugcaacaucgacaucuucaaccccaaguacgacugcaagaucaugaccagcaagaccgacgugagcagcagcgugaucaccagccugggcgccaucgugagcugcuacggcaagaccaagugcaccgccagcaacaagaacagaggcaucaucaagaccuucagcaacggcugcgacuacgugagcaacaagggcguggacaccgugagcgugggcaacacccuguacuacgugaacaagcaggagggcaagagccuguacgugaagggcgagcccaucaucaacuucuacgacccccugguguuccccagcgacgaguucgacgccagcaucagccaggugaacgagaagaucaaccagagccuggccuucaucagaaagagcgacgagcugcugcacaacgugaacgugggcaagagcaccaccaacaucaugaucaccaccaucaucaucgugaucaucgugauccugcugcugcugaucgccgugggccuguuccuguacugcaaggccagaugaggacuaguggaagcauuuuccuggcugauuaaaagaaauuacucagcuauggucaucuguuccuguuagaaggcuaugcagcauauuauauacuaugcgcauguuaugaaaugcauaauaaaaaauuuuaaaaaaucuaaaagaucuaaaaaaaaaaaaaaaaaaaaaaaaaaaaaaaaaaaaaaaaaaaaaaaaaaaaaaaaaaaaaaaaugcaucccccccccccccccccccccccccccccccaaaggcucuuuucagagccaccagaauu

SEQ ID NO: 12253 - RNA, 2014 nt, Artificial Sequence
  mRNA product Design d-4 comprising derived and/or modified sequence from HRSV(Memphis-37)__AIY60640.1__F-del (opt5)
gggagagucccgcagucggcguccagcggcucugcuuguucgugugugugucguugcaggccuuauucaagcuuaccauggagcugcccauccucaagaccaacgccauuacaacgauccuggcugccgugacccuuugcuucgcgagcucccagaauauuacagaagaguuuuaccaaucuaccuguagcgcugucuccaaaggcuaucugucugcccucagaacagggugguacaccagcguuaucacaauugaacuguccaacaucaaggagaauaaaugcaacggaaccgacgccaaggugaaacuuaucaagcaggaacuggauaaguauaaaaaugcugugacggagcuccagcugcugaugcagucuaccccugccgcuaacaaucgggcccgcagagagcucccgcgguucaugaacuacacacugaauaacaccaagaauaacaaugucacacuuagcaaaaagcgcaaaagacgguuucugggcuuccuccugggggugggauccgcgauugccagcggcaucgcuguuucuaaggugcuucaccuggaaggggaggucaacaagauuaaaaaugcccuccuguccaccaacaaggcugugguuagccugucuaacggaguguccguccucacgagcaaagugcuggaccuuaagaauuauaucgauaaacaacugcuccccauugugaacaagcagucuuguuccaucagcaauauugaaacagucaucgaguuucagcagaaaaacaaucgccugcuugagaucaccagagaauuuuccguuaacgccggcgugacaaccccugugucuaccuacaugcugacaaauagcgagcuccugucccugauuaacgacaugcccaucacgaaugaucaaaagaagcucaugagcaacaauguccagauugugcggcagcagucuuauuccaucaugagcauuaucaaagaagagguucuggcguacgugguccaacuuccucuguacggcgugaucgacacccccugcuggaagcuccauacaucuccucuguguaccacaaacaccaaagaagggagcaauauuugccuuacgcgcacagauagaggaugguauugugacaacgccggcuccguuucuuucuucccgcaggcugagaccugcaaggugcagagcaaucgggucuuuugugauaccaugaacucccugacacuccccagcgaggugaaccugugcaauaucgacauuuucaacccuaaauacgauuguaagaucaugaccucuaagacagacgucuccagcucugugauuacgucccugggggccaucguuagcugcuauggaaaaaccaagugcacagcuuccaauaaaaaccgcggcaucauuaagaccuuuucuaaugggugugauuacgugagcaacaaaggagucgacacaguguccguuggcaauacccucuauuacgugaacaagcaagaaggcaagucucuguaugucaaaggggagcccaucauuaauuucuacgacccucuuguguuucccagcgaugaguucgacgccuccaucagccaggugaacgaaaagauuaaucagucucuggccuucaucagaaaauccgaugaacuccugcacaacguuaaugucggaaagagcacgaccaacauuaugaucacaaccaucauuaucgugauuaucgugauucugcuucuccugaucgcugucggccuguuucucuacugcaaagcgcggugaggacuaguggaagcauuuuccuggcugauuaaaagaaauuacucagcuauggucaucuguuccuguuagaaggcuaugcagcauauuauauacuaugcgcauguuaugaaaugcauaauaaaaaauuuuaaaaaaucuaaaagaucuaaaaaaaaaaaaaaaaaaaaaaaaaaaaaaaaaaaaaaaaaaaaaaaaaaaaaaaaaaaaaaaaugcaucccccccccccccccccccccccccccccccaaaggcucuuuucagagccaccagaauu

SEQ ID NO: 12254 - RNA, 2014 nt, Artificial Sequence
  mRNA product Design d-4 comprising derived and/or modified sequence from HRSV(Memphis-37)__AIY60640.1__F-del (opt6)
gggagagucccgcagucggcguccagcggcucugcuuguucgugugugugucguugcaggccuuauucaagcuuaccauggaacucccaauauuaaaaacuaacgcaaucacaaccauauuagcagccgucacucuaugcuuugccuccucacaaaauauaacagaagaauuuuaccaauccacaugcucagccguuagcaaaggauaucuaucagcccuaagaacaggcugguauacuucaguaauaacaauagaacuaucaaauauaaaagaaaacaaaugcaacggaaccgacgcuaaaguaaagcucauaaaacaagaauuagacaaauacaaaaaugcaguaacagaacuacaacuccuaaugcaaucaaccccagccgccaauaacagagcuagacgagaacuaccccgauucaugaauuacacacuaaacaacacaaaaaacaacaauguaacacucucaaaaaaaagaaaacgaagauucuuagguuuucuccugggaguaggaucagcaaucgcuuccggaaucgcagucaguaaaguccuucaccuugaaggcgaaguaaacaaaauaaaaaaugcacuacuaucuacaaauaaagcaguaguaucccuauccaauggcgucucaguauuaaccucaaaaguacucgaccuuaaaaauuauauagacaaacaauuacuacccauagucaauaaacaauccuguuccauaucaaacauagaaacaguaaucgaauuucaacaaaaaaacaacagauuacuagaaauaacacgcgaauuuucagucaacgccggaguaaccacacccgucucaacauacaugcuaaccaacuccgaacuacuaucacuuaucaacgacaugccaauaacaaaugaccaaaaaaaacucaugucaaacaacguacaaauaguccgccaacaaucauacucuauaaugucuauuaucaaagaagaaguucucgcauacguaguacaacuaccacuauauggugucauagacacaccauguuggaaacuccauacaucacccuuauguacaaccaauacaaaagaaggcucaaacaucugccuaacucgaacagaccgaggaugguacugcgacaaugcaggaucugucucauucuucccucaagcagaaacauguaaaguucaaucuaauagaguuuucugcgauacaaugaacucacuaacucuaccaucagaaguaaaucucuguaauauugacauauucaacccaaaauacgauugcaagaucaugacaucaaaaacugacguaucauccucagucaucaccucauuaggagcaaucguaagcuguuacgggaaaacaaaaugcaccgcuucuaacaaaaauagaggaauaauuaaaaccuucucaaacggaugcgauuacgucuccaauaaaggaguagauacaguaagcguaggaaauacucuauacuacgucaauaaacaagaaggaaaaucacuuuaugucaaaggagaacccauaauaaauuucuacgacccauuagucuucccaucagaugaauuugacgcauccauaucccaagucaacgaaaaaaucaaucaaucacuagcauucauacgaaaaucagacgaacuacuacacaacguuaacguaggaaaaucaacaaccaacaucaugauaaccacuauaauaaucgucauaauagucauccuauuauuacuaauagccguaggccuuuuccuauacuguaaagcuagauaaggacuaguggaagcauuuuccuggcugauuaaaagaaauuacucagcuauggucaucuguuccuguuagaaggcuaugcagcauauuauauacuaugcgcauguuaugaaaugcauaauaaaaaauuuuaaaaaaucuaaaagaucuaaaaaaaaaaaaaaaaaaaaaaaaaaaaaaaaaaaaaaaaaaaaaaaaaaaaaaaaaaaaaaaaugcaucccccccccccccccccccccccccccccccaaaggcucuuuucagagccaccagaauu

SEQ ID NO: 12255 - RNA, 2014 nt, Artificial Sequence
  mRNA product Design d-4 comprising derived and/or modified sequence from HRSV(Memphis-37)__AIY60640.1__F-del (opt11)
gggagagucccgcagucggcguccagcggcucugcuuguucgugugugugucguugcaggccuuauucaagcuuaccauggaacucccgauccucaaaaccaacgccaucaccacuauccucgccgccguaacccucugcuucgccucaucccaaaacaucaccgaagaauuuuaccaauccacaugcuccgccgucuccaaagguuaccucucagcccuccgcaccggcugguacaccuccguuaucaccaucgaacuuuccaacauaaaagagaacaagugcaacggcaccgacgcaaaaguaaaacuaaucaaacaagaacuagacaaauacaaaaacgccgucaccgaacuccagcuccucaugcaaucgacgcccgccgccaacaaccgagcaaggcgcgaacuuccacgcuucaugaacuacacccucaacaacacuaaaaacaacaacgugacccuauccaaaaagcguaaacgccgauuccuagguuuccuucucggugucggcuccgccauugccuccggcaucgcuguuuccaaaguccuccaccucgaaggcgaaguaaacaagauaaaaaacgcccuccucucuacaaacaaggccgugguaucgcucucuaacggcgucucuguacucaccuccaaaguccucgaccucaaaaacuacaucgacaagcaacuccucccuaucgucaauaaacaauccugcuccauuuccaacaucgaaacagugaucgaauuucaacaaaaaaacaaccgauuacuagaaaucacccgcgaauuuucagucaacgccggcgucacaacgccagucucaaccuacaugcucaccaacucagaacucuuaucacucaucaacgacaugcccaucacuaacgaccagaaaaaacugauguccaacaacgugcaaauaguccgccaacaguccuacuccaucauguccauaaucaaggaggaggugcucgccuacguaguccaacucccccucuacggagucauugacaccccuugcuggaaacuacacaccuccccucucugcaccaccaacaccaaagaaggcagcaacaucugccuaaccaggacggaccgaggaugguacugcgacaaugcaggcuccgucagcuucuucccacaagccgaaacaugcaaaguucaaucaaaccguguauucugcgacaccaugaacucacucacccuccccucagaaguaaaccuaugcaacauagauaucuucaaccccaaauacgacugcaaaauuaugaccuccaaaaccgaugucuccagcuccguuaucacgucacucggcgccaucgucuccugcuacggcaagaccaaaugcaccgccuccaacaaaaaccgcggaauaaucaaaacauucucuaacggcugcgacuacgucuccaauaaaggcgucgacaccgucuccgugggcaacacgcuguacuacgucaacaaacaagaaggcaaaucucuuuacgucaaaggugaaccaaucaucaacuucuacgacccccucguauuccccuccgacgaauuugacgcgagcaucucccaagucaacgaaaagaucaaccaaucccucgccuucauccgaaaaagcgacgaacuccuccacaacgucaacgucggcaaaaguaccacaaacauuaugaucaccaccaucaucauagucaucaucgucauccugcuccuacuaauagccgucggccucuucuuguacugcaaggcacgaugaggacuaguggaagcauuuuccuggcugauuaaaagaaauuacucagcuauggucaucuguuccuguuagaaggcuaugcagcauauuauauacuaugcgcauguuaugaaaugcauaauaaaaaauuuuaaaaaaucuaaaagaucuaaaaaaaaaaaaaaaaaaaaaaaaaaaaaaaaaaaaaaaaaaaaaaaaaaaaaaaaaaaaaaaaugcaucccccccccccccccccccccccccccccccaaaggcucuuuucagagccaccagaauu

SEQ ID NO: 12256 - RNA, 2111 nt, Artificial Sequence
  mRNA product Design d-5 comprising derived and/or modified sequence from HRSV(Memphis-37)__AIY60640.1__F-del (wt)
gggagagggcgcuuggcuugcaaggacccugagcugcggcauugaagcacacccaacccaacucgacugaagucagccucacugaaccggaucugagaaucuucucucucugggcuugccagggcucuccgaaccuagcuagcauccucuucaauuccaacuagaaagcuuaccauggaguugccaauccucaaaacaaaugcaauuaccacaauccuugcugcagucacacucuguuucgcuuccagucaaaacaucacugaagaauuuuaucaaucaacaugcagugcaguuagcaaaggcuaucuuagugcuuuaagaacugguugguauacuaguguuauaacuauagaauuaaguaauaucaaggaaaauaaguguaauggaacagaugcuaagguaaaauugauaaaacaagaauuagauaaauauaaaaaugcuguaacagaauugcaguugcucaugcaaagcacaccagcagccaacaaucgagccagaagagaacuaccaagguuuaugaauuauacacucaacaauaccaaaaauaacaauguaacauuaagcaagaaaaggaaaagaagauuucuuggcuuuuuguuagguguuggaucugcaaucgccaguggcauugcuguaucuaaaguccugcaccuagaaggggaagugaacaaaaucaaaaaugcucuacuauccacaaacaaggcuguagucagcuuaucaaauggaguuagugucuuaaccagcaaaguguuagaccucaaaaacuauauagauaaacaguuguuacccauugugaacaagcaaagcugcagcauaucaaacauugaaacugugauagaauuccaacaaaagaacaacagacuacuagagauuaccagggaauuuaguguuaaugcagguguaacuacaccuguaagcacuuauauguuaacaaauagugaauuauuaucauuaaucaaugauaugccuauaacaaaugaucagaaaaaguuaauguccaacaauguucaaauaguuagacagcaaaguuacucuaucauguccauaauaaaggaggaagucuuagcauauguaguucaauuaccacuauaugguguaauagauacaccuuguuggaaacuacacacauccccucuaugcacaaccaacacaaaggaaggguccaacaucuguuuaacaagaaccgacagaggaugguacugugacaaugcaggaucagugucuuucuucccacaagcugaaacaugcaaaguucaaucgaaucgaguauuuugugacacaaugaacagucuaacauuaccaagugaaguaaaucucugcaacauugacauauucaacccuaaauaugauugcaaaauuaugacuucaaaaacagaugugagcagcuccguuaucacaucucuaggagccauugugucaugcuauggcaaaacuaaauguacagcauccaauaaaaaucguggaaucauaaagacauuuucuaacgggugugauuauguaucaaauaaggggguggacacuguaucuguagguaauacauuauauuauguaaauaagcaagaaggaaaaagccucuauguaaaaggugaaccaauaauaaauuucuaugacccauuaguguucccuucugaugaauuugaugcaucaauaucucaagucaaugagaagauuaaccagagccuagcauuuauucguaaauccgaugaauuauuacauaauguaaauguugguaaauccaccacaaauaucaugauaacuacuauaauuauagugauuauaguaauauuguuauuauuaauugcaguugggcuguuccuauacugcaaggccagaugaggacuaguggaagcauuuuccuggcugauuaaaagaaauuacucagcuauggucaucuguuccuguuagaaggcuaugcagcauauuauauacuaugcgcauguuaugaaaugcauaauaaaaaauuuuaaaaaaucuaaaagaucuaaaaaaaaaaaaaaaaaaaaaaaaaaaaaaaaaaaaaaaaaaaaaaaaaaaaaaaaaaaaaaaaugcaucccccccccccccccccccccccccccccccaaaggcucuuuucagagccaccagaauu

SEQ ID NO: 12257 - RNA, 2111 nt, Artificial Sequence
  mRNA product Design d-5 comprising derived and/or modified sequence from HRSV(Memphis-37)__AIY60640.1__F-del (opt1)
gggagagggcgcuuggcuugcaaggacccugagcugcggcauugaagcacacccaacccaacucgacugaagucagccucacugaaccggaucugagaaucuucucucucugggcuugccagggcucuccgaaccuagcuagcauccucuucaauuccaacuagaaagcuuaccauggagcugcccauccucaagaccaacgccaucaccacgauccuggccgcggugacccugugcuucgccagcucccagaacaucaccgaggaguucuaccagagcacgugcuccgccgucagcaagggcuaccucuccgcccugcgcaccgggugguacaccagcgugaucaccaucgagcuguccaacaucaaggagaacaagugcaacggcaccgacgccaaggugaagcucaucaagcaggagcuggacaaguacaagaacgcggucacggagcugcagcuccugaugcagagcaccccggccgccaacaaccgggcccgccgggagcugccccgcuucaugaacuacacccucaacaacaccaagaacaacaacgugacgcuguccaagaagcggaagcgccgguuccugggguuccuccugggcguggggagcgcgaucgccuccggcaucgccgucagcaaggugcugcaccucgagggcgaggugaacaagaucaagaacgcccugcuguccaccaacaaggccgucgugagccucuccaacggggugagcguccugaccuccaaggugcuggaccucaagaacuacaucgacaagcagcugcugcccaucgugaacaagcagagcugcuccaucagcaacaucgagaccgucaucgaguuccagcagaagaacaaccgccuccuggagaucacgcgggaguucagcgugaacgcgggcgugaccacccccgucuccaccuacaugcugacgaacagcgagcuccugucccugaucaacgacaugccgaucaccaacgaccagaagaagcucaugagcaacaacgugcagaucgugcgccagcaguccuacagcaucauguccaucaucaaggaggagguccuggccuacguggugcagcugccccucuacggggucaucgacacccccugcuggaagcugcacaccagcccccugugcacgaccaacaccaaggagggcuccaacaucugccucacccggacggaccgcgggugguacugcgacaacgccggcagcguguccuucuucccgcaggccgagaccugcaagguccagagcaaccggguguucugcgacaccaugaacucccugacccugcccagcgaggugaaccucugcaacaucgacaucuucaaccccaaguacgacugcaagaucaugacguccaagaccgacgucagcuccagcgugaucaccucccugggcgccaucgugagcugcuacgggaagaccaagugcacggcgagcaacaagaaccgcggcaucaucaagaccuucuccaacgggugcgacuacgucagcaacaagggcguggacaccguguccgucggcaacacccuguacuacgugaacaagcaggagggcaagagccucuacgugaagggggagcccaucaucaacuucuacgacccgcuggucuuccccuccgacgaguucgacgccagcaucucccaggugaacgagaagaucaaccagagccuggccuucauccggaaguccgacgagcuccugcacaacgugaacgucggcaagagcaccacgaacaucaugaucaccaccaucaucaucgugaucaucgugauccugcugcuccugaucgccgucgggcuguuccucuacugcaaggcccgcugaggacuaguggaagcauuuuccuggcugauuaaaagaaauuacucagcuauggucaucuguuccuguuagaaggcuaugcagcauauuauauacuaugcgcauguuaugaaaugcauaauaaaaaauuuuaaaaaaucuaaaagaucuaaaaaaaaaaaaaaaaaaaaaaaaaaaaaaaaaaaaaaaaaaaaaaaaaaaaaaaaaaaaaaaaugcaucccccccccccccccccccccccccccccccaaaggcucuuuucagagccaccagaauu

SEQ ID NO: 12258 - RNA, 2111 nt, Artificial Sequence
  mRNA product Design d-5 comprising derived and/or modified sequence from HRSV(Memphis-37)__AIY60640.1__F-del (opt2)
gggagagggcgcuuggcuugcaaggacccugagcugcggcauugaagcacacccaacccaacucgacugaagucagccucacugaaccggaucugagaaucuucucucucugggcuugccagggcucuccgaaccuagcuagcauccucuucaauuccaacuagaaagcuuaccauggagcuccccauccucaagaccaacgccaucaccaccauccucgccgccgucacccucugcuucgccuccucccagaacaucaccgaggaguucuaccaguccaccugcuccgccgucuccaagggcuaccucuccgcccuccgcaccggcugguacaccuccgucaucaccaucgagcucuccaacaucaaggagaacaagugcaacggcaccgacgccaaggucaagcucaucaagcaggagcucgacaaguacaagaacgccgucaccgagcuccagcuccucaugcaguccacccccgccgccaacaaccgcgcccgccgcgagcucccccgcuucaugaacuacacccucaacaacaccaagaacaacaacgucacccucuccaagaagcgcaagcgccgcuuccucggcuuccuccucggcgucggcuccgccaucgccuccggcaucgccgucuccaagguccuccaccucgagggcgaggucaacaagaucaagaacgcccuccucuccaccaacaaggccgucgucucccucuccaacggcgucuccguccucaccuccaagguccucgaccucaagaacuacaucgacaagcagcuccuccccaucgucaacaagcaguccugcuccaucuccaacaucgagaccgucaucgaguuccagcagaagaacaaccgccuccucgagaucacccgcgaguucuccgucaacgccggcgucaccacccccgucuccaccuacaugcucaccaacuccgagcuccucucccucaucaacgacaugcccaucaccaacgaccagaagaagcucauguccaacaacguccagaucguccgccagcaguccuacuccaucauguccaucaucaaggaggagguccucgccuacgucguccagcucccccucuacggcgucaucgacacccccugcuggaagcuccacaccuccccccucugcaccaccaacaccaaggagggcuccaacaucugccucacccgcaccgaccgcggcugguacugcgacaacgccggcuccgucuccuucuucccccaggccgagaccugcaagguccaguccaaccgcgucuucugcgacaccaugaacucccucacccuccccuccgaggucaaccucugcaacaucgacaucuucaaccccaaguacgacugcaagaucaugaccuccaagaccgacgucuccuccuccgucaucaccucccucggcgccaucgucuccugcuacggcaagaccaagugcaccgccuccaacaagaaccgcggcaucaucaagaccuucuccaacggcugcgacuacgucuccaacaagggcgucgacaccgucuccgucggcaacacccucuacuacgucaacaagcaggagggcaagucccucuacgucaagggcgagcccaucaucaacuucuacgacccccucgucuuccccuccgacgaguucgacgccuccaucucccaggucaacgagaagaucaaccagucccucgccuucauccgcaaguccgacgagcuccuccacaacgucaacgucggcaaguccaccaccaacaucaugaucaccaccaucaucaucgucaucaucgucauccuccuccuccucaucgccgucggccucuuccucuacugcaaggcccgcugaggacuaguggaagcauuuuccuggcugauuaaaagaaauuacucagcuauggucaucuguuccuguuagaaggcuaugcagcauauuauauacuaugcgcauguuaugaaaugcauaauaaaaaauuuuaaaaaaucuaaaagaucuaaaaaaaaaaaaaaaaaaaaaaaaaaaaaaaaaaaaaaaaaaaaaaaaaaaaaaaaaaaaaaaaugcaucccccccccccccccccccccccccccccccaaaggcucuuuucagagccaccagaauu

SEQ ID NO: 12259 - RNA, 2111 nt, Artificial Sequence
  mRNA product Design d-5 comprising derived and/or modified sequence from HRSV(Memphis-37)__AIY60640.1__F-del (opt3)
gggagagggcgcuuggcuugcaaggacccugagcugcggcauugaagcacacccaacccaacucgacugaagucagccucacugaaccggaucugagaaucuucucucucugggcuugccagggcucuccgaaccuagcuagcauccucuucaauuccaacuagaaagcuuaccauggagcugcccauccucaagaccaacgccauuacaacuauacuugcugcagugacgcugugcuucgccagcucccagaauaucaccgaagaguuuuaccaaucuacauguucagcggucaguaaaggcuauuugagcgcuuuaagaacugggugguacaccuccguuauuacaaucgaacugucuaacauuaaggagaauaaaugcaacggaaccgacgccaaggugaaacuaaucaagcaggaacucgauaaguauaaaaaugcaguaacugagcugcagcuucugaugcagucgaccccugccgcuaacaauagggcacggcgcgaguugccacgauucaugaacuacacacucaauaacacgaagaauaacaaugugacucugagcaaaaagcguaaaagaagguuucuggguuuccucuuaggcgucgggucagccauagcuaguggaaucgccguguccaagguucugcaccuugaaggcgaggugaacaagauuaaaaaugcguugcugucuaccaacaaggcagucgugagccuauccaacgguguaucaguucucacaaguaaagugcuggaccuuaagaauuauaucgauaaacaacuguugccgauugucaacaagcagagcuguucuaucuccaauauagaaacugugauugaguuucagcagaaaaacaaucggcuccuggagaucacccgcgaguucucagugaacgccggggucacaacccccguuagcacguacauguuaacuaauagugaacugcucucucuuauuaacgacaugccuaucacaaaugaucaaaagaagcugauguccaacaaugugcagaucguaagacagcagagcuauucgauuaugucuauaaucaaagaagagguguuggcuuacgucgugcaacuaccacuguacggaguuauugacacccccugcuggaagcuccauacuuccccucuguguacaaccaacacgaaagaaggcucaaauaucugccuuaccaggacagaucggggcugguauugugacaacgccgggagugugagcuuuuucccacaggcagagacuugcaagguccaguccaaucgcguguuuugugauaccaugaacucucugacauugcccagcgagguaaaccucugcaauauagacauuuucaacccuaaauacgauuguaagaucaugacuucaaagaccgacguuaguuccagcgugaucacaucucugggagcuauugucucaugcuaugguaaaaccaagugcacugccaguaauaaaaaccgaggcaucauuaagacguuuagcaaugggugugauuacguguccaacaaaggagucgacacagugucuguuggcaauaccuuauauuacgugaacaagcaagaagguaagucgcuguauguaaaaggggagccaauaaucaauuucuacgacccgcuagucuuucccagcgaugaguucgacgcguccauuucacaggugaacgaaaagaucaaucagagucucgccuucaucagaaaaucugaugaacugcuucacaacguuaaugugggaaagagcacuaccaacauuaugauaacaaccaucauuaucgucauuaucgugauauugcugcuccugaucgcaguaggccuuuuucuguacugcaaagcuaggugaggacuaguggaagcauuuuccuggcugauuaaaagaaauuacucagcuauggucaucuguuccuguuagaaggcuaugcagcauauuauauacuaugcgcauguuaugaaaugcauaauaaaaaauuuuaaaaaaucuaaaagaucuaaaaaaaaaaaaaaaaaaaaaaaaaaaaaaaaaaaaaaaaaaaaaaaaaaaaaaaaaaaaaaaaugcaucccccccccccccccccccccccccccccccaaaggcucuuuucagagccaccagaauu

SEQ ID NO: 12260 - RNA, 2111 nt, Artificial Sequence
  mRNA product Design d-5 comprising derived and/or modified sequence from HRSV(Memphis-37)__AIY60640.1__F-del (opt4)
gggagagggcgcuuggcuugcaaggacccugagcugcggcauugaagcacacccaacccaacucgacugaagucagccucacugaaccggaucugagaaucuucucucucugggcuugccagggcucuccgaaccuagcuagcauccucuucaauuccaacuagaaagcuuaccauggagcugcccauccugaagaccaacgccaucaccaccauccuggccgccgugacccugugcuucgccagcagccagaacaucaccgaggaguucuaccagagcaccugcagcgccgugagcaagggcuaccugagcgcccugagaaccggcugguacaccagcgugaucaccaucgagcugagcaacaucaaggagaacaagugcaacggcaccgacgccaaggugaagcugaucaagcaggagcuggacaaguacaagaacgccgugaccgagcugcagcugcugaugcagagcacccccgccgccaacaacagagccagaagagagcugcccagauucaugaacuacacccugaacaacaccaagaacaacaacgugacccugagcaagaagagaaagagaagauuccugggcuuccugcugggcgugggcagcgccaucgccagcggcaucgccgugagcaaggugcugcaccuggagggcgaggugaacaagaucaagaacgcccugcugagcaccaacaaggccguggugagccugagcaacggcgugagcgugcugaccagcaaggugcuggaccugaagaacuacaucgacaagcagcugcugcccaucgugaacaagcagagcugcagcaucagcaacaucgagaccgugaucgaguuccagcagaagaacaacagacugcuggagaucaccagagaguucagcgugaacgccggcgugaccacccccgugagcaccuacaugcugaccaacagcgagcugcugagccugaucaacgacaugcccaucaccaacgaccagaagaagcugaugagcaacaacgugcagaucgugagacagcagagcuacagcaucaugagcaucaucaaggaggaggugcuggccuacguggugcagcugccccuguacggcgugaucgacacccccugcuggaagcugcacaccagcccccugugcaccaccaacaccaaggagggcagcaacaucugccugaccagaaccgacagaggcugguacugcgacaacgccggcagcgugagcuucuucccccaggccgagaccugcaaggugcagagcaacagaguguucugcgacaccaugaacagccugacccugcccagcgaggugaaccugugcaacaucgacaucuucaaccccaaguacgacugcaagaucaugaccagcaagaccgacgugagcagcagcgugaucaccagccugggcgccaucgugagcugcuacggcaagaccaagugcaccgccagcaacaagaacagaggcaucaucaagaccuucagcaacggcugcgacuacgugagcaacaagggcguggacaccgugagcgugggcaacacccuguacuacgugaacaagcaggagggcaagagccuguacgugaagggcgagcccaucaucaacuucuacgacccccugguguuccccagcgacgaguucgacgccagcaucagccaggugaacgagaagaucaaccagagccuggccuucaucagaaagagcgacgagcugcugcacaacgugaacgugggcaagagcaccaccaacaucaugaucaccaccaucaucaucgugaucaucgugauccugcugcugcugaucgccgugggccuguuccuguacugcaaggccagaugaggacuaguggaagcauuuuccuggcugauuaaaagaaauuacucagcuauggucaucuguuccuguuagaaggcuaugcagcauauuauauacuaugcgcauguuaugaaaugcauaauaaaaaauuuuaaaaaaucuaaaagaucuaaaaaaaaaaaaaaaaaaaaaaaaaaaaaaaaaaaaaaaaaaaaaaaaaaaaaaaaaaaaaaaaugcaucccccccccccccccccccccccccccccccaaaggcucuuuucagagccaccagaauu

SEQ ID NO: 12261 - RNA, 2111 nt, Artificial Sequence
  mRNA product Design d-5 comprising derived and/or modified sequence from HRSV(Memphis-37)__AIY60640.1__F-del (opt5)
gggagagggcgcuuggcuugcaaggacccugagcugcggcauugaagcacacccaacccaacucgacugaagucagccucacugaaccggaucugagaaucuucucucucugggcuugccagggcucuccgaaccuagcuagcauccucuucaauuccaacuagaaagcuuaccauggagcugcccauccucaagaccaacgccauuacaacgauccuggcugccgugacccuuugcuucgcgagcucccagaauauuacagaagaguuuuaccaaucuaccuguagcgcugucuccaaaggcuaucugucugcccucagaacagggugguacaccagcguuaucacaauugaacuguccaacaucaaggagaauaaaugcaacggaaccgacgccaaggugaaacuuaucaagcaggaacuggauaaguauaaaaaugcugugacggagcuccagcugcugaugcagucuaccccugccgcuaacaaucgggcccgcagagagcucccgcgguucaugaacuacacacugaauaacaccaagaauaacaaugucacacuuagcaaaaagcgcaaaagacgguuucugggcuuccuccugggggugggauccgcgauugccagcggcaucgcuguuucuaaggugcuucaccuggaaggggaggucaacaagauuaaaaaugcccuccuguccaccaacaaggcugugguuagccugucuaacggaguguccguccucacgagcaaagugcuggaccuuaagaauuauaucgauaaacaacugcuccccauugugaacaagcagucuuguuccaucagcaauauugaaacagucaucgaguuucagcagaaaaacaaucgccugcuugagaucaccagagaauuuuccguuaacgccggcgugacaaccccugugucuaccuacaugcugacaaauagcgagcuccugucccugauuaacgacaugcccaucacgaaugaucaaaagaagcucaugagcaacaauguccagauugugcggcagcagucuuauuccaucaugagcauuaucaaagaagagguucuggcguacgugguccaacuuccucuguacggcgugaucgacacccccugcuggaagcuccauacaucuccucuguguaccacaaacaccaaagaagggagcaauauuugccuuacgcgcacagauagaggaugguauugugacaacgccggcuccguuucuuucuucccgcaggcugagaccugcaaggugcagagcaaucgggucuuuugugauaccaugaacucccugacacuccccagcgaggugaaccugugcaauaucgacauuuucaacccuaaauacgauuguaagaucaugaccucuaagacagacgucuccagcucugugauuacgucccugggggccaucguuagcugcuauggaaaaaccaagugcacagcuuccaauaaaaaccgcggcaucauuaagaccuuuucuaaugggugugauuacgugagcaacaaaggagucgacacaguguccguuggcaauacccucuauuacgugaacaagcaagaaggcaagucucuguaugucaaaggggagcccaucauuaauuucuacgacccucuuguguuucccagcgaugaguucgacgccuccaucagccaggugaacgaaaagauuaaucagucucuggccuucaucagaaaauccgaugaacuccugcacaacguuaaugucggaaagagcacgaccaacauuaugaucacaaccaucauuaucgugauuaucgugauucugcuucuccugaucgcugucggccuguuucucuacugcaaagcgcggugaggacuaguggaagcauuuuccuggcugauuaaaagaaauuacucagcuauggucaucuguuccuguuagaaggcuaugcagcauauuauauacuaugcgcauguuaugaaaugcauaauaaaaaauuuuaaaaaaucuaaaagaucuaaaaaaaaaaaaaaaaaaaaaaaaaaaaaaaaaaaaaaaaaaaaaaaaaaaaaaaaaaaaaaaaugcaucccccccccccccccccccccccccccccccaaaggcucuuuucagagccaccagaauu

SEQ ID NO: 12262 - RNA, 2111 nt, Artificial Sequence
  mRNA product Design d-5 comprising derived and/or modified sequence from HRSV(Memphis-37)__AIY60640.1__F-del (opt6)
gggagagggcgcuuggcuugcaaggacccugagcugcggcauugaagcacacccaacccaacucgacugaagucagccucacugaaccggaucugagaaucuucucucucugggcuugccagggcucuccgaaccuagcuagcauccucuucaauuccaacuagaaagcuuaccauggaacucccaauauuaaaaacuaacgcaaucacaaccauauuagcagccgucacucuaugcuuugccuccucacaaaauauaacagaagaauuuuaccaauccacaugcucagccguuagcaaaggauaucuaucagcccuaagaacaggcugguauacuucaguaauaacaauagaacuaucaaauauaaaagaaaacaaaugcaacggaaccgacgcuaaaguaaagcucauaaaacaagaauuagacaaauacaaaaaugcaguaacagaacuacaacuccuaaugcaaucaaccccagccgccaauaacagagcuagacgagaacuaccccgauucaugaauuacacacuaaacaacacaaaaaacaacaauguaacacucucaaaaaaaagaaaacgaagauucuuagguuuucuccugggaguaggaucagcaaucgcuuccggaaucgcagucaguaaaguccuucaccuugaaggcgaaguaaacaaaauaaaaaaugcacuacuaucuacaaauaaagcaguaguaucccuauccaauggcgucucaguauuaaccucaaaaguacucgaccuuaaaaauuauauagacaaacaauuacuacccauagucaauaaacaauccuguuccauaucaaacauagaaacaguaaucgaauuucaacaaaaaaacaacagauuacuagaaauaacacgcgaauuuucagucaacgccggaguaaccacacccgucucaacauacaugcuaaccaacuccgaacuacuaucacuuaucaacgacaugccaauaacaaaugaccaaaaaaaacucaugucaaacaacguacaaauaguccgccaacaaucauacucuauaaugucuauuaucaaagaagaaguucucgcauacguaguacaacuaccacuauauggugucauagacacaccauguuggaaacuccauacaucacccuuauguacaaccaauacaaaagaaggcucaaacaucugccuaacucgaacagaccgaggaugguacugcgacaaugcaggaucugucucauucuucccucaagcagaaacauguaaaguucaaucuaauagaguuuucugcgauacaaugaacucacuaacucuaccaucagaaguaaaucucuguaauauugacauauucaacccaaaauacgauugcaagaucaugacaucaaaaacugacguaucauccucagucaucaccucauuaggagcaaucguaagcuguuacgggaaaacaaaaugcaccgcuucuaacaaaaauagaggaauaauuaaaaccuucucaaacggaugcgauuacgucuccaauaaaggaguagauacaguaagcguaggaaauacucuauacuacgucaauaaacaagaaggaaaaucacuuuaugucaaaggagaacccauaauaaauuucuacgacccauuagucuucccaucagaugaauuugacgcauccauaucccaagucaacgaaaaaaucaaucaaucacuagcauucauacgaaaaucagacgaacuacuacacaacguuaacguaggaaaaucaacaaccaacaucaugauaaccacuauaauaaucgucauaauagucauccuauuauuacuaauagccguaggccuuuuccuauacuguaaagcuagauaaggacuaguggaagcauuuuccuggcugauuaaaagaaauuacucagcuauggucaucuguuccuguuagaaggcuaugcagcauauuauauacuaugcgcauguuaugaaaugcauaauaaaaaauuuuaaaaaaucuaaaagaucuaaaaaaaaaaaaaaaaaaaaaaaaaaaaaaaaaaaaaaaaaaaaaaaaaaaaaaaaaaaaaaaaugcaucccccccccccccccccccccccccccccccaaaggcucuuuucagagccaccagaauu

SEQ ID NO: 12263 - RNA, 2111 nt, Artificial Sequence
  mRNA product Design d-5 comprising derived and/or modified sequence from HRSV(Memphis-37)__AIY60640.1__F-del (opt11)
gggagagggcgcuuggcuugcaaggacccugagcugcggcauugaagcacacccaacccaacucgacugaagucagccucacugaaccggaucugagaaucuucucucucugggcuugccagggcucuccgaaccuagcuagcauccucuucaauuccaacuagaaagcuuaccauggaacucccgauccucaaaaccaacgccaucaccacuauccucgccgccguaacccucugcuucgccucaucccaaaacaucaccgaagaauuuuaccaauccacaugcuccgccgucuccaaagguuaccucucagcccuccgcaccggcugguacaccuccguuaucaccaucgaacuuuccaacauaaaagagaacaagugcaacggcaccgacgcaaaaguaaaacuaaucaaacaagaacuagacaaauacaaaaacgccgucaccgaacuccagcuccucaugcaaucgacgcccgccgccaacaaccgagcaaggcgcgaacuuccacgcuucaugaacuacacccucaacaacacuaaaaacaacaacgugacccuauccaaaaagcguaaacgccgauuccuagguuuccuucucggugucggcuccgccauugccuccggcaucgcuguuuccaaaguccuccaccucgaaggcgaaguaaacaagauaaaaaacgcccuccucucuacaaacaaggccgugguaucgcucucuaacggcgucucuguacucaccuccaaaguccucgaccucaaaaacuacaucgacaagcaacuccucccuaucgucaauaaacaauccugcuccauuuccaacaucgaaacagugaucgaauuucaacaaaaaaacaaccgauuacuagaaaucacccgcgaauuuucagucaacgccggcgucacaacgccagucucaaccuacaugcucaccaacucagaacucuuaucacucaucaacgacaugcccaucacuaacgaccagaaaaaacugauguccaacaacgugcaaauaguccgccaacaguccuacuccaucauguccauaaucaaggaggaggugcucgccuacguaguccaacucccccucuacggagucauugacaccccuugcuggaaacuacacaccuccccucucugcaccaccaacaccaaagaaggcagcaacaucugccuaaccaggacggaccgaggaugguacugcgacaaugcaggcuccgucagcuucuucccacaagccgaaacaugcaaaguucaaucaaaccguguauucugcgacaccaugaacucacucacccuccccucagaaguaaaccuaugcaacauagauaucuucaaccccaaauacgacugcaaaauuaugaccuccaaaaccgaugucuccagcuccguuaucacgucacucggcgccaucgucuccugcuacggcaagaccaaaugcaccgccuccaacaaaaaccgcggaauaaucaaaacauucucuaacggcugcgacuacgucuccaauaaaggcgucgacaccgucuccgugggcaacacgcuguacuacgucaacaaacaagaaggcaaaucucuuuacgucaaaggugaaccaaucaucaacuucuacgacccccucguauuccccuccgacgaauuugacgcgagcaucucccaagucaacgaaaagaucaaccaaucccucgccuucauccgaaaaagcgacgaacuccuccacaacgucaacgucggcaaaaguaccacaaacauuaugaucaccaccaucaucauagucaucaucgucauccugcuccuacuaauagccgucggccucuucuuguacugcaaggcacgaugaggacuaguggaagcauuuuccuggcugauuaaaagaaauuacucagcuauggucaucuguuccuguuagaaggcuaugcagcauauuauauacuaugcgcauguuaugaaaugcauaauaaaaaauuuuaaaaaaucuaaaagaucuaaaaaaaaaaaaaaaaaaaaaaaaaaaaaaaaaaaaaaaaaaaaaaaaaaaaaaaaaaaaaaaaugcaucccccccccccccccccccccccccccccccaaaggcucuuuucagagccaccagaauu

SEQ ID NO: 12264 - RNA, 1991 nt, Artificial Sequence
  mRNA product Design e-1 comprising derived and/or modified sequence from HRSV(Memphis-37)__AIY60640.1__F-del (wt)
gggagaauauaagcguuggcggagcgucgguuguagcacucugcgcgcccgcucuucugcugcuguuugucuacuuccuccugcuuccccgccgccgccgccgccaucaagcuuaccauggaguugccaauccucaaaacaaaugcaauuaccacaauccuugcugcagucacacucuguuucgcuuccagucaaaacaucacugaagaauuuuaucaaucaacaugcagugcaguuagcaaaggcuaucuuagugcuuuaagaacugguugguauacuaguguuauaacuauagaauuaaguaauaucaaggaaaauaaguguaauggaacagaugcuaagguaaaauugauaaaacaagaauuagauaaauauaaaaaugcuguaacagaauugcaguugcucaugcaaagcacaccagcagccaacaaucgagccagaagagaacuaccaagguuuaugaauuauacacucaacaauaccaaaaauaacaauguaacauuaagcaagaaaaggaaaagaagauuucuuggcuuuuuguuagguguuggaucugcaaucgccaguggcauugcuguaucuaaaguccugcaccuagaaggggaagugaacaaaaucaaaaaugcucuacuauccacaaacaaggcuguagucagcuuaucaaauggaguuagugucuuaaccagcaaaguguuagaccucaaaaacuauauagauaaacaguuguuacccauugugaacaagcaaagcugcagcauaucaaacauugaaacugugauagaauuccaacaaaagaacaacagacuacuagagauuaccagggaauuuaguguuaaugcagguguaacuacaccuguaagcacuuauauguuaacaaauagugaauuauuaucauuaaucaaugauaugccuauaacaaaugaucagaaaaaguuaauguccaacaauguucaaauaguuagacagcaaaguuacucuaucauguccauaauaaaggaggaagucuuagcauauguaguucaauuaccacuauaugguguaauagauacaccuuguuggaaacuacacacauccccucuaugcacaaccaacacaaaggaaggguccaacaucuguuuaacaagaaccgacagaggaugguacugugacaaugcaggaucagugucuuucuucccacaagcugaaacaugcaaaguucaaucgaaucgaguauuuugugacacaaugaacagucuaacauuaccaagugaaguaaaucucugcaacauugacauauucaacccuaaauaugauugcaaaauuaugacuucaaaaacagaugugagcagcuccguuaucacaucucuaggagccauugugucaugcuauggcaaaacuaaauguacagcauccaauaaaaaucguggaaucauaaagacauuuucuaacgggugugauuauguaucaaauaaggggguggacacuguaucuguagguaauacauuauauuauguaaauaagcaagaaggaaaaagccucuauguaaaaggugaaccaauaauaaauuucuaugacccauuaguguucccuucugaugaauuugaugcaucaauaucucaagucaaugagaagauuaaccagagccuagcauuuauucguaaauccgaugaauuauuacauaauguaaauguugguaaauccaccacaaauaucaugauaacuacuauaauuauagugauuauaguaauauuguuauuauuaauugcaguugggcuguuccuauacugcaaggccagaugaggacuaguguccaccugucccuccugggcugcuggauugucucguuuuccugccaaauaaacaggaucagcgcuuuacagaucuaaaaaaaaaaaaaaaaaaaaaaaaaaaaaaaaaaaaaaaaaaaaaaaaaaaaaaaaaaaaaaaaugcaucccccccccccccccccccccccccccccccaaaggcucuuuucagagccaccagaauu

SEQ ID NO: 12265 - RNA, 1991 nt, Artificial Sequence
  mRNA product Design e-1 comprising derived and/or modified sequence from HRSV(Memphis-37)__AIY60640.1__F-del (opt1)
gggagaauauaagcguuggcggagcgucgguuguagcacucugcgcgcccgcucuucugcugcuguuugucuacuuccuccugcuuccccgccgccgccgccgccaucaagcuuaccauggagcugcccauccucaagaccaacgccaucaccacgauccuggccgcggugacccugugcuucgccagcucccagaacaucaccgaggaguucuaccagagcacgugcuccgccgucagcaagggcuaccucuccgcccugcgcaccgggugguacaccagcgugaucaccaucgagcuguccaacaucaaggagaacaagugcaacggcaccgacgccaaggugaagcucaucaagcaggagcuggacaaguacaagaacgcggucacggagcugcagcuccugaugcagagcaccccggccgccaacaaccgggcccgccgggagcugccccgcuucaugaacuacacccucaacaacaccaagaacaacaacgugacgcuguccaagaagcggaagcgccgguuccugggguuccuccugggcguggggagcgcgaucgccuccggcaucgccgucagcaaggugcugcaccucgagggcgaggugaacaagaucaagaacgcccugcuguccaccaacaaggccgucgugagccucuccaacggggugagcguccugaccuccaaggugcuggaccucaagaacuacaucgacaagcagcugcugcccaucgugaacaagcagagcugcuccaucagcaacaucgagaccgucaucgaguuccagcagaagaacaaccgccuccuggagaucacgcgggaguucagcgugaacgcgggcgugaccacccccgucuccaccuacaugcugacgaacagcgagcuccugucccugaucaacgacaugccgaucaccaacgaccagaagaagcucaugagcaacaacgugcagaucgugcgccagcaguccuacagcaucauguccaucaucaaggaggagguccuggccuacguggugcagcugccccucuacggggucaucgacacccccugcuggaagcugcacaccagcccccugugcacgaccaacaccaaggagggcuccaacaucugccucacccggacggaccgcgggugguacugcgacaacgccggcagcguguccuucuucccgcaggccgagaccugcaagguccagagcaaccggguguucugcgacaccaugaacucccugacccugcccagcgaggugaaccucugcaacaucgacaucuucaaccccaaguacgacugcaagaucaugacguccaagaccgacgucagcuccagcgugaucaccucccugggcgccaucgugagcugcuacgggaagaccaagugcacggcgagcaacaagaaccgcggcaucaucaagaccuucuccaacgggugcgacuacgucagcaacaagggcguggacaccguguccgucggcaacacccuguacuacgugaacaagcaggagggcaagagccucuacgugaagggggagcccaucaucaacuucuacgacccgcuggucuuccccuccgacgaguucgacgccagcaucucccaggugaacgagaagaucaaccagagccuggccuucauccggaaguccgacgagcuccugcacaacgugaacgucggcaagagcaccacgaacaucaugaucaccaccaucaucaucgugaucaucgugauccugcugcuccugaucgccgucgggcuguuccucuacugcaaggcccgcugaggacuaguguccaccugucccuccugggcugcuggauugucucguuuuccugccaaauaaacaggaucagcgcuuuacagaucuaaaaaaaaaaaaaaaaaaaaaaaaaaaaaaaaaaaaaaaaaaaaaaaaaaaaaaaaaaaaaaaaugcaucccccccccccccccccccccccccccccccaaaggcucuuuucagagccaccagaauu

SEQ ID NO: 12266 - RNA, 1991 nt, Artificial Sequence
  mRNA product Design e-1 comprising derived and/or modified sequence from HRSV(Memphis-37)__AIY60640.1__F-del (opt2)
gggagaauauaagcguuggcggagcgucgguuguagcacucugcgcgcccgcucuucugcugcuguuugucuacuuccuccugcuuccccgccgccgccgccgccaucaagcuuaccauggagcuccccauccucaagaccaacgccaucaccaccauccucgccgccgucacccucugcuucgccuccucccagaacaucaccgaggaguucuaccaguccaccugcuccgccgucuccaagggcuaccucuccgcccuccgcaccggcugguacaccuccgucaucaccaucgagcucuccaacaucaaggagaacaagugcaacggcaccgacgccaaggucaagcucaucaagcaggagcucgacaaguacaagaacgccgucaccgagcuccagcuccucaugcaguccacccccgccgccaacaaccgcgcccgccgcgagcucccccgcuucaugaacuacacccucaacaacaccaagaacaacaacgucacccucuccaagaagcgcaagcgccgcuuccucggcuuccuccucggcgucggcuccgccaucgccuccggcaucgccgucuccaagguccuccaccucgagggcgaggucaacaagaucaagaacgcccuccucuccaccaacaaggccgucgucucccucuccaacggcgucuccguccucaccuccaagguccucgaccucaagaacuacaucgacaagcagcuccuccccaucgucaacaagcaguccugcuccaucuccaacaucgagaccgucaucgaguuccagcagaagaacaaccgccuccucgagaucacccgcgaguucuccgucaacgccggcgucaccacccccgucuccaccuacaugcucaccaacuccgagcuccucucccucaucaacgacaugcccaucaccaacgaccagaagaagcucauguccaacaacguccagaucguccgccagcaguccuacuccaucauguccaucaucaaggaggagguccucgccuacgucguccagcucccccucuacggcgucaucgacacccccugcuggaagcuccacaccuccccccucugcaccaccaacaccaaggagggcuccaacaucugccucacccgcaccgaccgcggcugguacugcgacaacgccggcuccgucuccuucuucccccaggccgagaccugcaagguccaguccaaccgcgucuucugcgacaccaugaacucccucacccuccccuccgaggucaaccucugcaacaucgacaucuucaaccccaaguacgacugcaagaucaugaccuccaagaccgacgucuccuccuccgucaucaccucccucggcgccaucgucuccugcuacggcaagaccaagugcaccgccuccaacaagaaccgcggcaucaucaagaccuucuccaacggcugcgacuacgucuccaacaagggcgucgacaccgucuccgucggcaacacccucuacuacgucaacaagcaggagggcaagucccucuacgucaagggcgagcccaucaucaacuucuacgacccccucgucuuccccuccgacgaguucgacgccuccaucucccaggucaacgagaagaucaaccagucccucgccuucauccgcaaguccgacgagcuccuccacaacgucaacgucggcaaguccaccaccaacaucaugaucaccaccaucaucaucgucaucaucgucauccuccuccuccucaucgccgucggccucuuccucuacugcaaggcccgcugaggacuaguguccaccugucccuccugggcugcuggauugucucguuuuccugccaaauaaacaggaucagcgcuuuacagaucuaaaaaaaaaaaaaaaaaaaaaaaaaaaaaaaaaaaaaaaaaaaaaaaaaaaaaaaaaaaaaaaaugcaucccccccccccccccccccccccccccccccaaaggcucuuuucagagccaccagaauu

SEQ ID NO: 12267 - RNA, 1991 nt, Artificial Sequence
  mRNA product Design e-1 comprising derived and/or modified sequence from HRSV(Memphis-37)__AIY60640.1__F-del (opt3)
gggagaauauaagcguuggcggagcgucgguuguagcacucugcgcgcccgcucuucugcugcuguuugucuacuuccuccugcuuccccgccgccgccgccgccaucaagcuuaccauggagcugcccauccucaagaccaacgccauuacaacuauacuugcugcagugacgcugugcuucgccagcucccagaauaucaccgaagaguuuuaccaaucuacauguucagcggucaguaaaggcuauuugagcgcuuuaagaacugggugguacaccuccguuauuacaaucgaacugucuaacauuaaggagaauaaaugcaacggaaccgacgccaaggugaaacuaaucaagcaggaacucgauaaguauaaaaaugcaguaacugagcugcagcuucugaugcagucgaccccugccgcuaacaauagggcacggcgcgaguugccacgauucaugaacuacacacucaauaacacgaagaauaacaaugugacucugagcaaaaagcguaaaagaagguuucuggguuuccucuuaggcgucgggucagccauagcuaguggaaucgccguguccaagguucugcaccuugaaggcgaggugaacaagauuaaaaaugcguugcugucuaccaacaaggcagucgugagccuauccaacgguguaucaguucucacaaguaaagugcuggaccuuaagaauuauaucgauaaacaacuguugccgauugucaacaagcagagcuguucuaucuccaauauagaaacugugauugaguuucagcagaaaaacaaucggcuccuggagaucacccgcgaguucucagugaacgccggggucacaacccccguuagcacguacauguuaacuaauagugaacugcucucucuuauuaacgacaugccuaucacaaaugaucaaaagaagcugauguccaacaaugugcagaucguaagacagcagagcuauucgauuaugucuauaaucaaagaagagguguuggcuuacgucgugcaacuaccacuguacggaguuauugacacccccugcuggaagcuccauacuuccccucuguguacaaccaacacgaaagaaggcucaaauaucugccuuaccaggacagaucggggcugguauugugacaacgccgggagugugagcuuuuucccacaggcagagacuugcaagguccaguccaaucgcguguuuugugauaccaugaacucucugacauugcccagcgagguaaaccucugcaauauagacauuuucaacccuaaauacgauuguaagaucaugacuucaaagaccgacguuaguuccagcgugaucacaucucugggagcuauugucucaugcuaugguaaaaccaagugcacugccaguaauaaaaaccgaggcaucauuaagacguuuagcaaugggugugauuacguguccaacaaaggagucgacacagugucuguuggcaauaccuuauauuacgugaacaagcaagaagguaagucgcuguauguaaaaggggagccaauaaucaauuucuacgacccgcuagucuuucccagcgaugaguucgacgcguccauuucacaggugaacgaaaagaucaaucagagucucgccuucaucagaaaaucugaugaacugcuucacaacguuaaugugggaaagagcacuaccaacauuaugauaacaaccaucauuaucgucauuaucgugauauugcugcuccugaucgcaguaggccuuuuucuguacugcaaagcuaggugaggacuaguguccaccugucccuccugggcugcuggauugucucguuuuccugccaaauaaacaggaucagcgcuuuacagaucuaaaaaaaaaaaaaaaaaaaaaaaaaaaaaaaaaaaaaaaaaaaaaaaaaaaaaaaaaaaaaaaaugcaucccccccccccccccccccccccccccccccaaaggcucuuuucagagccaccagaauu

SEQ ID NO: 12268 - RNA, 1991 nt, Artificial Sequence
  mRNA product Design e-1 comprising derived and/or modified sequence from HRSV(Memphis-37)__AIY60640.1__F-del (opt4)
gggagaauauaagcguuggcggagcgucgguuguagcacucugcgcgcccgcucuucugcugcuguuugucuacuuccuccugcuuccccgccgccgccgccgccaucaagcuuaccauggagcugcccauccugaagaccaacgccaucaccaccauccuggccgccgugacccugugcuucgccagcagccagaacaucaccgaggaguucuaccagagcaccugcagcgccgugagcaagggcuaccugagcgcccugagaaccggcugguacaccagcgugaucaccaucgagcugagcaacaucaaggagaacaagugcaacggcaccgacgccaaggugaagcugaucaagcaggagcuggacaaguacaagaacgccgugaccgagcugcagcugcugaugcagagcacccccgccgccaacaacagagccagaagagagcugcccagauucaugaacuacacccugaacaacaccaagaacaacaacgugacccugagcaagaagagaaagagaagauuccugggcuuccugcugggcgugggcagcgccaucgccagcggcaucgccgugagcaaggugcugcaccuggagggcgaggugaacaagaucaagaacgcccugcugagcaccaacaaggccguggugagccugagcaacggcgugagcgugcugaccagcaaggugcuggaccugaagaacuacaucgacaagcagcugcugcccaucgugaacaagcagagcugcagcaucagcaacaucgagaccgugaucgaguuccagcagaagaacaacagacugcuggagaucaccagagaguucagcgugaacgccggcgugaccacccccgugagcaccuacaugcugaccaacagcgagcugcugagccugaucaacgacaugcccaucaccaacgaccagaagaagcugaugagcaacaacgugcagaucgugagacagcagagcuacagcaucaugagcaucaucaaggaggaggugcuggccuacguggugcagcugccccuguacggcgugaucgacacccccugcuggaagcugcacaccagcccccugugcaccaccaacaccaaggagggcagcaacaucugccugaccagaaccgacagaggcugguacugcgacaacgccggcagcgugagcuucuucccccaggccgagaccugcaaggugcagagcaacagaguguucugcgacaccaugaacagccugacccugcccagcgaggugaaccugugcaacaucgacaucuucaaccccaaguacgacugcaagaucaugaccagcaagaccgacgugagcagcagcgugaucaccagccugggcgccaucgugagcugcuacggcaagaccaagugcaccgccagcaacaagaacagaggcaucaucaagaccuucagcaacggcugcgacuacgugagcaacaagggcguggacaccgugagcgugggcaacacccuguacuacgugaacaagcaggagggcaagagccuguacgugaagggcgagcccaucaucaacuucuacgacccccugguguuccccagcgacgaguucgacgccagcaucagccaggugaacgagaagaucaaccagagccuggccuucaucagaaagagcgacgagcugcugcacaacgugaacgugggcaagagcaccaccaacaucaugaucaccaccaucaucaucgugaucaucgugauccugcugcugcugaucgccgugggccuguuccuguacugcaaggccagaugaggacuaguguccaccugucccuccugggcugcuggauugucucguuuuccugccaaauaaacaggaucagcgcuuuacagaucuaaaaaaaaaaaaaaaaaaaaaaaaaaaaaaaaaaaaaaaaaaaaaaaaaaaaaaaaaaaaaaaaugcaucccccccccccccccccccccccccccccccaaaggcucuuuucagagccaccagaauu

SEQ ID NO: 12269 - RNA, 1991 nt, Artificial Sequence
  mRNA product Design e-1 comprising derived and/or modified sequence from HRSV(Memphis-37)__AIY60640.1__F-del (opt5)
gggagaauauaagcguuggcggagcgucgguuguagcacucugcgcgcccgcucuucugcugcuguuugucuacuuccuccugcuuccccgccgccgccgccgccaucaagcuuaccauggagcugcccauccucaagaccaacgccauuacaacgauccuggcugccgugacccuuugcuucgcgagcucccagaauauuacagaagaguuuuaccaaucuaccuguagcgcugucuccaaaggcuaucugucugcccucagaacagggugguacaccagcguuaucacaauugaacuguccaacaucaaggagaauaaaugcaacggaaccgacgccaaggugaaacuuaucaagcaggaacuggauaaguauaaaaaugcugugacggagcuccagcugcugaugcagucuaccccugccgcuaacaaucgggcccgcagagagcucccgcgguucaugaacuacacacugaauaacaccaagaauaacaaugucacacuuagcaaaaagcgcaaaagacgguuucugggcuuccuccugggggugggauccgcgauugccagcggcaucgcuguuucuaaggugcuucaccuggaaggggaggucaacaagauuaaaaaugcccuccuguccaccaacaaggcugugguuagccugucuaacggaguguccguccucacgagcaaagugcuggaccuuaagaauuauaucgauaaacaacugcuccccauugugaacaagcagucuuguuccaucagcaauauugaaacagucaucgaguuucagcagaaaaacaaucgccugcuugagaucaccagagaauuuuccguuaacgccggcgugacaaccccugugucuaccuacaugcugacaaauagcgagcuccugucccugauuaacgacaugcccaucacgaaugaucaaaagaagcucaugagcaacaauguccagauugugcggcagcagucuuauuccaucaugagcauuaucaaagaagagguucuggcguacgugguccaacuuccucuguacggcgugaucgacacccccugcuggaagcuccauacaucuccucuguguaccacaaacaccaaagaagggagcaauauuugccuuacgcgcacagauagaggaugguauugugacaacgccggcuccguuucuuucuucccgcaggcugagaccugcaaggugcagagcaaucgggucuuuugugauaccaugaacucccugacacuccccagcgaggugaaccugugcaauaucgacauuuucaacccuaaauacgauuguaagaucaugaccucuaagacagacgucuccagcucugugauuacgucccugggggccaucguuagcugcuauggaaaaaccaagugcacagcuuccaauaaaaaccgcggcaucauuaagaccuuuucuaaugggugugauuacgugagcaacaaaggagucgacacaguguccguuggcaauacccucuauuacgugaacaagcaagaaggcaagucucuguaugucaaaggggagcccaucauuaauuucuacgacccucuuguguuucccagcgaugaguucgacgccuccaucagccaggugaacgaaaagauuaaucagucucuggccuucaucagaaaauccgaugaacuccugcacaacguuaaugucggaaagagcacgaccaacauuaugaucacaaccaucauuaucgugauuaucgugauucugcuucuccugaucgcugucggccuguuucucuacugcaaagcgcggugaggacuaguguccaccugucccuccugggcugcuggauugucucguuuuccugccaaauaaacaggaucagcgcuuuacagaucuaaaaaaaaaaaaaaaaaaaaaaaaaaaaaaaaaaaaaaaaaaaaaaaaaaaaaaaaaaaaaaaaugcaucccccccccccccccccccccccccccccccaaaggcucuuuucagagccaccagaauu

SEQ ID NO: 12270 - RNA, 1991 nt, Artificial Sequence
  mRNA product Design e-1 comprising derived and/or modified sequence from HRSV(Memphis-37)__AIY60640.1__F-del (opt6)
gggagaauauaagcguuggcggagcgucgguuguagcacucugcgcgcccgcucuucugcugcuguuugucuacuuccuccugcuuccccgccgccgccgccgccaucaagcuuaccauggaacucccaauauuaaaaacuaacgcaaucacaaccauauuagcagccgucacucuaugcuuugccuccucacaaaauauaacagaagaauuuuaccaauccacaugcucagccguuagcaaaggauaucuaucagcccuaagaacaggcugguauacuucaguaauaacaauagaacuaucaaauauaaaagaaaacaaaugcaacggaaccgacgcuaaaguaaagcucauaaaacaagaauuagacaaauacaaaaaugcaguaacagaacuacaacuccuaaugcaaucaaccccagccgccaauaacagagcuagacgagaacuaccccgauucaugaauuacacacuaaacaacacaaaaaacaacaauguaacacucucaaaaaaaagaaaacgaagauucuuagguuuucuccugggaguaggaucagcaaucgcuuccggaaucgcagucaguaaaguccuucaccuugaaggcgaaguaaacaaaauaaaaaaugcacuacuaucuacaaauaaagcaguaguaucccuauccaauggcgucucaguauuaaccucaaaaguacucgaccuuaaaaauuauauagacaaacaauuacuacccauagucaauaaacaauccuguuccauaucaaacauagaaacaguaaucgaauuucaacaaaaaaacaacagauuacuagaaauaacacgcgaauuuucagucaacgccggaguaaccacacccgucucaacauacaugcuaaccaacuccgaacuacuaucacuuaucaacgacaugccaauaacaaaugaccaaaaaaaacucaugucaaacaacguacaaauaguccgccaacaaucauacucuauaaugucuauuaucaaagaagaaguucucgcauacguaguacaacuaccacuauauggugucauagacacaccauguuggaaacuccauacaucacccuuauguacaaccaauacaaaagaaggcucaaacaucugccuaacucgaacagaccgaggaugguacugcgacaaugcaggaucugucucauucuucccucaagcagaaacauguaaaguucaaucuaauagaguuuucugcgauacaaugaacucacuaacucuaccaucagaaguaaaucucuguaauauugacauauucaacccaaaauacgauugcaagaucaugacaucaaaaacugacguaucauccucagucaucaccucauuaggagcaaucguaagcuguuacgggaaaacaaaaugcaccgcuucuaacaaaaauagaggaauaauuaaaaccuucucaaacggaugcgauuacgucuccaauaaaggaguagauacaguaagcguaggaaauacucuauacuacgucaauaaacaagaaggaaaaucacuuuaugucaaaggagaacccauaauaaauuucuacgacccauuagucuucccaucagaugaauuugacgcauccauaucccaagucaacgaaaaaaucaaucaaucacuagcauucauacgaaaaucagacgaacuacuacacaacguuaacguaggaaaaucaacaaccaacaucaugauaaccacuauaauaaucgucauaauagucauccuauuauuacuaauagccguaggccuuuuccuauacuguaaagcuagauaaggacuaguguccaccugucccuccugggcugcuggauugucucguuuuccugccaaauaaacaggaucagcgcuuuacagaucuaaaaaaaaaaaaaaaaaaaaaaaaaaaaaaaaaaaaaaaaaaaaaaaaaaaaaaaaaaaaaaaaugcaucccccccccccccccccccccccccccccccaaaggcucuuuucagagccaccagaauu

SEQ ID NO: 12271 - RNA, 1991 nt, Artificial Sequence
  mRNA product Design e-1 comprising derived and/or modified sequence from HRSV(Memphis-37)__AIY60640.1__F-del (opt11)
gggagaauauaagcguuggcggagcgucgguuguagcacucugcgcgcccgcucuucugcugcuguuugucuacuuccuccugcuuccccgccgccgccgccgccaucaagcuuaccauggaacucccgauccucaaaaccaacgccaucaccacuauccucgccgccguaacccucugcuucgccucaucccaaaacaucaccgaagaauuuuaccaauccacaugcuccgccgucuccaaagguuaccucucagcccuccgcaccggcugguacaccuccguuaucaccaucgaacuuuccaacauaaaagagaacaagugcaacggcaccgacgcaaaaguaaaacuaaucaaacaagaacuagacaaauacaaaaacgccgucaccgaacuccagcuccucaugcaaucgacgcccgccgccaacaaccgagcaaggcgcgaacuuccacgcuucaugaacuacacccucaacaacacuaaaaacaacaacgugacccuauccaaaaagcguaaacgccgauuccuagguuuccuucucggugucggcuccgccauugccuccggcaucgcuguuuccaaaguccuccaccucgaaggcgaaguaaacaagauaaaaaacgcccuccucucuacaaacaaggccgugguaucgcucucuaacggcgucucuguacucaccuccaaaguccucgaccucaaaaacuacaucgacaagcaacuccucccuaucgucaauaaacaauccugcuccauuuccaacaucgaaacagugaucgaauuucaacaaaaaaacaaccgauuacuagaaaucacccgcgaauuuucagucaacgccggcgucacaacgccagucucaaccuacaugcucaccaacucagaacucuuaucacucaucaacgacaugcccaucacuaacgaccagaaaaaacugauguccaacaacgugcaaauaguccgccaacaguccuacuccaucauguccauaaucaaggaggaggugcucgccuacguaguccaacucccccucuacggagucauugacaccccuugcuggaaacuacacaccuccccucucugcaccaccaacaccaaagaaggcagcaacaucugccuaaccaggacggaccgaggaugguacugcgacaaugcaggcuccgucagcuucuucccacaagccgaaacaugcaaaguucaaucaaaccguguauucugcgacaccaugaacucacucacccuccccucagaaguaaaccuaugcaacauagauaucuucaaccccaaauacgacugcaaaauuaugaccuccaaaaccgaugucuccagcuccguuaucacgucacucggcgccaucgucuccugcuacggcaagaccaaaugcaccgccuccaacaaaaaccgcggaauaaucaaaacauucucuaacggcugcgacuacgucuccaauaaaggcgucgacaccgucuccgugggcaacacgcuguacuacgucaacaaacaagaaggcaaaucucuuuacgucaaaggugaaccaaucaucaacuucuacgacccccucguauuccccuccgacgaauuugacgcgagcaucucccaagucaacgaaaagaucaaccaaucccucgccuucauccgaaaaagcgacgaacuccuccacaacgucaacgucggcaaaaguaccacaaacauuaugaucaccaccaucaucauagucaucaucgucauccugcuccuacuaauagccgucggccucuucuuguacugcaaggcacgaugaggacuaguguccaccugucccuccugggcugcuggauugucucguuuuccugccaaauaaacaggaucagcgcuuuacagaucuaaaaaaaaaaaaaaaaaaaaaaaaaaaaaaaaaaaaaaaaaaaaaaaaaaaaaaaaaaaaaaaaugcaucccccccccccccccccccccccccccccccaaaggcucuuuucagagccaccagaauu

SEQ ID NO: 12272 - RNA, 1973 nt, Artificial Sequence
  mRNA product Design e-2 comprising derived and/or modified sequence from HRSV(Memphis-37)__AIY60640.1__F-del (wt)
gggagacccgugacccggaaguuguacggcuacgcgacuuucccucccacaaacccucgcgcccuuccuuuccuacuugggcccggcagaaagcuuaccauggaguugccaauccucaaaacaaaugcaauuaccacaauccuugcugcagucacacucuguuucgcuuccagucaaaacaucacugaagaauuuuaucaaucaacaugcagugcaguuagcaaaggcuaucuuagugcuuuaagaacugguugguauacuaguguuauaacuauagaauuaaguaauaucaaggaaaauaaguguaauggaacagaugcuaagguaaaauugauaaaacaagaauuagauaaauauaaaaaugcuguaacagaauugcaguugcucaugcaaagcacaccagcagccaacaaucgagccagaagagaacuaccaagguuuaugaauuauacacucaacaauaccaaaaauaacaauguaacauuaagcaagaaaaggaaaagaagauuucuuggcuuuuuguuagguguuggaucugcaaucgccaguggcauugcuguaucuaaaguccugcaccuagaaggggaagugaacaaaaucaaaaaugcucuacuauccacaaacaaggcuguagucagcuuaucaaauggaguuagugucuuaaccagcaaaguguuagaccucaaaaacuauauagauaaacaguuguuacccauugugaacaagcaaagcugcagcauaucaaacauugaaacugugauagaauuccaacaaaagaacaacagacuacuagagauuaccagggaauuuaguguuaaugcagguguaacuacaccuguaagcacuuauauguuaacaaauagugaauuauuaucauuaaucaaugauaugccuauaacaaaugaucagaaaaaguuaauguccaacaauguucaaauaguuagacagcaaaguuacucuaucauguccauaauaaaggaggaagucuuagcauauguaguucaauuaccacuauaugguguaauagauacaccuuguuggaaacuacacacauccccucuaugcacaaccaacacaaaggaaggguccaacaucuguuuaacaagaaccgacagaggaugguacugugacaaugcaggaucagugucuuucuucccacaagcugaaacaugcaaaguucaaucgaaucgaguauuuugugacacaaugaacagucuaacauuaccaagugaaguaaaucucugcaacauugacauauucaacccuaaauaugauugcaaaauuaugacuucaaaaacagaugugagcagcuccguuaucacaucucuaggagccauugugucaugcuauggcaaaacuaaauguacagcauccaauaaaaaucguggaaucauaaagacauuuucuaacgggugugauuauguaucaaauaaggggguggacacuguaucuguagguaauacauuauauuauguaaauaagcaagaaggaaaaagccucuauguaaaaggugaaccaauaauaaauuucuaugacccauuaguguucccuucugaugaauuugaugcaucaauaucucaagucaaugagaagauuaaccagagccuagcauuuauucguaaauccgaugaauuauuacauaauguaaauguugguaaauccaccacaaauaucaugauaacuacuauaauuauagugauuauaguaauauuguuauuauuaauugcaguugggcuguuccuauacugcaaggccagaugaggacuaguguccaccugucccuccugggcugcuggauugucucguuuuccugccaaauaaacaggaucagcgcuuuacagaucuaaaaaaaaaaaaaaaaaaaaaaaaaaaaaaaaaaaaaaaaaaaaaaaaaaaaaaaaaaaaaaaaugcaucccccccccccccccccccccccccccccccaaaggcucuuuucagagccaccagaauu

SEQ ID NO: 12273 - RNA, 1973 nt, Artificial Sequence
  mRNA product Design e-2 comprising derived and/or modified sequence from HRSV(Memphis-37)__AIY60640.1__F-del (opt1)
gggagacccgugacccggaaguuguacggcuacgcgacuuucccucccacaaacccucgcgcccuuccuuuccuacuugggcccggcagaaagcuuaccauggagcugcccauccucaagaccaacgccaucaccacgauccuggccgcggugacccugugcuucgccagcucccagaacaucaccgaggaguucuaccagagcacgugcuccgccgucagcaagggcuaccucuccgcccugcgcaccgggugguacaccagcgugaucaccaucgagcuguccaacaucaaggagaacaagugcaacggcaccgacgccaaggugaagcucaucaagcaggagcuggacaaguacaagaacgcggucacggagcugcagcuccugaugcagagcaccccggccgccaacaaccgggcccgccgggagcugccccgcuucaugaacuacacccucaacaacaccaagaacaacaacgugacgcuguccaagaagcggaagcgccgguuccugggguuccuccugggcguggggagcgcgaucgccuccggcaucgccgucagcaaggugcugcaccucgagggcgaggugaacaagaucaagaacgcccugcuguccaccaacaaggccgucgugagccucuccaacggggugagcguccugaccuccaaggugcuggaccucaagaacuacaucgacaagcagcugcugcccaucgugaacaagcagagcugcuccaucagcaacaucgagaccgucaucgaguuccagcagaagaacaaccgccuccuggagaucacgcgggaguucagcgugaacgcgggcgugaccacccccgucuccaccuacaugcugacgaacagcgagcuccugucccugaucaacgacaugccgaucaccaacgaccagaagaagcucaugagcaacaacgugcagaucgugcgccagcaguccuacagcaucauguccaucaucaaggaggagguccuggccuacguggugcagcugccccucuacggggucaucgacacccccugcuggaagcugcacaccagcccccugugcacgaccaacaccaaggagggcuccaacaucugccucacccggacggaccgcgggugguacugcgacaacgccggcagcguguccuucuucccgcaggccgagaccugcaagguccagagcaaccggguguucugcgacaccaugaacucccugacccugcccagcgaggugaaccucugcaacaucgacaucuucaaccccaaguacgacugcaagaucaugacguccaagaccgacgucagcuccagcgugaucaccucccugggcgccaucgugagcugcuacgggaagaccaagugcacggcgagcaacaagaaccgcggcaucaucaagaccuucuccaacgggugcgacuacgucagcaacaagggcguggacaccguguccgucggcaacacccuguacuacgugaacaagcaggagggcaagagccucuacgugaagggggagcccaucaucaacuucuacgacccgcuggucuuccccuccgacgaguucgacgccagcaucucccaggugaacgagaagaucaaccagagccuggccuucauccggaaguccgacgagcuccugcacaacgugaacgucggcaagagcaccacgaacaucaugaucaccaccaucaucaucgugaucaucgugauccugcugcuccugaucgccgucgggcuguuccucuacugcaaggcccgcugaggacuaguguccaccugucccuccugggcugcuggauugucucguuuuccugccaaauaaacaggaucagcgcuuuacagaucuaaaaaaaaaaaaaaaaaaaaaaaaaaaaaaaaaaaaaaaaaaaaaaaaaaaaaaaaaaaaaaaaugcaucccccccccccccccccccccccccccccccaaaggcucuuuucagagccaccagaauu

SEQ ID NO: 12274 - RNA, 1973 nt, Artificial Sequence
  mRNA product Design e-2 comprising derived and/or modified sequence from HRSV(Memphis-37)__AIY60640.1__F-del (opt2)
gggagacccgugacccggaaguuguacggcuacgcgacuuucccucccacaaacccucgcgcccuuccuuuccuacuugggcccggcagaaagcuuaccauggagcuccccauccucaagaccaacgccaucaccaccauccucgccgccgucacccucugcuucgccuccucccagaacaucaccgaggaguucuaccaguccaccugcuccgccgucuccaagggcuaccucuccgcccuccgcaccggcugguacaccuccgucaucaccaucgagcucuccaacaucaaggagaacaagugcaacggcaccgacgccaaggucaagcucaucaagcaggagcucgacaaguacaagaacgccgucaccgagcuccagcuccucaugcaguccacccccgccgccaacaaccgcgcccgccgcgagcucccccgcuucaugaacuacacccucaacaacaccaagaacaacaacgucacccucuccaagaagcgcaagcgccgcuuccucggcuuccuccucggcgucggcuccgccaucgccuccggcaucgccgucuccaagguccuccaccucgagggcgaggucaacaagaucaagaacgcccuccucuccaccaacaaggccgucgucucccucuccaacggcgucuccguccucaccuccaagguccucgaccucaagaacuacaucgacaagcagcuccuccccaucgucaacaagcaguccugcuccaucuccaacaucgagaccgucaucgaguuccagcagaagaacaaccgccuccucgagaucacccgcgaguucuccgucaacgccggcgucaccacccccgucuccaccuacaugcucaccaacuccgagcuccucucccucaucaacgacaugcccaucaccaacgaccagaagaagcucauguccaacaacguccagaucguccgccagcaguccuacuccaucauguccaucaucaaggaggagguccucgccuacgucguccagcucccccucuacggcgucaucgacacccccugcuggaagcuccacaccuccccccucugcaccaccaacaccaaggagggcuccaacaucugccucacccgcaccgaccgcggcugguacugcgacaacgccggcuccgucuccuucuucccccaggccgagaccugcaagguccaguccaaccgcgucuucugcgacaccaugaacucccucacccuccccuccgaggucaaccucugcaacaucgacaucuucaaccccaaguacgacugcaagaucaugaccuccaagaccgacgucuccuccuccgucaucaccucccucggcgccaucgucuccugcuacggcaagaccaagugcaccgccuccaacaagaaccgcggcaucaucaagaccuucuccaacggcugcgacuacgucuccaacaagggcgucgacaccgucuccgucggcaacacccucuacuacgucaacaagcaggagggcaagucccucuacgucaagggcgagcccaucaucaacuucuacgacccccucgucuuccccuccgacgaguucgacgccuccaucucccaggucaacgagaagaucaaccagucccucgccuucauccgcaaguccgacgagcuccuccacaacgucaacgucggcaaguccaccaccaacaucaugaucaccaccaucaucaucgucaucaucgucauccuccuccuccucaucgccgucggccucuuccucuacugcaaggcccgcugaggacuaguguccaccugucccuccugggcugcuggauugucucguuuuccugccaaauaaacaggaucagcgcuuuacagaucuaaaaaaaaaaaaaaaaaaaaaaaaaaaaaaaaaaaaaaaaaaaaaaaaaaaaaaaaaaaaaaaaugcaucccccccccccccccccccccccccccccccaaaggcucuuuucagagccaccagaauu

SEQ ID NO: 12275 - RNA, 1973 nt, Artificial Sequence
  mRNA product Design e-2 comprising derived and/or modified sequence from HRSV(Memphis-37)__AIY60640.1__F-del (opt3)
gggagacccgugacccggaaguuguacggcuacgcgacuuucccucccacaaacccucgcgcccuuccuuuccuacuugggcccggcagaaagcuuaccauggagcugcccauccucaagaccaacgccauuacaacuauacuugcugcagugacgcugugcuucgccagcucccagaauaucaccgaagaguuuuaccaaucuacauguucagcggucaguaaaggcuauuugagcgcuuuaagaacugggugguacaccuccguuauuacaaucgaacugucuaacauuaaggagaauaaaugcaacggaaccgacgccaaggugaaacuaaucaagcaggaacucgauaaguauaaaaaugcaguaacugagcugcagcuucugaugcagucgaccccugccgcuaacaauagggcacggcgcgaguugccacgauucaugaacuacacacucaauaacacgaagaauaacaaugugacucugagcaaaaagcguaaaagaagguuucuggguuuccucuuaggcgucgggucagccauagcuaguggaaucgccguguccaagguucugcaccuugaaggcgaggugaacaagauuaaaaaugcguugcugucuaccaacaaggcagucgugagccuauccaacgguguaucaguucucacaaguaaagugcuggaccuuaagaauuauaucgauaaacaacuguugccgauugucaacaagcagagcuguucuaucuccaauauagaaacugugauugaguuucagcagaaaaacaaucggcuccuggagaucacccgcgaguucucagugaacgccggggucacaacccccguuagcacguacauguuaacuaauagugaacugcucucucuuauuaacgacaugccuaucacaaaugaucaaaagaagcugauguccaacaaugugcagaucguaagacagcagagcuauucgauuaugucuauaaucaaagaagagguguuggcuuacgucgugcaacuaccacuguacggaguuauugacacccccugcuggaagcuccauacuuccccucuguguacaaccaacacgaaagaaggcucaaauaucugccuuaccaggacagaucggggcugguauugugacaacgccgggagugugagcuuuuucccacaggcagagacuugcaagguccaguccaaucgcguguuuugugauaccaugaacucucugacauugcccagcgagguaaaccucugcaauauagacauuuucaacccuaaauacgauuguaagaucaugacuucaaagaccgacguuaguuccagcgugaucacaucucugggagcuauugucucaugcuaugguaaaaccaagugcacugccaguaauaaaaaccgaggcaucauuaagacguuuagcaaugggugugauuacguguccaacaaaggagucgacacagugucuguuggcaauaccuuauauuacgugaacaagcaagaagguaagucgcuguauguaaaaggggagccaauaaucaauuucuacgacccgcuagucuuucccagcgaugaguucgacgcguccauuucacaggugaacgaaaagaucaaucagagucucgccuucaucagaaaaucugaugaacugcuucacaacguuaaugugggaaagagcacuaccaacauuaugauaacaaccaucauuaucgucauuaucgugauauugcugcuccugaucgcaguaggccuuuuucuguacugcaaagcuaggugaggacuaguguccaccugucccuccugggcugcuggauugucucguuuuccugccaaauaaacaggaucagcgcuuuacagaucuaaaaaaaaaaaaaaaaaaaaaaaaaaaaaaaaaaaaaaaaaaaaaaaaaaaaaaaaaaaaaaaaugcaucccccccccccccccccccccccccccccccaaaggcucuuuucagagccaccagaauu

SEQ ID NO: 12276 - RNA, 1973 nt, Artificial Sequence
  mRNA product Design e-2 comprising derived and/or modified sequence from HRSV(Memphis-37)__AIY60640.1__F-del (opt4)
gggagacccgugacccggaaguuguacggcuacgcgacuuucccucccacaaacccucgcgcccuuccuuuccuacuugggcccggcagaaagcuuaccauggagcugcccauccugaagaccaacgccaucaccaccauccuggccgccgugacccugugcuucgccagcagccagaacaucaccgaggaguucuaccagagcaccugcagcgccgugagcaagggcuaccugagcgcccugagaaccggcugguacaccagcgugaucaccaucgagcugagcaacaucaaggagaacaagugcaacggcaccgacgccaaggugaagcugaucaagcaggagcuggacaaguacaagaacgccgugaccgagcugcagcugcugaugcagagcacccccgccgccaacaacagagccagaagagagcugcccagauucaugaacuacacccugaacaacaccaagaacaacaacgugacccugagcaagaagagaaagagaagauuccugggcuuccugcugggcgugggcagcgccaucgccagcggcaucgccgugagcaaggugcugcaccuggagggcgaggugaacaagaucaagaacgcccugcugagcaccaacaaggccguggugagccugagcaacggcgugagcgugcugaccagcaaggugcuggaccugaagaacuacaucgacaagcagcugcugcccaucgugaacaagcagagcugcagcaucagcaacaucgagaccgugaucgaguuccagcagaagaacaacagacugcuggagaucaccagagaguucagcgugaacgccggcgugaccacccccgugagcaccuacaugcugaccaacagcgagcugcugagccugaucaacgacaugcccaucaccaacgaccagaagaagcugaugagcaacaacgugcagaucgugagacagcagagcuacagcaucaugagcaucaucaaggaggaggugcuggccuacguggugcagcugccccuguacggcgugaucgacacccccugcuggaagcugcacaccagcccccugugcaccaccaacaccaaggagggcagcaacaucugccugaccagaaccgacagaggcugguacugcgacaacgccggcagcgugagcuucuucccccaggccgagaccugcaaggugcagagcaacagaguguucugcgacaccaugaacagccugacccugcccagcgaggugaaccugugcaacaucgacaucuucaaccccaaguacgacugcaagaucaugaccagcaagaccgacgugagcagcagcgugaucaccagccugggcgccaucgugagcugcuacggcaagaccaagugcaccgccagcaacaagaacagaggcaucaucaagaccuucagcaacggcugcgacuacgugagcaacaagggcguggacaccgugagcgugggcaacacccuguacuacgugaacaagcaggagggcaagagccuguacgugaagggcgagcccaucaucaacuucuacgacccccugguguuccccagcgacgaguucgacgccagcaucagccaggugaacgagaagaucaaccagagccuggccuucaucagaaagagcgacgagcugcugcacaacgugaacgugggcaagagcaccaccaacaucaugaucaccaccaucaucaucgugaucaucgugauccugcugcugcugaucgccgugggccuguuccuguacugcaaggccagaugaggacuaguguccaccugucccuccugggcugcuggauugucucguuuuccugccaaauaaacaggaucagcgcuuuacagaucuaaaaaaaaaaaaaaaaaaaaaaaaaaaaaaaaaaaaaaaaaaaaaaaaaaaaaaaaaaaaaaaaugcaucccccccccccccccccccccccccccccccaaaggcucuuuucagagccaccagaauu

SEQ ID NO: 12277 - RNA, 1973 nt, Artificial Sequence
  mRNA product Design e-2 comprising derived and/or modified sequence from HRSV(Memphis-37)__AIY60640.1__F-del (opt5)
gggagacccgugacccggaaguuguacggcuacgcgacuuucccucccacaaacccucgcgcccuuccuuuccuacuugggcccggcagaaagcuuaccauggagcugcccauccucaagaccaacgccauuacaacgauccuggcugccgugacccuuugcuucgcgagcucccagaauauuacagaagaguuuuaccaaucuaccuguagcgcugucuccaaaggcuaucugucugcccucagaacagggugguacaccagcguuaucacaauugaacuguccaacaucaaggagaauaaaugcaacggaaccgacgccaaggugaaacuuaucaagcaggaacuggauaaguauaaaaaugcugugacggagcuccagcugcugaugcagucuaccccugccgcuaacaaucgggcccgcagagagcucccgcgguucaugaacuacacacugaauaacaccaagaauaacaaugucacacuuagcaaaaagcgcaaaagacgguuucugggcuuccuccugggggugggauccgcgauugccagcggcaucgcuguuucuaaggugcuucaccuggaaggggaggucaacaagauuaaaaaugcccuccuguccaccaacaaggcugugguuagccugucuaacggaguguccguccucacgagcaaagugcuggaccuuaagaauuauaucgauaaacaacugcuccccauugugaacaagcagucuuguuccaucagcaauauugaaacagucaucgaguuucagcagaaaaacaaucgccugcuugagaucaccagagaauuuuccguuaacgccggcgugacaaccccugugucuaccuacaugcugacaaauagcgagcuccugucccugauuaacgacaugcccaucacgaaugaucaaaagaagcucaugagcaacaauguccagauugugcggcagcagucuuauuccaucaugagcauuaucaaagaagagguucuggcguacgugguccaacuuccucuguacggcgugaucgacacccccugcuggaagcuccauacaucuccucuguguaccacaaacaccaaagaagggagcaauauuugccuuacgcgcacagauagaggaugguauugugacaacgccggcuccguuucuuucuucccgcaggcugagaccugcaaggugcagagcaaucgggucuuuugugauaccaugaacucccugacacuccccagcgaggugaaccugugcaauaucgacauuuucaacccuaaauacgauuguaagaucaugaccucuaagacagacgucuccagcucugugauuacgucccugggggccaucguuagcugcuauggaaaaaccaagugcacagcuuccaauaaaaaccgcggcaucauuaagaccuuuucuaaugggugugauuacgugagcaacaaaggagucgacacaguguccguuggcaauacccucuauuacgugaacaagcaagaaggcaagucucuguaugucaaaggggagcccaucauuaauuucuacgacccucuuguguuucccagcgaugaguucgacgccuccaucagccaggugaacgaaaagauuaaucagucucuggccuucaucagaaaauccgaugaacuccugcacaacguuaaugucggaaagagcacgaccaacauuaugaucacaaccaucauuaucgugauuaucgugauucugcuucuccugaucgcugucggccuguuucucuacugcaaagcgcggugaggacuaguguccaccugucccuccugggcugcuggauugucucguuuuccugccaaauaaacaggaucagcgcuuuacagaucuaaaaaaaaaaaaaaaaaaaaaaaaaaaaaaaaaaaaaaaaaaaaaaaaaaaaaaaaaaaaaaaaugcaucccccccccccccccccccccccccccccccaaaggcucuuuucagagccaccagaauu

SEQ ID NO: 12278 - RNA, 1973 nt, Artificial Sequence
  mRNA product Design e-2 comprising derived and/or modified sequence from HRSV(Memphis-37)__AIY60640.1__F-del (opt6)
gggagacccgugacccggaaguuguacggcuacgcgacuuucccucccacaaacccucgcgcccuuccuuuccuacuugggcccggcagaaagcuuaccauggaacucccaauauuaaaaacuaacgcaaucacaaccauauuagcagccgucacucuaugcuuugccuccucacaaaauauaacagaagaauuuuaccaauccacaugcucagccguuagcaaaggauaucuaucagcccuaagaacaggcugguauacuucaguaauaacaauagaacuaucaaauauaaaagaaaacaaaugcaacggaaccgacgcuaaaguaaagcucauaaaacaagaauuagacaaauacaaaaaugcaguaacagaacuacaacuccuaaugcaaucaaccccagccgccaauaacagagcuagacgagaacuaccccgauucaugaauuacacacuaaacaacacaaaaaacaacaauguaacacucucaaaaaaaagaaaacgaagauucuuagguuuucuccugggaguaggaucagcaaucgcuuccggaaucgcagucaguaaaguccuucaccuugaaggcgaaguaaacaaaauaaaaaaugcacuacuaucuacaaauaaagcaguaguaucccuauccaauggcgucucaguauuaaccucaaaaguacucgaccuuaaaaauuauauagacaaacaauuacuacccauagucaauaaacaauccuguuccauaucaaacauagaaacaguaaucgaauuucaacaaaaaaacaacagauuacuagaaauaacacgcgaauuuucagucaacgccggaguaaccacacccgucucaacauacaugcuaaccaacuccgaacuacuaucacuuaucaacgacaugccaauaacaaaugaccaaaaaaaacucaugucaaacaacguacaaauaguccgccaacaaucauacucuauaaugucuauuaucaaagaagaaguucucgcauacguaguacaacuaccacuauauggugucauagacacaccauguuggaaacuccauacaucacccuuauguacaaccaauacaaaagaaggcucaaacaucugccuaacucgaacagaccgaggaugguacugcgacaaugcaggaucugucucauucuucccucaagcagaaacauguaaaguucaaucuaauagaguuuucugcgauacaaugaacucacuaacucuaccaucagaaguaaaucucuguaauauugacauauucaacccaaaauacgauugcaagaucaugacaucaaaaacugacguaucauccucagucaucaccucauuaggagcaaucguaagcuguuacgggaaaacaaaaugcaccgcuucuaacaaaaauagaggaauaauuaaaaccuucucaaacggaugcgauuacgucuccaauaaaggaguagauacaguaagcguaggaaauacucuauacuacgucaauaaacaagaaggaaaaucacuuuaugucaaaggagaacccauaauaaauuucuacgacccauuagucuucccaucagaugaauuugacgcauccauaucccaagucaacgaaaaaaucaaucaaucacuagcauucauacgaaaaucagacgaacuacuacacaacguuaacguaggaaaaucaacaaccaacaucaugauaaccacuauaauaaucgucauaauagucauccuauuauuacuaauagccguaggccuuuuccuauacuguaaagcuagauaaggacuaguguccaccugucccuccugggcugcuggauugucucguuuuccugccaaauaaacaggaucagcgcuuuacagaucuaaaaaaaaaaaaaaaaaaaaaaaaaaaaaaaaaaaaaaaaaaaaaaaaaaaaaaaaaaaaaaaaugcaucccccccccccccccccccccccccccccccaaaggcucuuuucagagccaccagaauu

SEQ ID NO: 12279 - RNA, 1973 nt, Artificial Sequence
  mRNA product Design e-2 comprising derived and/or modified sequence from HRSV(Memphis-37)__AIY60640.1__F-del (opt11)
gggagacccgugacccggaaguuguacggcuacgcgacuuucccucccacaaacccucgcgcccuuccuuuccuacuugggcccggcagaaagcuuaccauggaacucccgauccucaaaaccaacgccaucaccacuauccucgccgccguaacccucugcuucgccucaucccaaaacaucaccgaagaauuuuaccaauccacaugcuccgccgucuccaaagguuaccucucagcccuccgcaccggcugguacaccuccguuaucaccaucgaacuuuccaacauaaaagagaacaagugcaacggcaccgacgcaaaaguaaaacuaaucaaacaagaacuagacaaauacaaaaacgccgucaccgaacuccagcuccucaugcaaucgacgcccgccgccaacaaccgagcaaggcgcgaacuuccacgcuucaugaacuacacccucaacaacacuaaaaacaacaacgugacccuauccaaaaagcguaaacgccgauuccuagguuuccuucucggugucggcuccgccauugccuccggcaucgcuguuuccaaaguccuccaccucgaaggcgaaguaaacaagauaaaaaacgcccuccucucuacaaacaaggccgugguaucgcucucuaacggcgucucuguacucaccuccaaaguccucgaccucaaaaacuacaucgacaagcaacuccucccuaucgucaauaaacaauccugcuccauuuccaacaucgaaacagugaucgaauuucaacaaaaaaacaaccgauuacuagaaaucacccgcgaauuuucagucaacgccggcgucacaacgccagucucaaccuacaugcucaccaacucagaacucuuaucacucaucaacgacaugcccaucacuaacgaccagaaaaaacugauguccaacaacgugcaaauaguccgccaacaguccuacuccaucauguccauaaucaaggaggaggugcucgccuacguaguccaacucccccucuacggagucauugacaccccuugcuggaaacuacacaccuccccucucugcaccaccaacaccaaagaaggcagcaacaucugccuaaccaggacggaccgaggaugguacugcgacaaugcaggcuccgucagcuucuucccacaagccgaaacaugcaaaguucaaucaaaccguguauucugcgacaccaugaacucacucacccuccccucagaaguaaaccuaugcaacauagauaucuucaaccccaaauacgacugcaaaauuaugaccuccaaaaccgaugucuccagcuccguuaucacgucacucggcgccaucgucuccugcuacggcaagaccaaaugcaccgccuccaacaaaaaccgcggaauaaucaaaacauucucuaacggcugcgacuacgucuccaauaaaggcgucgacaccgucuccgugggcaacacgcuguacuacgucaacaaacaagaaggcaaaucucuuuacgucaaaggugaaccaaucaucaacuucuacgacccccucguauuccccuccgacgaauuugacgcgagcaucucccaagucaacgaaaagaucaaccaaucccucgccuucauccgaaaaagcgacgaacuccuccacaacgucaacgucggcaaaaguaccacaaacauuaugaucaccaccaucaucauagucaucaucgucauccugcuccuacuaauagccgucggccucuucuuguacugcaaggcacgaugaggacuaguguccaccugucccuccugggcugcuggauugucucguuuuccugccaaauaaacaggaucagcgcuuuacagaucuaaaaaaaaaaaaaaaaaaaaaaaaaaaaaaaaaaaaaaaaaaaaaaaaaaaaaaaaaaaaaaaaugcaucccccccccccccccccccccccccccccccaaaggcucuuuucagagccaccagaauu

SEQ ID NO: 12280 - RNA, 1943 nt, Artificial Sequence
  mRNA product Design e-3 comprising derived and/or modified sequence from HRSV(Memphis-37)__AIY60640.1__F-del (wt)
gggagacuuucccauucuguagcagaauuugguguugccuguggucuuggucccgcggagaagcuuaccauggaguugccaauccucaaaacaaaugcaauuaccacaauccuugcugcagucacacucuguuucgcuuccagucaaaacaucacugaagaauuuuaucaaucaacaugcagugcaguuagcaaaggcuaucuuagugcuuuaagaacugguugguauacuaguguuauaacuauagaauuaaguaauaucaaggaaaauaaguguaauggaacagaugcuaagguaaaauugauaaaacaagaauuagauaaauauaaaaaugcuguaacagaauugcaguugcucaugcaaagcacaccagcagccaacaaucgagccagaagagaacuaccaagguuuaugaauuauacacucaacaauaccaaaaauaacaauguaacauuaagcaagaaaaggaaaagaagauuucuuggcuuuuuguuagguguuggaucugcaaucgccaguggcauugcuguaucuaaaguccugcaccuagaaggggaagugaacaaaaucaaaaaugcucuacuauccacaaacaaggcuguagucagcuuaucaaauggaguuagugucuuaaccagcaaaguguuagaccucaaaaacuauauagauaaacaguuguuacccauugugaacaagcaaagcugcagcauaucaaacauugaaacugugauagaauuccaacaaaagaacaacagacuacuagagauuaccagggaauuuaguguuaaugcagguguaacuacaccuguaagcacuuauauguuaacaaauagugaauuauuaucauuaaucaaugauaugccuauaacaaaugaucagaaaaaguuaauguccaacaauguucaaauaguuagacagcaaaguuacucuaucauguccauaauaaaggaggaagucuuagcauauguaguucaauuaccacuauaugguguaauagauacaccuuguuggaaacuacacacauccccucuaugcacaaccaacacaaaggaaggguccaacaucuguuuaacaagaaccgacagaggaugguacugugacaaugcaggaucagugucuuucuucccacaagcugaaacaugcaaaguucaaucgaaucgaguauuuugugacacaaugaacagucuaacauuaccaagugaaguaaaucucugcaacauugacauauucaacccuaaauaugauugcaaaauuaugacuucaaaaacagaugugagcagcuccguuaucacaucucuaggagccauugugucaugcuauggcaaaacuaaauguacagcauccaauaaaaaucguggaaucauaaagacauuuucuaacgggugugauuauguaucaaauaaggggguggacacuguaucuguagguaauacauuauauuauguaaauaagcaagaaggaaaaagccucuauguaaaaggugaaccaauaauaaauuucuaugacccauuaguguucccuucugaugaauuugaugcaucaauaucucaagucaaugagaagauuaaccagagccuagcauuuauucguaaauccgaugaauuauuacauaauguaaauguugguaaauccaccacaaauaucaugauaacuacuauaauuauagugauuauaguaauauuguuauuauuaauugcaguugggcuguuccuauacugcaaggccagaugaggacuaguguccaccugucccuccugggcugcuggauugucucguuuuccugccaaauaaacaggaucagcgcuuuacagaucuaaaaaaaaaaaaaaaaaaaaaaaaaaaaaaaaaaaaaaaaaaaaaaaaaaaaaaaaaaaaaaaaugcaucccccccccccccccccccccccccccccccaaaggcucuuuucagagccaccagaauu

SEQ ID NO: 12281 - RNA, 1943 nt, Artificial Sequence
  mRNA product Design e-3 comprising derived and/or modified sequence from HRSV(Memphis-37)__AIY60640.1__F-del (opt1)
gggagacuuucccauucuguagcagaauuugguguugccuguggucuuggucccgcggagaagcuuaccauggagcugcccauccucaagaccaacgccaucaccacgauccuggccgcggugacccugugcuucgccagcucccagaacaucaccgaggaguucuaccagagcacgugcuccgccgucagcaagggcuaccucuccgcccugcgcaccgggugguacaccagcgugaucaccaucgagcuguccaacaucaaggagaacaagugcaacggcaccgacgccaaggugaagcucaucaagcaggagcuggacaaguacaagaacgcggucacggagcugcagcuccugaugcagagcaccccggccgccaacaaccgggcccgccgggagcugccccgcuucaugaacuacacccucaacaacaccaagaacaacaacgugacgcuguccaagaagcggaagcgccgguuccugggguuccuccugggcguggggagcgcgaucgccuccggcaucgccgucagcaaggugcugcaccucgagggcgaggugaacaagaucaagaacgcccugcuguccaccaacaaggccgucgugagccucuccaacggggugagcguccugaccuccaaggugcuggaccucaagaacuacaucgacaagcagcugcugcccaucgugaacaagcagagcugcuccaucagcaacaucgagaccgucaucgaguuccagcagaagaacaaccgccuccuggagaucacgcgggaguucagcgugaacgcgggcgugaccacccccgucuccaccuacaugcugacgaacagcgagcuccugucccugaucaacgacaugccgaucaccaacgaccagaagaagcucaugagcaacaacgugcagaucgugcgccagcaguccuacagcaucauguccaucaucaaggaggagguccuggccuacguggugcagcugccccucuacggggucaucgacacccccugcuggaagcugcacaccagcccccugugcacgaccaacaccaaggagggcuccaacaucugccucacccggacggaccgcgggugguacugcgacaacgccggcagcguguccuucuucccgcaggccgagaccugcaagguccagagcaaccggguguucugcgacaccaugaacucccugacccugcccagcgaggugaaccucugcaacaucgacaucuucaaccccaaguacgacugcaagaucaugacguccaagaccgacgucagcuccagcgugaucaccucccugggcgccaucgugagcugcuacgggaagaccaagugcacggcgagcaacaagaaccgcggcaucaucaagaccuucuccaacgggugcgacuacgucagcaacaagggcguggacaccguguccgucggcaacacccuguacuacgugaacaagcaggagggcaagagccucuacgugaagggggagcccaucaucaacuucuacgacccgcuggucuuccccuccgacgaguucgacgccagcaucucccaggugaacgagaagaucaaccagagccuggccuucauccggaaguccgacgagcuccugcacaacgugaacgucggcaagagcaccacgaacaucaugaucaccaccaucaucaucgugaucaucgugauccugcugcuccugaucgccgucgggcuguuccucuacugcaaggcccgcugaggacuaguguccaccugucccuccugggcugcuggauugucucguuuuccugccaaauaaacaggaucagcgcuuuacagaucuaaaaaaaaaaaaaaaaaaaaaaaaaaaaaaaaaaaaaaaaaaaaaaaaaaaaaaaaaaaaaaaaugcaucccccccccccccccccccccccccccccccaaaggcucuuuucagagccaccagaauu

SEQ ID NO: 12282 - RNA, 1943 nt, Artificial Sequence
  mRNA product Design e-3 comprising derived and/or modified sequence from HRSV(Memphis-37)__AIY60640.1__F-del (opt2)
gggagacuuucccauucuguagcagaauuugguguugccuguggucuuggucccgcggagaagcuuaccauggagcuccccauccucaagaccaacgccaucaccaccauccucgccgccgucacccucugcuucgccuccucccagaacaucaccgaggaguucuaccaguccaccugcuccgccgucuccaagggcuaccucuccgcccuccgcaccggcugguacaccuccgucaucaccaucgagcucuccaacaucaaggagaacaagugcaacggcaccgacgccaaggucaagcucaucaagcaggagcucgacaaguacaagaacgccgucaccgagcuccagcuccucaugcaguccacccccgccgccaacaaccgcgcccgccgcgagcucccccgcuucaugaacuacacccucaacaacaccaagaacaacaacgucacccucuccaagaagcgcaagcgccgcuuccucggcuuccuccucggcgucggcuccgccaucgccuccggcaucgccgucuccaagguccuccaccucgagggcgaggucaacaagaucaagaacgcccuccucuccaccaacaaggccgucgucucccucuccaacggcgucuccguccucaccuccaagguccucgaccucaagaacuacaucgacaagcagcuccuccccaucgucaacaagcaguccugcuccaucuccaacaucgagaccgucaucgaguuccagcagaagaacaaccgccuccucgagaucacccgcgaguucuccgucaacgccggcgucaccacccccgucuccaccuacaugcucaccaacuccgagcuccucucccucaucaacgacaugcccaucaccaacgaccagaagaagcucauguccaacaacguccagaucguccgccagcaguccuacuccaucauguccaucaucaaggaggagguccucgccuacgucguccagcucccccucuacggcgucaucgacacccccugcuggaagcuccacaccuccccccucugcaccaccaacaccaaggagggcuccaacaucugccucacccgcaccgaccgcggcugguacugcgacaacgccggcuccgucuccuucuucccccaggccgagaccugcaagguccaguccaaccgcgucuucugcgacaccaugaacucccucacccuccccuccgaggucaaccucugcaacaucgacaucuucaaccccaaguacgacugcaagaucaugaccuccaagaccgacgucuccuccuccgucaucaccucccucggcgccaucgucuccugcuacggcaagaccaagugcaccgccuccaacaagaaccgcggcaucaucaagaccuucuccaacggcugcgacuacgucuccaacaagggcgucgacaccgucuccgucggcaacacccucuacuacgucaacaagcaggagggcaagucccucuacgucaagggcgagcccaucaucaacuucuacgacccccucgucuuccccuccgacgaguucgacgccuccaucucccaggucaacgagaagaucaaccagucccucgccuucauccgcaaguccgacgagcuccuccacaacgucaacgucggcaaguccaccaccaacaucaugaucaccaccaucaucaucgucaucaucgucauccuccuccuccucaucgccgucggccucuuccucuacugcaaggcccgcugaggacuaguguccaccugucccuccugggcugcuggauugucucguuuuccugccaaauaaacaggaucagcgcuuuacagaucuaaaaaaaaaaaaaaaaaaaaaaaaaaaaaaaaaaaaaaaaaaaaaaaaaaaaaaaaaaaaaaaaugcaucccccccccccccccccccccccccccccccaaaggcucuuuucagagccaccagaauu

SEQ ID NO: 12283 - RNA, 1943 nt, Artificial Sequence
  mRNA product Design e-3 comprising derived and/or modified sequence from HRSV(Memphis-37)__AIY60640.1__F-del (opt3)
gggagacuuucccauucuguagcagaauuugguguugccuguggucuuggucccgcggagaagcuuaccauggagcugcccauccucaagaccaacgccauuacaacuauacuugcugcagugacgcugugcuucgccagcucccagaauaucaccgaagaguuuuaccaaucuacauguucagcggucaguaaaggcuauuugagcgcuuuaagaacugggugguacaccuccguuauuacaaucgaacugucuaacauuaaggagaauaaaugcaacggaaccgacgccaaggugaaacuaaucaagcaggaacucgauaaguauaaaaaugcaguaacugagcugcagcuucugaugcagucgaccccugccgcuaacaauagggcacggcgcgaguugccacgauucaugaacuacacacucaauaacacgaagaauaacaaugugacucugagcaaaaagcguaaaagaagguuucuggguuuccucuuaggcgucgggucagccauagcuaguggaaucgccguguccaagguucugcaccuugaaggcgaggugaacaagauuaaaaaugcguugcugucuaccaacaaggcagucgugagccuauccaacgguguaucaguucucacaaguaaagugcuggaccuuaagaauuauaucgauaaacaacuguugccgauugucaacaagcagagcuguucuaucuccaauauagaaacugugauugaguuucagcagaaaaacaaucggcuccuggagaucacccgcgaguucucagugaacgccggggucacaacccccguuagcacguacauguuaacuaauagugaacugcucucucuuauuaacgacaugccuaucacaaaugaucaaaagaagcugauguccaacaaugugcagaucguaagacagcagagcuauucgauuaugucuauaaucaaagaagagguguuggcuuacgucgugcaacuaccacuguacggaguuauugacacccccugcuggaagcuccauacuuccccucuguguacaaccaacacgaaagaaggcucaaauaucugccuuaccaggacagaucggggcugguauugugacaacgccgggagugugagcuuuuucccacaggcagagacuugcaagguccaguccaaucgcguguuuugugauaccaugaacucucugacauugcccagcgagguaaaccucugcaauauagacauuuucaacccuaaauacgauuguaagaucaugacuucaaagaccgacguuaguuccagcgugaucacaucucugggagcuauugucucaugcuaugguaaaaccaagugcacugccaguaauaaaaaccgaggcaucauuaagacguuuagcaaugggugugauuacguguccaacaaaggagucgacacagugucuguuggcaauaccuuauauuacgugaacaagcaagaagguaagucgcuguauguaaaaggggagccaauaaucaauuucuacgacccgcuagucuuucccagcgaugaguucgacgcguccauuucacaggugaacgaaaagaucaaucagagucucgccuucaucagaaaaucugaugaacugcuucacaacguuaaugugggaaagagcacuaccaacauuaugauaacaaccaucauuaucgucauuaucgugauauugcugcuccugaucgcaguaggccuuuuucuguacugcaaagcuaggugaggacuaguguccaccugucccuccugggcugcuggauugucucguuuuccugccaaauaaacaggaucagcgcuuuacagaucuaaaaaaaaaaaaaaaaaaaaaaaaaaaaaaaaaaaaaaaaaaaaaaaaaaaaaaaaaaaaaaaaugcaucccccccccccccccccccccccccccccccaaaggcucuuuucagagccaccagaauu

SEQ ID NO: 12284 - RNA, 1943 nt, Artificial Sequence
  mRNA product Design e-3 comprising derived and/or modified sequence from HRSV(Memphis-37)__AIY60640.1__F-del (opt4)
gggagacuuucccauucuguagcagaauuugguguugccuguggucuuggucccgcggagaagcuuaccauggagcugcccauccugaagaccaacgccaucaccaccauccuggccgccgugacccugugcuucgccagcagccagaacaucaccgaggaguucuaccagagcaccugcagcgccgugagcaagggcuaccugagcgcccugagaaccggcugguacaccagcgugaucaccaucgagcugagcaacaucaaggagaacaagugcaacggcaccgacgccaaggugaagcugaucaagcaggagcuggacaaguacaagaacgccgugaccgagcugcagcugcugaugcagagcacccccgccgccaacaacagagccagaagagagcugcccagauucaugaacuacacccugaacaacaccaagaacaacaacgugacccugagcaagaagagaaagagaagauuccugggcuuccugcugggcgugggcagcgccaucgccagcggcaucgccgugagcaaggugcugcaccuggagggcgaggugaacaagaucaagaacgcccugcugagcaccaacaaggccguggugagccugagcaacggcgugagcgugcugaccagcaaggugcuggaccugaagaacuacaucgacaagcagcugcugcccaucgugaacaagcagagcugcagcaucagcaacaucgagaccgugaucgaguuccagcagaagaacaacagacugcuggagaucaccagagaguucagcgugaacgccggcgugaccacccccgugagcaccuacaugcugaccaacagcgagcugcugagccugaucaacgacaugcccaucaccaacgaccagaagaagcugaugagcaacaacgugcagaucgugagacagcagagcuacagcaucaugagcaucaucaaggaggaggugcuggccuacguggugcagcugccccuguacggcgugaucgacacccccugcuggaagcugcacaccagcccccugugcaccaccaacaccaaggagggcagcaacaucugccugaccagaaccgacagaggcugguacugcgacaacgccggcagcgugagcuucuucccccaggccgagaccugcaaggugcagagcaacagaguguucugcgacaccaugaacagccugacccugcccagcgaggugaaccugugcaacaucgacaucuucaaccccaaguacgacugcaagaucaugaccagcaagaccgacgugagcagcagcgugaucaccagccugggcgccaucgugagcugcuacggcaagaccaagugcaccgccagcaacaagaacagaggcaucaucaagaccuucagcaacggcugcgacuacgugagcaacaagggcguggacaccgugagcgugggcaacacccuguacuacgugaacaagcaggagggcaagagccuguacgugaagggcgagcccaucaucaacuucuacgacccccugguguuccccagcgacgaguucgacgccagcaucagccaggugaacgagaagaucaaccagagccuggccuucaucagaaagagcgacgagcugcugcacaacgugaacgugggcaagagcaccaccaacaucaugaucaccaccaucaucaucgugaucaucgugauccugcugcugcugaucgccgugggccuguuccuguacugcaaggccagaugaggacuaguguccaccugucccuccugggcugcuggauugucucguuuuccugccaaauaaacaggaucagcgcuuuacagaucuaaaaaaaaaaaaaaaaaaaaaaaaaaaaaaaaaaaaaaaaaaaaaaaaaaaaaaaaaaaaaaaaugcaucccccccccccccccccccccccccccccccaaaggcucuuuucagagccaccagaauu

SEQ ID NO: 12285 - RNA, 1943 nt, Artificial Sequence
  mRNA product Design e-3 comprising derived and/or modified sequence from HRSV(Memphis-37)__AIY60640.1__F-del (opt5)
gggagacuuucccauucuguagcagaauuugguguugccuguggucuuggucccgcggagaagcuuaccauggagcugcccauccucaagaccaacgccauuacaacgauccuggcugccgugacccuuugcuucgcgagcucccagaauauuacagaagaguuuuaccaaucuaccuguagcgcugucuccaaaggcuaucugucugcccucagaacagggugguacaccagcguuaucacaauugaacuguccaacaucaaggagaauaaaugcaacggaaccgacgccaaggugaaacuuaucaagcaggaacuggauaaguauaaaaaugcugugacggagcuccagcugcugaugcagucuaccccugccgcuaacaaucgggcccgcagagagcucccgcgguucaugaacuacacacugaauaacaccaagaauaacaaugucacacuuagcaaaaagcgcaaaagacgguuucugggcuuccuccugggggugggauccgcgauugccagcggcaucgcuguuucuaaggugcuucaccuggaaggggaggucaacaagauuaaaaaugcccuccuguccaccaacaaggcugugguuagccugucuaacggaguguccguccucacgagcaaagugcuggaccuuaagaauuauaucgauaaacaacugcuccccauugugaacaagcagucuuguuccaucagcaauauugaaacagucaucgaguuucagcagaaaaacaaucgccugcuugagaucaccagagaauuuuccguuaacgccggcgugacaaccccugugucuaccuacaugcugacaaauagcgagcuccugucccugauuaacgacaugcccaucacgaaugaucaaaagaagcucaugagcaacaauguccagauugugcggcagcagucuuauuccaucaugagcauuaucaaagaagagguucuggcguacgugguccaacuuccucuguacggcgugaucgacacccccugcuggaagcuccauacaucuccucuguguaccacaaacaccaaagaagggagcaauauuugccuuacgcgcacagauagaggaugguauugugacaacgccggcuccguuucuuucuucccgcaggcugagaccugcaaggugcagagcaaucgggucuuuugugauaccaugaacucccugacacuccccagcgaggugaaccugugcaauaucgacauuuucaacccuaaauacgauuguaagaucaugaccucuaagacagacgucuccagcucugugauuacgucccugggggccaucguuagcugcuauggaaaaaccaagugcacagcuuccaauaaaaaccgcggcaucauuaagaccuuuucuaaugggugugauuacgugagcaacaaaggagucgacacaguguccguuggcaauacccucuauuacgugaacaagcaagaaggcaagucucuguaugucaaaggggagcccaucauuaauuucuacgacccucuuguguuucccagcgaugaguucgacgccuccaucagccaggugaacgaaaagauuaaucagucucuggccuucaucagaaaauccgaugaacuccugcacaacguuaaugucggaaagagcacgaccaacauuaugaucacaaccaucauuaucgugauuaucgugauucugcuucuccugaucgcugucggccuguuucucuacugcaaagcgcggugaggacuaguguccaccugucccuccugggcugcuggauugucucguuuuccugccaaauaaacaggaucagcgcuuuacagaucuaaaaaaaaaaaaaaaaaaaaaaaaaaaaaaaaaaaaaaaaaaaaaaaaaaaaaaaaaaaaaaaaugcaucccccccccccccccccccccccccccccccaaaggcucuuuucagagccaccagaauu

SEQ ID NO: 12286 - RNA, 1943 nt, Artificial Sequence
  mRNA product Design e-3 comprising derived and/or modified sequence from HRSV(Memphis-37)__AIY60640.1__F-del (opt6)
gggagacuuucccauucuguagcagaauuugguguugccuguggucuuggucccgcggagaagcuuaccauggaacucccaauauuaaaaacuaacgcaaucacaaccauauuagcagccgucacucuaugcuuugccuccucacaaaauauaacagaagaauuuuaccaauccacaugcucagccguuagcaaaggauaucuaucagcccuaagaacaggcugguauacuucaguaauaacaauagaacuaucaaauauaaaagaaaacaaaugcaacggaaccgacgcuaaaguaaagcucauaaaacaagaauuagacaaauacaaaaaugcaguaacagaacuacaacuccuaaugcaaucaaccccagccgccaauaacagagcuagacgagaacuaccccgauucaugaauuacacacuaaacaacacaaaaaacaacaauguaacacucucaaaaaaaagaaaacgaagauucuuagguuuucuccugggaguaggaucagcaaucgcuuccggaaucgcagucaguaaaguccuucaccuugaaggcgaaguaaacaaaauaaaaaaugcacuacuaucuacaaauaaagcaguaguaucccuauccaauggcgucucaguauuaaccucaaaaguacucgaccuuaaaaauuauauagacaaacaauuacuacccauagucaauaaacaauccuguuccauaucaaacauagaaacaguaaucgaauuucaacaaaaaaacaacagauuacuagaaauaacacgcgaauuuucagucaacgccggaguaaccacacccgucucaacauacaugcuaaccaacuccgaacuacuaucacuuaucaacgacaugccaauaacaaaugaccaaaaaaaacucaugucaaacaacguacaaauaguccgccaacaaucauacucuauaaugucuauuaucaaagaagaaguucucgcauacguaguacaacuaccacuauauggugucauagacacaccauguuggaaacuccauacaucacccuuauguacaaccaauacaaaagaaggcucaaacaucugccuaacucgaacagaccgaggaugguacugcgacaaugcaggaucugucucauucuucccucaagcagaaacauguaaaguucaaucuaauagaguuuucugcgauacaaugaacucacuaacucuaccaucagaaguaaaucucuguaauauugacauauucaacccaaaauacgauugcaagaucaugacaucaaaaacugacguaucauccucagucaucaccucauuaggagcaaucguaagcuguuacgggaaaacaaaaugcaccgcuucuaacaaaaauagaggaauaauuaaaaccuucucaaacggaugcgauuacgucuccaauaaaggaguagauacaguaagcguaggaaauacucuauacuacgucaauaaacaagaaggaaaaucacuuuaugucaaaggagaacccauaauaaauuucuacgacccauuagucuucccaucagaugaauuugacgcauccauaucccaagucaacgaaaaaaucaaucaaucacuagcauucauacgaaaaucagacgaacuacuacacaacguuaacguaggaaaaucaacaaccaacaucaugauaaccacuauaauaaucgucauaauagucauccuauuauuacuaauagccguaggccuuuuccuauacuguaaagcuagauaaggacuaguguccaccugucccuccugggcugcuggauugucucguuuuccugccaaauaaacaggaucagcgcuuuacagaucuaaaaaaaaaaaaaaaaaaaaaaaaaaaaaaaaaaaaaaaaaaaaaaaaaaaaaaaaaaaaaaaaugcaucccccccccccccccccccccccccccccccaaaggcucuuuucagagccaccagaauu

SEQ ID NO: 12287 - RNA, 1943 nt, Artificial Sequence
  mRNA product Design e-3 comprising derived and/or modified sequence from HRSV(Memphis-37)__AIY60640.1__F-del (opt11)
gggagacuuucccauucuguagcagaauuugguguugccuguggucuuggucccgcggagaagcuuaccauggaacucccgauccucaaaaccaacgccaucaccacuauccucgccgccguaacccucugcuucgccucaucccaaaacaucaccgaagaauuuuaccaauccacaugcuccgccgucuccaaagguuaccucucagcccuccgcaccggcugguacaccuccguuaucaccaucgaacuuuccaacauaaaagagaacaagugcaacggcaccgacgcaaaaguaaaacuaaucaaacaagaacuagacaaauacaaaaacgccgucaccgaacuccagcuccucaugcaaucgacgcccgccgccaacaaccgagcaaggcgcgaacuuccacgcuucaugaacuacacccucaacaacacuaaaaacaacaacgugacccuauccaaaaagcguaaacgccgauuccuagguuuccuucucggugucggcuccgccauugccuccggcaucgcuguuuccaaaguccuccaccucgaaggcgaaguaaacaagauaaaaaacgcccuccucucuacaaacaaggccgugguaucgcucucuaacggcgucucuguacucaccuccaaaguccucgaccucaaaaacuacaucgacaagcaacuccucccuaucgucaauaaacaauccugcuccauuuccaacaucgaaacagugaucgaauuucaacaaaaaaacaaccgauuacuagaaaucacccgcgaauuuucagucaacgccggcgucacaacgccagucucaaccuacaugcucaccaacucagaacucuuaucacucaucaacgacaugcccaucacuaacgaccagaaaaaacugauguccaacaacgugcaaauaguccgccaacaguccuacuccaucauguccauaaucaaggaggaggugcucgccuacguaguccaacucccccucuacggagucauugacaccccuugcuggaaacuacacaccuccccucucugcaccaccaacaccaaagaaggcagcaacaucugccuaaccaggacggaccgaggaugguacugcgacaaugcaggcuccgucagcuucuucccacaagccgaaacaugcaaaguucaaucaaaccguguauucugcgacaccaugaacucacucacccuccccucagaaguaaaccuaugcaacauagauaucuucaaccccaaauacgacugcaaaauuaugaccuccaaaaccgaugucuccagcuccguuaucacgucacucggcgccaucgucuccugcuacggcaagaccaaaugcaccgccuccaacaaaaaccgcggaauaaucaaaacauucucuaacggcugcgacuacgucuccaauaaaggcgucgacaccgucuccgugggcaacacgcuguacuacgucaacaaacaagaaggcaaaucucuuuacgucaaaggugaaccaaucaucaacuucuacgacccccucguauuccccuccgacgaauuugacgcgagcaucucccaagucaacgaaaagaucaaccaaucccucgccuucauccgaaaaagcgacgaacuccuccacaacgucaacgucggcaaaaguaccacaaacauuaugaucaccaccaucaucauagucaucaucgucauccugcuccuacuaauagccgucggccucuucuuguacugcaaggcacgaugaggacuaguguccaccugucccuccugggcugcuggauugucucguuuuccugccaaauaaacaggaucagcgcuuuacagaucuaaaaaaaaaaaaaaaaaaaaaaaaaaaaaaaaaaaaaaaaaaaaaaaaaaaaaaaaaaaaaaaaugcaucccccccccccccccccccccccccccccccaaaggcucuuuucagagccaccagaauu

SEQ ID NO: 12288 - RNA, 1997 nt, Artificial Sequence
  mRNA product Design e-4 comprising derived and/or modified sequence from HRSV(Memphis-37)__AIY60640.1__F-del (wt)
gggagacuccugucgggcggaaguaggaggaguagaguuuaaaaacaguacucuuuuuccgguucgggacguaguugaagcaacgacaagccggauaaccgcucuugagacaggaagcuuaccauggaguugccaauccucaaaacaaaugcaauuaccacaauccuugcugcagucacacucuguuucgcuuccagucaaaacaucacugaagaauuuuaucaaucaacaugcagugcaguuagcaaaggcuaucuuagugcuuuaagaacugguugguauacuaguguuauaacuauagaauuaaguaauaucaaggaaaauaaguguaauggaacagaugcuaagguaaaauugauaaaacaagaauuagauaaauauaaaaaugcuguaacagaauugcaguugcucaugcaaagcacaccagcagccaacaaucgagccagaagagaacuaccaagguuuaugaauuauacacucaacaauaccaaaaauaacaauguaacauuaagcaagaaaaggaaaagaagauuucuuggcuuuuuguuagguguuggaucugcaaucgccaguggcauugcuguaucuaaaguccugcaccuagaaggggaagugaacaaaaucaaaaaugcucuacuauccacaaacaaggcuguagucagcuuaucaaauggaguuagugucuuaaccagcaaaguguuagaccucaaaaacuauauagauaaacaguuguuacccauugugaacaagcaaagcugcagcauaucaaacauugaaacugugauagaauuccaacaaaagaacaacagacuacuagagauuaccagggaauuuaguguuaaugcagguguaacuacaccuguaagcacuuauauguuaacaaauagugaauuauuaucauuaaucaaugauaugccuauaacaaaugaucagaaaaaguuaauguccaacaauguucaaauaguuagacagcaaaguuacucuaucauguccauaauaaaggaggaagucuuagcauauguaguucaauuaccacuauaugguguaauagauacaccuuguuggaaacuacacacauccccucuaugcacaaccaacacaaaggaaggguccaacaucuguuuaacaagaaccgacagaggaugguacugugacaaugcaggaucagugucuuucuucccacaagcugaaacaugcaaaguucaaucgaaucgaguauuuugugacacaaugaacagucuaacauuaccaagugaaguaaaucucugcaacauugacauauucaacccuaaauaugauugcaaaauuaugacuucaaaaacagaugugagcagcuccguuaucacaucucuaggagccauugugucaugcuauggcaaaacuaaauguacagcauccaauaaaaaucguggaaucauaaagacauuuucuaacgggugugauuauguaucaaauaaggggguggacacuguaucuguagguaauacauuauauuauguaaauaagcaagaaggaaaaagccucuauguaaaaggugaaccaauaauaaauuucuaugacccauuaguguucccuucugaugaauuugaugcaucaauaucucaagucaaugagaagauuaaccagagccuagcauuuauucguaaauccgaugaauuauuacauaauguaaauguugguaaauccaccacaaauaucaugauaacuacuauaauuauagugauuauaguaauauuguuauuauuaauugcaguugggcuguuccuauacugcaaggccagaugaggacuaguguccaccugucccuccugggcugcuggauugucucguuuuccugccaaauaaacaggaucagcgcuuuacagaucuaaaaaaaaaaaaaaaaaaaaaaaaaaaaaaaaaaaaaaaaaaaaaaaaaaaaaaaaaaaaaaaaugcaucccccccccccccccccccccccccccccccaaaggcucuuuucagagccaccagaauu

SEQ ID NO: 12289 - RNA, 1997 nt, Artificial Sequence
  mRNA product Design e-4 comprising derived and/or modified sequence from HRSV(Memphis-37)__AIY60640.1__F-del (opt1)
gggagacuccugucgggcggaaguaggaggaguagaguuuaaaaacaguacucuuuuuccgguucgggacguaguugaagcaacgacaagccggauaaccgcucuugagacaggaagcuuaccauggagcugcccauccucaagaccaacgccaucaccacgauccuggccgcggugacccugugcuucgccagcucccagaacaucaccgaggaguucuaccagagcacgugcuccgccgucagcaagggcuaccucuccgcccugcgcaccgggugguacaccagcgugaucaccaucgagcuguccaacaucaaggagaacaagugcaacggcaccgacgccaaggugaagcucaucaagcaggagcuggacaaguacaagaacgcggucacggagcugcagcuccugaugcagagcaccccggccgccaacaaccgggcccgccgggagcugccccgcuucaugaacuacacccucaacaacaccaagaacaacaacgugacgcuguccaagaagcggaagcgccgguuccugggguuccuccugggcguggggagcgcgaucgccuccggcaucgccgucagcaaggugcugcaccucgagggcgaggugaacaagaucaagaacgcccugcuguccaccaacaaggccgucgugagccucuccaacggggugagcguccugaccuccaaggugcuggaccucaagaacuacaucgacaagcagcugcugcccaucgugaacaagcagagcugcuccaucagcaacaucgagaccgucaucgaguuccagcagaagaacaaccgccuccuggagaucacgcgggaguucagcgugaacgcgggcgugaccacccccgucuccaccuacaugcugacgaacagcgagcuccugucccugaucaacgacaugccgaucaccaacgaccagaagaagcucaugagcaacaacgugcagaucgugcgccagcaguccuacagcaucauguccaucaucaaggaggagguccuggccuacguggugcagcugccccucuacggggucaucgacacccccugcuggaagcugcacaccagcccccugugcacgaccaacaccaaggagggcuccaacaucugccucacccggacggaccgcgggugguacugcgacaacgccggcagcguguccuucuucccgcaggccgagaccugcaagguccagagcaaccggguguucugcgacaccaugaacucccugacccugcccagcgaggugaaccucugcaacaucgacaucuucaaccccaaguacgacugcaagaucaugacguccaagaccgacgucagcuccagcgugaucaccucccugggcgccaucgugagcugcuacgggaagaccaagugcacggcgagcaacaagaaccgcggcaucaucaagaccuucuccaacgggugcgacuacgucagcaacaagggcguggacaccguguccgucggcaacacccuguacuacgugaacaagcaggagggcaagagccucuacgugaagggggagcccaucaucaacuucuacgacccgcuggucuuccccuccgacgaguucgacgccagcaucucccaggugaacgagaagaucaaccagagccuggccuucauccggaaguccgacgagcuccugcacaacgugaacgucggcaagagcaccacgaacaucaugaucaccaccaucaucaucgugaucaucgugauccugcugcuccugaucgccgucgggcuguuccucuacugcaaggcccgcugaggacuaguguccaccugucccuccugggcugcuggauugucucguuuuccugccaaauaaacaggaucagcgcuuuacagaucuaaaaaaaaaaaaaaaaaaaaaaaaaaaaaaaaaaaaaaaaaaaaaaaaaaaaaaaaaaaaaaaaugcaucccccccccccccccccccccccccccccccaaaggcucuuuucagagccaccagaauu

SEQ ID NO: 12290 - RNA, 1997 nt, Artificial Sequence
  mRNA product Design e-4 comprising derived and/or modified sequence from HRSV(Memphis-37)__AIY60640.1__F-del (opt2)
gggagacuccugucgggcggaaguaggaggaguagaguuuaaaaacaguacucuuuuuccgguucgggacguaguugaagcaacgacaagccggauaaccgcucuugagacaggaagcuuaccauggagcuccccauccucaagaccaacgccaucaccaccauccucgccgccgucacccucugcuucgccuccucccagaacaucaccgaggaguucuaccaguccaccugcuccgccgucuccaagggcuaccucuccgcccuccgcaccggcugguacaccuccgucaucaccaucgagcucuccaacaucaaggagaacaagugcaacggcaccgacgccaaggucaagcucaucaagcaggagcucgacaaguacaagaacgccgucaccgagcuccagcuccucaugcaguccacccccgccgccaacaaccgcgcccgccgcgagcucccccgcuucaugaacuacacccucaacaacaccaagaacaacaacgucacccucuccaagaagcgcaagcgccgcuuccucggcuuccuccucggcgucggcuccgccaucgccuccggcaucgccgucuccaagguccuccaccucgagggcgaggucaacaagaucaagaacgcccuccucuccaccaacaaggccgucgucucccucuccaacggcgucuccguccucaccuccaagguccucgaccucaagaacuacaucgacaagcagcuccuccccaucgucaacaagcaguccugcuccaucuccaacaucgagaccgucaucgaguuccagcagaagaacaaccgccuccucgagaucacccgcgaguucuccgucaacgccggcgucaccacccccgucuccaccuacaugcucaccaacuccgagcuccucucccucaucaacgacaugcccaucaccaacgaccagaagaagcucauguccaacaacguccagaucguccgccagcaguccuacuccaucauguccaucaucaaggaggagguccucgccuacgucguccagcucccccucuacggcgucaucgacacccccugcuggaagcuccacaccuccccccucugcaccaccaacaccaaggagggcuccaacaucugccucacccgcaccgaccgcggcugguacugcgacaacgccggcuccgucuccuucuucccccaggccgagaccugcaagguccaguccaaccgcgucuucugcgacaccaugaacucccucacccuccccuccgaggucaaccucugcaacaucgacaucuucaaccccaaguacgacugcaagaucaugaccuccaagaccgacgucuccuccuccgucaucaccucccucggcgccaucgucuccugcuacggcaagaccaagugcaccgccuccaacaagaaccgcggcaucaucaagaccuucuccaacggcugcgacuacgucuccaacaagggcgucgacaccgucuccgucggcaacacccucuacuacgucaacaagcaggagggcaagucccucuacgucaagggcgagcccaucaucaacuucuacgacccccucgucuuccccuccgacgaguucgacgccuccaucucccaggucaacgagaagaucaaccagucccucgccuucauccgcaaguccgacgagcuccuccacaacgucaacgucggcaaguccaccaccaacaucaugaucaccaccaucaucaucgucaucaucgucauccuccuccuccucaucgccgucggccucuuccucuacugcaaggcccgcugaggacuaguguccaccugucccuccugggcugcuggauugucucguuuuccugccaaauaaacaggaucagcgcuuuacagaucuaaaaaaaaaaaaaaaaaaaaaaaaaaaaaaaaaaaaaaaaaaaaaaaaaaaaaaaaaaaaaaaaugcaucccccccccccccccccccccccccccccccaaaggcucuuuucagagccaccagaauu

SEQ ID NO: 12291 - RNA, 1997 nt, Artificial Sequence
  mRNA product Design e-4 comprising derived and/or modified sequence from HRSV(Memphis-37)__AIY60640.1__F-del (opt3)
gggagacuccugucgggcggaaguaggaggaguagaguuuaaaaacaguacucuuuuuccgguucgggacguaguugaagcaacgacaagccggauaaccgcucuugagacaggaagcuuaccauggagcugcccauccucaagaccaacgccauuacaacuauacuugcugcagugacgcugugcuucgccagcucccagaauaucaccgaagaguuuuaccaaucuacauguucagcggucaguaaaggcuauuugagcgcuuuaagaacugggugguacaccuccguuauuacaaucgaacugucuaacauuaaggagaauaaaugcaacggaaccgacgccaaggugaaacuaaucaagcaggaacucgauaaguauaaaaaugcaguaacugagcugcagcuucugaugcagucgaccccugccgcuaacaauagggcacggcgcgaguugccacgauucaugaacuacacacucaauaacacgaagaauaacaaugugacucugagcaaaaagcguaaaagaagguuucuggguuuccucuuaggcgucgggucagccauagcuaguggaaucgccguguccaagguucugcaccuugaaggcgaggugaacaagauuaaaaaugcguugcugucuaccaacaaggcagucgugagccuauccaacgguguaucaguucucacaaguaaagugcuggaccuuaagaauuauaucgauaaacaacuguugccgauugucaacaagcagagcuguucuaucuccaauauagaaacugugauugaguuucagcagaaaaacaaucggcuccuggagaucacccgcgaguucucagugaacgccggggucacaacccccguuagcacguacauguuaacuaauagugaacugcucucucuuauuaacgacaugccuaucacaaaugaucaaaagaagcugauguccaacaaugugcagaucguaagacagcagagcuauucgauuaugucuauaaucaaagaagagguguuggcuuacgucgugcaacuaccacuguacggaguuauugacacccccugcuggaagcuccauacuuccccucuguguacaaccaacacgaaagaaggcucaaauaucugccuuaccaggacagaucggggcugguauugugacaacgccgggagugugagcuuuuucccacaggcagagacuugcaagguccaguccaaucgcguguuuugugauaccaugaacucucugacauugcccagcgagguaaaccucugcaauauagacauuuucaacccuaaauacgauuguaagaucaugacuucaaagaccgacguuaguuccagcgugaucacaucucugggagcuauugucucaugcuaugguaaaaccaagugcacugccaguaauaaaaaccgaggcaucauuaagacguuuagcaaugggugugauuacguguccaacaaaggagucgacacagugucuguuggcaauaccuuauauuacgugaacaagcaagaagguaagucgcuguauguaaaaggggagccaauaaucaauuucuacgacccgcuagucuuucccagcgaugaguucgacgcguccauuucacaggugaacgaaaagaucaaucagagucucgccuucaucagaaaaucugaugaacugcuucacaacguuaaugugggaaagagcacuaccaacauuaugauaacaaccaucauuaucgucauuaucgugauauugcugcuccugaucgcaguaggccuuuuucuguacugcaaagcuaggugaggacuaguguccaccugucccuccugggcugcuggauugucucguuuuccugccaaauaaacaggaucagcgcuuuacagaucuaaaaaaaaaaaaaaaaaaaaaaaaaaaaaaaaaaaaaaaaaaaaaaaaaaaaaaaaaaaaaaaaugcaucccccccccccccccccccccccccccccccaaaggcucuuuucagagccaccagaauu

SEQ ID NO: 12292 - RNA, 1997 nt, Artificial Sequence
  mRNA product Design e-4 comprising derived and/or modified sequence from HRSV(Memphis-37)__AIY60640.1__F-del (opt4)
gggagacuccugucgggcggaaguaggaggaguagaguuuaaaaacaguacucuuuuuccgguucgggacguaguugaagcaacgacaagccggauaaccgcucuugagacaggaagcuuaccauggagcugcccauccugaagaccaacgccaucaccaccauccuggccgccgugacccugugcuucgccagcagccagaacaucaccgaggaguucuaccagagcaccugcagcgccgugagcaagggcuaccugagcgcccugagaaccggcugguacaccagcgugaucaccaucgagcugagcaacaucaaggagaacaagugcaacggcaccgacgccaaggugaagcugaucaagcaggagcuggacaaguacaagaacgccgugaccgagcugcagcugcugaugcagagcacccccgccgccaacaacagagccagaagagagcugcccagauucaugaacuacacccugaacaacaccaagaacaacaacgugacccugagcaagaagagaaagagaagauuccugggcuuccugcugggcgugggcagcgccaucgccagcggcaucgccgugagcaaggugcugcaccuggagggcgaggugaacaagaucaagaacgcccugcugagcaccaacaaggccguggugagccugagcaacggcgugagcgugcugaccagcaaggugcuggaccugaagaacuacaucgacaagcagcugcugcccaucgugaacaagcagagcugcagcaucagcaacaucgagaccgugaucgaguuccagcagaagaacaacagacugcuggagaucaccagagaguucagcgugaacgccggcgugaccacccccgugagcaccuacaugcugaccaacagcgagcugcugagccugaucaacgacaugcccaucaccaacgaccagaagaagcugaugagcaacaacgugcagaucgugagacagcagagcuacagcaucaugagcaucaucaaggaggaggugcuggccuacguggugcagcugccccuguacggcgugaucgacacccccugcuggaagcugcacaccagcccccugugcaccaccaacaccaaggagggcagcaacaucugccugaccagaaccgacagaggcugguacugcgacaacgccggcagcgugagcuucuucccccaggccgagaccugcaaggugcagagcaacagaguguucugcgacaccaugaacagccugacccugcccagcgaggugaaccugugcaacaucgacaucuucaaccccaaguacgacugcaagaucaugaccagcaagaccgacgugagcagcagcgugaucaccagccugggcgccaucgugagcugcuacggcaagaccaagugcaccgccagcaacaagaacagaggcaucaucaagaccuucagcaacggcugcgacuacgugagcaacaagggcguggacaccgugagcgugggcaacacccuguacuacgugaacaagcaggagggcaagagccuguacgugaagggcgagcccaucaucaacuucuacgacccccugguguuccccagcgacgaguucgacgccagcaucagccaggugaacgagaagaucaaccagagccuggccuucaucagaaagagcgacgagcugcugcacaacgugaacgugggcaagagcaccaccaacaucaugaucaccaccaucaucaucgugaucaucgugauccugcugcugcugaucgccgugggccuguuccuguacugcaaggccagaugaggacuaguguccaccugucccuccugggcugcuggauugucucguuuuccugccaaauaaacaggaucagcgcuuuacagaucuaaaaaaaaaaaaaaaaaaaaaaaaaaaaaaaaaaaaaaaaaaaaaaaaaaaaaaaaaaaaaaaaugcaucccccccccccccccccccccccccccccccaaaggcucuuuucagagccaccagaauu

SEQ ID NO: 12293 - RNA, 1997 nt, Artificial Sequence
  mRNA product Design e-4 comprising derived and/or modified sequence from HRSV(Memphis-37)__AIY60640.1__F-del (opt5)
gggagacuccugucgggcggaaguaggaggaguagaguuuaaaaacaguacucuuuuuccgguucgggacguaguugaagcaacgacaagccggauaaccgcucuugagacaggaagcuuaccauggagcugcccauccucaagaccaacgccauuacaacgauccuggcugccgugacccuuugcuucgcgagcucccagaauauuacagaagaguuuuaccaaucuaccuguagcgcugucuccaaaggcuaucugucugcccucagaacagggugguacaccagcguuaucacaauugaacuguccaacaucaaggagaauaaaugcaacggaaccgacgccaaggugaaacuuaucaagcaggaacuggauaaguauaaaaaugcugugacggagcuccagcugcugaugcagucuaccccugccgcuaacaaucgggcccgcagagagcucccgcgguucaugaacuacacacugaauaacaccaagaauaacaaugucacacuuagcaaaaagcgcaaaagacgguuucugggcuuccuccugggggugggauccgcgauugccagcggcaucgcuguuucuaaggugcuucaccuggaaggggaggucaacaagauuaaaaaugcccuccuguccaccaacaaggcugugguuagccugucuaacggaguguccguccucacgagcaaagugcuggaccuuaagaauuauaucgauaaacaacugcuccccauugugaacaagcagucuuguuccaucagcaauauugaaacagucaucgaguuucagcagaaaaacaaucgccugcuugagaucaccagagaauuuuccguuaacgccggcgugacaaccccugugucuaccuacaugcugacaaauagcgagcuccugucccugauuaacgacaugcccaucacgaaugaucaaaagaagcucaugagcaacaauguccagauugugcggcagcagucuuauuccaucaugagcauuaucaaagaagagguucuggcguacgugguccaacuuccucuguacggcgugaucgacacccccugcuggaagcuccauacaucuccucuguguaccacaaacaccaaagaagggagcaauauuugccuuacgcgcacagauagaggaugguauugugacaacgccggcuccguuucuuucuucccgcaggcugagaccugcaaggugcagagcaaucgggucuuuugugauaccaugaacucccugacacuccccagcgaggugaaccugugcaauaucgacauuuucaacccuaaauacgauuguaagaucaugaccucuaagacagacgucuccagcucugugauuacgucccugggggccaucguuagcugcuauggaaaaaccaagugcacagcuuccaauaaaaaccgcggcaucauuaagaccuuuucuaaugggugugauuacgugagcaacaaaggagucgacacaguguccguuggcaauacccucuauuacgugaacaagcaagaaggcaagucucuguaugucaaaggggagcccaucauuaauuucuacgacccucuuguguuucccagcgaugaguucgacgccuccaucagccaggugaacgaaaagauuaaucagucucuggccuucaucagaaaauccgaugaacuccugcacaacguuaaugucggaaagagcacgaccaacauuaugaucacaaccaucauuaucgugauuaucgugauucugcuucuccugaucgcugucggccuguuucucuacugcaaagcgcggugaggacuaguguccaccugucccuccugggcugcuggauugucucguuuuccugccaaauaaacaggaucagcgcuuuacagaucuaaaaaaaaaaaaaaaaaaaaaaaaaaaaaaaaaaaaaaaaaaaaaaaaaaaaaaaaaaaaaaaaugcaucccccccccccccccccccccccccccccccaaaggcucuuuucagagccaccagaauu

SEQ ID NO: 12294 - RNA, 1997 nt, Artificial Sequence
  mRNA product Design e-4 comprising derived and/or modified sequence from HRSV(Memphis-37)__AIY60640.1__F-del (opt6)
gggagacuccugucgggcggaaguaggaggaguagaguuuaaaaacaguacucuuuuuccgguucgggacguaguugaagcaacgacaagccggauaaccgcucuugagacaggaagcuuaccauggaacucccaauauuaaaaacuaacgcaaucacaaccauauuagcagccgucacucuaugcuuugccuccucacaaaauauaacagaagaauuuuaccaauccacaugcucagccguuagcaaaggauaucuaucagcccuaagaacaggcugguauacuucaguaauaacaauagaacuaucaaauauaaaagaaaacaaaugcaacggaaccgacgcuaaaguaaagcucauaaaacaagaauuagacaaauacaaaaaugcaguaacagaacuacaacuccuaaugcaaucaaccccagccgccaauaacagagcuagacgagaacuaccccgauucaugaauuacacacuaaacaacacaaaaaacaacaauguaacacucucaaaaaaaagaaaacgaagauucuuagguuuucuccugggaguaggaucagcaaucgcuuccggaaucgcagucaguaaaguccuucaccuugaaggcgaaguaaacaaaauaaaaaaugcacuacuaucuacaaauaaagcaguaguaucccuauccaauggcgucucaguauuaaccucaaaaguacucgaccuuaaaaauuauauagacaaacaauuacuacccauagucaauaaacaauccuguuccauaucaaacauagaaacaguaaucgaauuucaacaaaaaaacaacagauuacuagaaauaacacgcgaauuuucagucaacgccggaguaaccacacccgucucaacauacaugcuaaccaacuccgaacuacuaucacuuaucaacgacaugccaauaacaaaugaccaaaaaaaacucaugucaaacaacguacaaauaguccgccaacaaucauacucuauaaugucuauuaucaaagaagaaguucucgcauacguaguacaacuaccacuauauggugucauagacacaccauguuggaaacuccauacaucacccuuauguacaaccaauacaaaagaaggcucaaacaucugccuaacucgaacagaccgaggaugguacugcgacaaugcaggaucugucucauucuucccucaagcagaaacauguaaaguucaaucuaauagaguuuucugcgauacaaugaacucacuaacucuaccaucagaaguaaaucucuguaauauugacauauucaacccaaaauacgauugcaagaucaugacaucaaaaacugacguaucauccucagucaucaccucauuaggagcaaucguaagcuguuacgggaaaacaaaaugcaccgcuucuaacaaaaauagaggaauaauuaaaaccuucucaaacggaugcgauuacgucuccaauaaaggaguagauacaguaagcguaggaaauacucuauacuacgucaauaaacaagaaggaaaaucacuuuaugucaaaggagaacccauaauaaauuucuacgacccauuagucuucccaucagaugaauuugacgcauccauaucccaagucaacgaaaaaaucaaucaaucacuagcauucauacgaaaaucagacgaacuacuacacaacguuaacguaggaaaaucaacaaccaacaucaugauaaccacuauaauaaucgucauaauagucauccuauuauuacuaauagccguaggccuuuuccuauacuguaaagcuagauaaggacuaguguccaccugucccuccugggcugcuggauugucucguuuuccugccaaauaaacaggaucagcgcuuuacagaucuaaaaaaaaaaaaaaaaaaaaaaaaaaaaaaaaaaaaaaaaaaaaaaaaaaaaaaaaaaaaaaaaugcaucccccccccccccccccccccccccccccccaaaggcucuuuucagagccaccagaauu

SEQ ID NO: 12295 - RNA, 1997 nt, Artificial Sequence
  mRNA product Design e-4 comprising derived and/or modified sequence from HRSV(Memphis-37)__AIY60640.1__F-del (opt11)
gggagacuccugucgggcggaaguaggaggaguagaguuuaaaaacaguacucuuuuuccgguucgggacguaguugaagcaacgacaagccggauaaccgcucuugagacaggaagcuuaccauggaacucccgauccucaaaaccaacgccaucaccacuauccucgccgccguaacccucugcuucgccucaucccaaaacaucaccgaagaauuuuaccaauccacaugcuccgccgucuccaaagguuaccucucagcccuccgcaccggcugguacaccuccguuaucaccaucgaacuuuccaacauaaaagagaacaagugcaacggcaccgacgcaaaaguaaaacuaaucaaacaagaacuagacaaauacaaaaacgccgucaccgaacuccagcuccucaugcaaucgacgcccgccgccaacaaccgagcaaggcgcgaacuuccacgcuucaugaacuacacccucaacaacacuaaaaacaacaacgugacccuauccaaaaagcguaaacgccgauuccuagguuuccuucucggugucggcuccgccauugccuccggcaucgcuguuuccaaaguccuccaccucgaaggcgaaguaaacaagauaaaaaacgcccuccucucuacaaacaaggccgugguaucgcucucuaacggcgucucuguacucaccuccaaaguccucgaccucaaaaacuacaucgacaagcaacuccucccuaucgucaauaaacaauccugcuccauuuccaacaucgaaacagugaucgaauuucaacaaaaaaacaaccgauuacuagaaaucacccgcgaauuuucagucaacgccggcgucacaacgccagucucaaccuacaugcucaccaacucagaacucuuaucacucaucaacgacaugcccaucacuaacgaccagaaaaaacugauguccaacaacgugcaaauaguccgccaacaguccuacuccaucauguccauaaucaaggaggaggugcucgccuacguaguccaacucccccucuacggagucauugacaccccuugcuggaaacuacacaccuccccucucugcaccaccaacaccaaagaaggcagcaacaucugccuaaccaggacggaccgaggaugguacugcgacaaugcaggcuccgucagcuucuucccacaagccgaaacaugcaaaguucaaucaaaccguguauucugcgacaccaugaacucacucacccuccccucagaaguaaaccuaugcaacauagauaucuucaaccccaaauacgacugcaaaauuaugaccuccaaaaccgaugucuccagcuccguuaucacgucacucggcgccaucgucuccugcuacggcaagaccaaaugcaccgccuccaacaaaaaccgcggaauaaucaaaacauucucuaacggcugcgacuacgucuccaauaaaggcgucgacaccgucuccgugggcaacacgcuguacuacgucaacaaacaagaaggcaaaucucuuuacgucaaaggugaaccaaucaucaacuucuacgacccccucguauuccccuccgacgaauuugacgcgagcaucucccaagucaacgaaaagaucaaccaaucccucgccuucauccgaaaaagcgacgaacuccuccacaacgucaacgucggcaaaaguaccacaaacauuaugaucaccaccaucaucauagucaucaucgucauccugcuccuacuaauagccgucggccucuucuuguacugcaaggcacgaugaggacuaguguccaccugucccuccugggcugcuggauugucucguuuuccugccaaauaaacaggaucagcgcuuuacagaucuaaaaaaaaaaaaaaaaaaaaaaaaaaaaaaaaaaaaaaaaaaaaaaaaaaaaaaaaaaaaaaaaugcaucccccccccccccccccccccccccccccccaaaggcucuuuucagagccaccagaauu

SEQ ID NO: 12296 - RNA, 1964 nt, Artificial Sequence
  mRNA product Design e-5 comprising derived and/or modified sequence from HRSV(Memphis-37)__AIY60640.1__F-del (wt)
gggagagcggcucggccauuuugucccagucaguccggaggcugcggcugcagaaguaccgccugcggaguaacugcaaagaagcuuaccauggaguugccaauccucaaaacaaaugcaauuaccacaauccuugcugcagucacacucuguuucgcuuccagucaaaacaucacugaagaauuuuaucaaucaacaugcagugcaguuagcaaaggcuaucuuagugcuuuaagaacugguugguauacuaguguuauaacuauagaauuaaguaauaucaaggaaaauaaguguaauggaacagaugcuaagguaaaauugauaaaacaagaauuagauaaauauaaaaaugcuguaacagaauugcaguugcucaugcaaagcacaccagcagccaacaaucgagccagaagagaacuaccaagguuuaugaauuauacacucaacaauaccaaaaauaacaauguaacauuaagcaagaaaaggaaaagaagauuucuuggcuuuuuguuagguguuggaucugcaaucgccaguggcauugcuguaucuaaaguccugcaccuagaaggggaagugaacaaaaucaaaaaugcucuacuauccacaaacaaggcuguagucagcuuaucaaauggaguuagugucuuaaccagcaaaguguuagaccucaaaaacuauauagauaaacaguuguuacccauugugaacaagcaaagcugcagcauaucaaacauugaaacugugauagaauuccaacaaaagaacaacagacuacuagagauuaccagggaauuuaguguuaaugcagguguaacuacaccuguaagcacuuauauguuaacaaauagugaauuauuaucauuaaucaaugauaugccuauaacaaaugaucagaaaaaguuaauguccaacaauguucaaauaguuagacagcaaaguuacucuaucauguccauaauaaaggaggaagucuuagcauauguaguucaauuaccacuauaugguguaauagauacaccuuguuggaaacuacacacauccccucuaugcacaaccaacacaaaggaaggguccaacaucuguuuaacaagaaccgacagaggaugguacugugacaaugcaggaucagugucuuucuucccacaagcugaaacaugcaaaguucaaucgaaucgaguauuuugugacacaaugaacagucuaacauuaccaagugaaguaaaucucugcaacauugacauauucaacccuaaauaugauugcaaaauuaugacuucaaaaacagaugugagcagcuccguuaucacaucucuaggagccauugugucaugcuauggcaaaacuaaauguacagcauccaauaaaaaucguggaaucauaaagacauuuucuaacgggugugauuauguaucaaauaaggggguggacacuguaucuguagguaauacauuauauuauguaaauaagcaagaaggaaaaagccucuauguaaaaggugaaccaauaauaaauuucuaugacccauuaguguucccuucugaugaauuugaugcaucaauaucucaagucaaugagaagauuaaccagagccuagcauuuauucguaaauccgaugaauuauuacauaauguaaauguugguaaauccaccacaaauaucaugauaacuacuauaauuauagugauuauaguaauauuguuauuauuaauugcaguugggcuguuccuauacugcaaggccagaugaggacuaguguccaccugucccuccugggcugcuggauugucucguuuuccugccaaauaaacaggaucagcgcuuuacagaucuaaaaaaaaaaaaaaaaaaaaaaaaaaaaaaaaaaaaaaaaaaaaaaaaaaaaaaaaaaaaaaaaugcaucccccccccccccccccccccccccccccccaaaggcucuuuucagagccaccagaauu

SEQ ID NO: 12297 - RNA, 1964 nt, Artificial Sequence
  mRNA product Design e-5 comprising derived and/or modified sequence from HRSV(Memphis-37)__AIY60640.1__F-del (opt1)
gggagagcggcucggccauuuugucccagucaguccggaggcugcggcugcagaaguaccgccugcggaguaacugcaaagaagcuuaccauggagcugcccauccucaagaccaacgccaucaccacgauccuggccgcggugacccugugcuucgccagcucccagaacaucaccgaggaguucuaccagagcacgugcuccgccgucagcaagggcuaccucuccgcccugcgcaccgggugguacaccagcgugaucaccaucgagcuguccaacaucaaggagaacaagugcaacggcaccgacgccaaggugaagcucaucaagcaggagcuggacaaguacaagaacgcggucacggagcugcagcuccugaugcagagcaccccggccgccaacaaccgggcccgccgggagcugccccgcuucaugaacuacacccucaacaacaccaagaacaacaacgugacgcuguccaagaagcggaagcgccgguuccugggguuccuccugggcguggggagcgcgaucgccuccggcaucgccgucagcaaggugcugcaccucgagggcgaggugaacaagaucaagaacgcccugcuguccaccaacaaggccgucgugagccucuccaacggggugagcguccugaccuccaaggugcuggaccucaagaacuacaucgacaagcagcugcugcccaucgugaacaagcagagcugcuccaucagcaacaucgagaccgucaucgaguuccagcagaagaacaaccgccuccuggagaucacgcgggaguucagcgugaacgcgggcgugaccacccccgucuccaccuacaugcugacgaacagcgagcuccugucccugaucaacgacaugccgaucaccaacgaccagaagaagcucaugagcaacaacgugcagaucgugcgccagcaguccuacagcaucauguccaucaucaaggaggagguccuggccuacguggugcagcugccccucuacggggucaucgacacccccugcuggaagcugcacaccagcccccugugcacgaccaacaccaaggagggcuccaacaucugccucacccggacggaccgcgggugguacugcgacaacgccggcagcguguccuucuucccgcaggccgagaccugcaagguccagagcaaccggguguucugcgacaccaugaacucccugacccugcccagcgaggugaaccucugcaacaucgacaucuucaaccccaaguacgacugcaagaucaugacguccaagaccgacgucagcuccagcgugaucaccucccugggcgccaucgugagcugcuacgggaagaccaagugcacggcgagcaacaagaaccgcggcaucaucaagaccuucuccaacgggugcgacuacgucagcaacaagggcguggacaccguguccgucggcaacacccuguacuacgugaacaagcaggagggcaagagccucuacgugaagggggagcccaucaucaacuucuacgacccgcuggucuuccccuccgacgaguucgacgccagcaucucccaggugaacgagaagaucaaccagagccuggccuucauccggaaguccgacgagcuccugcacaacgugaacgucggcaagagcaccacgaacaucaugaucaccaccaucaucaucgugaucaucgugauccugcugcuccugaucgccgucgggcuguuccucuacugcaaggcccgcugaggacuaguguccaccugucccuccugggcugcuggauugucucguuuuccugccaaauaaacaggaucagcgcuuuacagaucuaaaaaaaaaaaaaaaaaaaaaaaaaaaaaaaaaaaaaaaaaaaaaaaaaaaaaaaaaaaaaaaaugcaucccccccccccccccccccccccccccccccaaaggcucuuuucagagccaccagaauu

SEQ ID NO: 12298 - RNA, 1964 nt, Artificial Sequence
  mRNA product Design e-5 comprising derived and/or modified sequence from HRSV(Memphis-37)__AIY60640.1__F-del (opt2)
gggagagcggcucggccauuuugucccagucaguccggaggcugcggcugcagaaguaccgccugcggaguaacugcaaagaagcuuaccauggagcuccccauccucaagaccaacgccaucaccaccauccucgccgccgucacccucugcuucgccuccucccagaacaucaccgaggaguucuaccaguccaccugcuccgccgucuccaagggcuaccucuccgcccuccgcaccggcugguacaccuccgucaucaccaucgagcucuccaacaucaaggagaacaagugcaacggcaccgacgccaaggucaagcucaucaagcaggagcucgacaaguacaagaacgccgucaccgagcuccagcuccucaugcaguccacccccgccgccaacaaccgcgcccgccgcgagcucccccgcuucaugaacuacacccucaacaacaccaagaacaacaacgucacccucuccaagaagcgcaagcgccgcuuccucggcuuccuccucggcgucggcuccgccaucgccuccggcaucgccgucuccaagguccuccaccucgagggcgaggucaacaagaucaagaacgcccuccucuccaccaacaaggccgucgucucccucuccaacggcgucuccguccucaccuccaagguccucgaccucaagaacuacaucgacaagcagcuccuccccaucgucaacaagcaguccugcuccaucuccaacaucgagaccgucaucgaguuccagcagaagaacaaccgccuccucgagaucacccgcgaguucuccgucaacgccggcgucaccacccccgucuccaccuacaugcucaccaacuccgagcuccucucccucaucaacgacaugcccaucaccaacgaccagaagaagcucauguccaacaacguccagaucguccgccagcaguccuacuccaucauguccaucaucaaggaggagguccucgccuacgucguccagcucccccucuacggcgucaucgacacccccugcuggaagcuccacaccuccccccucugcaccaccaacaccaaggagggcuccaacaucugccucacccgcaccgaccgcggcugguacugcgacaacgccggcuccgucuccuucuucccccaggccgagaccugcaagguccaguccaaccgcgucuucugcgacaccaugaacucccucacccuccccuccgaggucaaccucugcaacaucgacaucuucaaccccaaguacgacugcaagaucaugaccuccaagaccgacgucuccuccuccgucaucaccucccucggcgccaucgucuccugcuacggcaagaccaagugcaccgccuccaacaagaaccgcggcaucaucaagaccuucuccaacggcugcgacuacgucuccaacaagggcgucgacaccgucuccgucggcaacacccucuacuacgucaacaagcaggagggcaagucccucuacgucaagggcgagcccaucaucaacuucuacgacccccucgucuuccccuccgacgaguucgacgccuccaucucccaggucaacgagaagaucaaccagucccucgccuucauccgcaaguccgacgagcuccuccacaacgucaacgucggcaaguccaccaccaacaucaugaucaccaccaucaucaucgucaucaucgucauccuccuccuccucaucgccgucggccucuuccucuacugcaaggcccgcugaggacuaguguccaccugucccuccugggcugcuggauugucucguuuuccugccaaauaaacaggaucagcgcuuuacagaucuaaaaaaaaaaaaaaaaaaaaaaaaaaaaaaaaaaaaaaaaaaaaaaaaaaaaaaaaaaaaaaaaugcaucccccccccccccccccccccccccccccccaaaggcucuuuucagagccaccagaauu

SEQ ID NO: 12299 - RNA, 1964 nt, Artificial Sequence
  mRNA product Design e-5 comprising derived and/or modified sequence from HRSV(Memphis-37)__AIY60640.1__F-del (opt3)
gggagagcggcucggccauuuugucccagucaguccggaggcugcggcugcagaaguaccgccugcggaguaacugcaaagaagcuuaccauggagcugcccauccucaagaccaacgccauuacaacuauacuugcugcagugacgcugugcuucgccagcucccagaauaucaccgaagaguuuuaccaaucuacauguucagcggucaguaaaggcuauuugagcgcuuuaagaacugggugguacaccuccguuauuacaaucgaacugucuaacauuaaggagaauaaaugcaacggaaccgacgccaaggugaaacuaaucaagcaggaacucgauaaguauaaaaaugcaguaacugagcugcagcuucugaugcagucgaccccugccgcuaacaauagggcacggcgcgaguugccacgauucaugaacuacacacucaauaacacgaagaauaacaaugugacucugagcaaaaagcguaaaagaagguuucuggguuuccucuuaggcgucgggucagccauagcuaguggaaucgccguguccaagguucugcaccuugaaggcgaggugaacaagauuaaaaaugcguugcugucuaccaacaaggcagucgugagccuauccaacgguguaucaguucucacaaguaaagugcuggaccuuaagaauuauaucgauaaacaacuguugccgauugucaacaagcagagcuguucuaucuccaauauagaaacugugauugaguuucagcagaaaaacaaucggcuccuggagaucacccgcgaguucucagugaacgccggggucacaacccccguuagcacguacauguuaacuaauagugaacugcucucucuuauuaacgacaugccuaucacaaaugaucaaaagaagcugauguccaacaaugugcagaucguaagacagcagagcuauucgauuaugucuauaaucaaagaagagguguuggcuuacgucgugcaacuaccacuguacggaguuauugacacccccugcuggaagcuccauacuuccccucuguguacaaccaacacgaaagaaggcucaaauaucugccuuaccaggacagaucggggcugguauugugacaacgccgggagugugagcuuuuucccacaggcagagacuugcaagguccaguccaaucgcguguuuugugauaccaugaacucucugacauugcccagcgagguaaaccucugcaauauagacauuuucaacccuaaauacgauuguaagaucaugacuucaaagaccgacguuaguuccagcgugaucacaucucugggagcuauugucucaugcuaugguaaaaccaagugcacugccaguaauaaaaaccgaggcaucauuaagacguuuagcaaugggugugauuacguguccaacaaaggagucgacacagugucuguuggcaauaccuuauauuacgugaacaagcaagaagguaagucgcuguauguaaaaggggagccaauaaucaauuucuacgacccgcuagucuuucccagcgaugaguucgacgcguccauuucacaggugaacgaaaagaucaaucagagucucgccuucaucagaaaaucugaugaacugcuucacaacguuaaugugggaaagagcacuaccaacauuaugauaacaaccaucauuaucgucauuaucgugauauugcugcuccugaucgcaguaggccuuuuucuguacugcaaagcuaggugaggacuaguguccaccugucccuccugggcugcuggauugucucguuuuccugccaaauaaacaggaucagcgcuuuacagaucuaaaaaaaaaaaaaaaaaaaaaaaaaaaaaaaaaaaaaaaaaaaaaaaaaaaaaaaaaaaaaaaaugcaucccccccccccccccccccccccccccccccaaaggcucuuuucagagccaccagaauu

SEQ ID NO: 12300 - RNA, 1964 nt, Artificial Sequence
  mRNA product Design e-5 comprising derived and/or modified sequence from HRSV(Memphis-37)__AIY60640.1__F-del (opt4)
gggagagcggcucggccauuuugucccagucaguccggaggcugcggcugcagaaguaccgccugcggaguaacugcaaagaagcuuaccauggagcugcccauccugaagaccaacgccaucaccaccauccuggccgccgugacccugugcuucgccagcagccagaacaucaccgaggaguucuaccagagcaccugcagcgccgugagcaagggcuaccugagcgcccugagaaccggcugguacaccagcgugaucaccaucgagcugagcaacaucaaggagaacaagugcaacggcaccgacgccaaggugaagcugaucaagcaggagcuggacaaguacaagaacgccgugaccgagcugcagcugcugaugcagagcacccccgccgccaacaacagagccagaagagagcugcccagauucaugaacuacacccugaacaacaccaagaacaacaacgugacccugagcaagaagagaaagagaagauuccugggcuuccugcugggcgugggcagcgccaucgccagcggcaucgccgugagcaaggugcugcaccuggagggcgaggugaacaagaucaagaacgcccugcugagcaccaacaaggccguggugagccugagcaacggcgugagcgugcugaccagcaaggugcuggaccugaagaacuacaucgacaagcagcugcugcccaucgugaacaagcagagcugcagcaucagcaacaucgagaccgugaucgaguuccagcagaagaacaacagacugcuggagaucaccagagaguucagcgugaacgccggcgugaccacccccgugagcaccuacaugcugaccaacagcgagcugcugagccugaucaacgacaugcccaucaccaacgaccagaagaagcugaugagcaacaacgugcagaucgugagacagcagagcuacagcaucaugagcaucaucaaggaggaggugcuggccuacguggugcagcugccccuguacggcgugaucgacacccccugcuggaagcugcacaccagcccccugugcaccaccaacaccaaggagggcagcaacaucugccugaccagaaccgacagaggcugguacugcgacaacgccggcagcgugagcuucuucccccaggccgagaccugcaaggugcagagcaacagaguguucugcgacaccaugaacagccugacccugcccagcgaggugaaccugugcaacaucgacaucuucaaccccaaguacgacugcaagaucaugaccagcaagaccgacgugagcagcagcgugaucaccagccugggcgccaucgugagcugcuacggcaagaccaagugcaccgccagcaacaagaacagaggcaucaucaagaccuucagcaacggcugcgacuacgugagcaacaagggcguggacaccgugagcgugggcaacacccuguacuacgugaacaagcaggagggcaagagccuguacgugaagggcgagcccaucaucaacuucuacgacccccugguguuccccagcgacgaguucgacgccagcaucagccaggugaacgagaagaucaaccagagccuggccuucaucagaaagagcgacgagcugcugcacaacgugaacgugggcaagagcaccaccaacaucaugaucaccaccaucaucaucgugaucaucgugauccugcugcugcugaucgccgugggccuguuccuguacugcaaggccagaugaggacuaguguccaccugucccuccugggcugcuggauugucucguuuuccugccaaauaaacaggaucagcgcuuuacagaucuaaaaaaaaaaaaaaaaaaaaaaaaaaaaaaaaaaaaaaaaaaaaaaaaaaaaaaaaaaaaaaaaugcaucccccccccccccccccccccccccccccccaaaggcucuuuucagagccaccagaauu

SEQ ID NO: 12301 - RNA, 1964 nt, Artificial Sequence
  mRNA product Design e-5 comprising derived and/or modified sequence from HRSV(Memphis-37)__AIY60640.1__F-del (opt5)
gggagagcggcucggccauuuugucccagucaguccggaggcugcggcugcagaaguaccgccugcggaguaacugcaaagaagcuuaccauggagcugcccauccucaagaccaacgccauuacaacgauccuggcugccgugacccuuugcuucgcgagcucccagaauauuacagaagaguuuuaccaaucuaccuguagcgcugucuccaaaggcuaucugucugcccucagaacagggugguacaccagcguuaucacaauugaacuguccaacaucaaggagaauaaaugcaacggaaccgacgccaaggugaaacuuaucaagcaggaacuggauaaguauaaaaaugcugugacggagcuccagcugcugaugcagucuaccccugccgcuaacaaucgggcccgcagagagcucccgcgguucaugaacuacacacugaauaacaccaagaauaacaaugucacacuuagcaaaaagcgcaaaagacgguuucugggcuuccuccugggggugggauccgcgauugccagcggcaucgcuguuucuaaggugcuucaccuggaaggggaggucaacaagauuaaaaaugcccuccuguccaccaacaaggcugugguuagccugucuaacggaguguccguccucacgagcaaagugcuggaccuuaagaauuauaucgauaaacaacugcuccccauugugaacaagcagucuuguuccaucagcaauauugaaacagucaucgaguuucagcagaaaaacaaucgccugcuugagaucaccagagaauuuuccguuaacgccggcgugacaaccccugugucuaccuacaugcugacaaauagcgagcuccugucccugauuaacgacaugcccaucacgaaugaucaaaagaagcucaugagcaacaauguccagauugugcggcagcagucuuauuccaucaugagcauuaucaaagaagagguucuggcguacgugguccaacuuccucuguacggcgugaucgacacccccugcuggaagcuccauacaucuccucuguguaccacaaacaccaaagaagggagcaauauuugccuuacgcgcacagauagaggaugguauugugacaacgccggcuccguuucuuucuucccgcaggcugagaccugcaaggugcagagcaaucgggucuuuugugauaccaugaacucccugacacuccccagcgaggugaaccugugcaauaucgacauuuucaacccuaaauacgauuguaagaucaugaccucuaagacagacgucuccagcucugugauuacgucccugggggccaucguuagcugcuauggaaaaaccaagugcacagcuuccaauaaaaaccgcggcaucauuaagaccuuuucuaaugggugugauuacgugagcaacaaaggagucgacacaguguccguuggcaauacccucuauuacgugaacaagcaagaaggcaagucucuguaugucaaaggggagcccaucauuaauuucuacgacccucuuguguuucccagcgaugaguucgacgccuccaucagccaggugaacgaaaagauuaaucagucucuggccuucaucagaaaauccgaugaacuccugcacaacguuaaugucggaaagagcacgaccaacauuaugaucacaaccaucauuaucgugauuaucgugauucugcuucuccugaucgcugucggccuguuucucuacugcaaagcgcggugaggacuaguguccaccugucccuccugggcugcuggauugucucguuuuccugccaaauaaacaggaucagcgcuuuacagaucuaaaaaaaaaaaaaaaaaaaaaaaaaaaaaaaaaaaaaaaaaaaaaaaaaaaaaaaaaaaaaaaaugcaucccccccccccccccccccccccccccccccaaaggcucuuuucagagccaccagaauu

SEQ ID NO: 12302 - RNA, 1964 nt, Artificial Sequence
  mRNA product Design e-5 comprising derived and/or modified sequence from HRSV(Memphis-37)__AIY60640.1__F-del (opt6)
gggagagcggcucggccauuuugucccagucaguccggaggcugcggcugcagaaguaccgccugcggaguaacugcaaagaagcuuaccauggaacucccaauauuaaaaacuaacgcaaucacaaccauauuagcagccgucacucuaugcuuugccuccucacaaaauauaacagaagaauuuuaccaauccacaugcucagccguuagcaaaggauaucuaucagcccuaagaacaggcugguauacuucaguaauaacaauagaacuaucaaauauaaaagaaaacaaaugcaacggaaccgacgcuaaaguaaagcucauaaaacaagaauuagacaaauacaaaaaugcaguaacagaacuacaacuccuaaugcaaucaaccccagccgccaauaacagagcuagacgagaacuaccccgauucaugaauuacacacuaaacaacacaaaaaacaacaauguaacacucucaaaaaaaagaaaacgaagauucuuagguuuucuccugggaguaggaucagcaaucgcuuccggaaucgcagucaguaaaguccuucaccuugaaggcgaaguaaacaaaauaaaaaaugcacuacuaucuacaaauaaagcaguaguaucccuauccaauggcgucucaguauuaaccucaaaaguacucgaccuuaaaaauuauauagacaaacaauuacuacccauagucaauaaacaauccuguuccauaucaaacauagaaacaguaaucgaauuucaacaaaaaaacaacagauuacuagaaauaacacgcgaauuuucagucaacgccggaguaaccacacccgucucaacauacaugcuaaccaacuccgaacuacuaucacuuaucaacgacaugccaauaacaaaugaccaaaaaaaacucaugucaaacaacguacaaauaguccgccaacaaucauacucuauaaugucuauuaucaaagaagaaguucucgcauacguaguacaacuaccacuauauggugucauagacacaccauguuggaaacuccauacaucacccuuauguacaaccaauacaaaagaaggcucaaacaucugccuaacucgaacagaccgaggaugguacugcgacaaugcaggaucugucucauucuucccucaagcagaaacauguaaaguucaaucuaauagaguuuucugcgauacaaugaacucacuaacucuaccaucagaaguaaaucucuguaauauugacauauucaacccaaaauacgauugcaagaucaugacaucaaaaacugacguaucauccucagucaucaccucauuaggagcaaucguaagcuguuacgggaaaacaaaaugcaccgcuucuaacaaaaauagaggaauaauuaaaaccuucucaaacggaugcgauuacgucuccaauaaaggaguagauacaguaagcguaggaaauacucuauacuacgucaauaaacaagaaggaaaaucacuuuaugucaaaggagaacccauaauaaauuucuacgacccauuagucuucccaucagaugaauuugacgcauccauaucccaagucaacgaaaaaaucaaucaaucacuagcauucauacgaaaaucagacgaacuacuacacaacguuaacguaggaaaaucaacaaccaacaucaugauaaccacuauaauaaucgucauaauagucauccuauuauuacuaauagccguaggccuuuuccuauacuguaaagcuagauaaggacuaguguccaccugucccuccugggcugcuggauugucucguuuuccugccaaauaaacaggaucagcgcuuuacagaucuaaaaaaaaaaaaaaaaaaaaaaaaaaaaaaaaaaaaaaaaaaaaaaaaaaaaaaaaaaaaaaaaugcaucccccccccccccccccccccccccccccccaaaggcucuuuucagagccaccagaauu

SEQ ID NO: 12303 - RNA, 1964 nt, Artificial Sequence
  mRNA product Design e-5 comprising derived and/or modified sequence from HRSV(Memphis-37)__AIY60640.1__F-del (opt11)
gggagagcggcucggccauuuugucccagucaguccggaggcugcggcugcagaaguaccgccugcggaguaacugcaaagaagcuuaccauggaacucccgauccucaaaaccaacgccaucaccacuauccucgccgccguaacccucugcuucgccucaucccaaaacaucaccgaagaauuuuaccaauccacaugcuccgccgucuccaaagguuaccucucagcccuccgcaccggcugguacaccuccguuaucaccaucgaacuuuccaacauaaaagagaacaagugcaacggcaccgacgcaaaaguaaaacuaaucaaacaagaacuagacaaauacaaaaacgccgucaccgaacuccagcuccucaugcaaucgacgcccgccgccaacaaccgagcaaggcgcgaacuuccacgcuucaugaacuacacccucaacaacacuaaaaacaacaacgugacccuauccaaaaagcguaaacgccgauuccuagguuuccuucucggugucggcuccgccauugccuccggcaucgcuguuuccaaaguccuccaccucgaaggcgaaguaaacaagauaaaaaacgcccuccucucuacaaacaaggccgugguaucgcucucuaacggcgucucuguacucaccuccaaaguccucgaccucaaaaacuacaucgacaagcaacuccucccuaucgucaauaaacaauccugcuccauuuccaacaucgaaacagugaucgaauuucaacaaaaaaacaaccgauuacuagaaaucacccgcgaauuuucagucaacgccggcgucacaacgccagucucaaccuacaugcucaccaacucagaacucuuaucacucaucaacgacaugcccaucacuaacgaccagaaaaaacugauguccaacaacgugcaaauaguccgccaacaguccuacuccaucauguccauaaucaaggaggaggugcucgccuacguaguccaacucccccucuacggagucauugacaccccuugcuggaaacuacacaccuccccucucugcaccaccaacaccaaagaaggcagcaacaucugccuaaccaggacggaccgaggaugguacugcgacaaugcaggcuccgucagcuucuucccacaagccgaaacaugcaaaguucaaucaaaccguguauucugcgacaccaugaacucacucacccuccccucagaaguaaaccuaugcaacauagauaucuucaaccccaaauacgacugcaaaauuaugaccuccaaaaccgaugucuccagcuccguuaucacgucacucggcgccaucgucuccugcuacggcaagaccaaaugcaccgccuccaacaaaaaccgcggaauaaucaaaacauucucuaacggcugcgacuacgucuccaauaaaggcgucgacaccgucuccgugggcaacacgcuguacuacgucaacaaacaagaaggcaaaucucuuuacgucaaaggugaaccaaucaucaacuucuacgacccccucguauuccccuccgacgaauuugacgcgagcaucucccaagucaacgaaaagaucaaccaaucccucgccuucauccgaaaaagcgacgaacuccuccacaacgucaacgucggcaaaaguaccacaaacauuaugaucaccaccaucaucauagucaucaucgucauccugcuccuacuaauagccgucggccucuucuuguacugcaaggcacgaugaggacuaguguccaccugucccuccugggcugcuggauugucucguuuuccugccaaauaaacaggaucagcgcuuuacagaucuaaaaaaaaaaaaaaaaaaaaaaaaaaaaaaaaaaaaaaaaaaaaaaaaaaaaaaaaaaaaaaaaugcaucccccccccccccccccccccccccccccccaaaggcucuuuucagagccaccagaauu

SEQ ID NO: 12304 - RNA, 2031 nt, Artificial Sequence
  mRNA product Design e-6 comprising derived and/or modified sequence from HRSV(Memphis-37)__AIY60640.1__F-del (wt)
gggagagcggcucggccauuuugucccagucaguccggaggcugcggcugcagaaguaccgccugcggaguaacugcaaagaagcuuaccauggaguugccaauccucaaaacaaaugcaauuaccacaauccuugcugcagucacacucuguuucgcuuccagucaaaacaucacugaagaauuuuaucaaucaacaugcagugcaguuagcaaaggcuaucuuagugcuuuaagaacugguugguauacuaguguuauaacuauagaauuaaguaauaucaaggaaaauaaguguaauggaacagaugcuaagguaaaauugauaaaacaagaauuagauaaauauaaaaaugcuguaacagaauugcaguugcucaugcaaagcacaccagcagccaacaaucgagccagaagagaacuaccaagguuuaugaauuauacacucaacaauaccaaaaauaacaauguaacauuaagcaagaaaaggaaaagaagauuucuuggcuuuuuguuagguguuggaucugcaaucgccaguggcauugcuguaucuaaaguccugcaccuagaaggggaagugaacaaaaucaaaaaugcucuacuauccacaaacaaggcuguagucagcuuaucaaauggaguuagugucuuaaccagcaaaguguuagaccucaaaaacuauauagauaaacaguuguuacccauugugaacaagcaaagcugcagcauaucaaacauugaaacugugauagaauuccaacaaaagaacaacagacuacuagagauuaccagggaauuuaguguuaaugcagguguaacuacaccuguaagcacuuauauguuaacaaauagugaauuauuaucauuaaucaaugauaugccuauaacaaaugaucagaaaaaguuaauguccaacaauguucaaauaguuagacagcaaaguuacucuaucauguccauaauaaaggaggaagucuuagcauauguaguucaauuaccacuauaugguguaauagauacaccuuguuggaaacuacacacauccccucuaugcacaaccaacacaaaggaaggguccaacaucuguuuaacaagaaccgacagaggaugguacugugacaaugcaggaucagugucuuucuucccacaagcugaaacaugcaaaguucaaucgaaucgaguauuuugugacacaaugaacagucuaacauuaccaagugaaguaaaucucugcaacauugacauauucaacccuaaauaugauugcaaaauuaugacuucaaaaacagaugugagcagcuccguuaucacaucucuaggagccauugugucaugcuauggcaaaacuaaauguacagcauccaauaaaaaucguggaaucauaaagacauuuucuaacgggugugauuauguaucaaauaaggggguggacacuguaucuguagguaauacauuauauuauguaaauaagcaagaaggaaaaagccucuauguaaaaggugaaccaauaauaaauuucuaugacccauuaguguucccuucugaugaauuugaugcaucaauaucucaagucaaugagaagauuaaccagagccuagcauuuauucguaaauccgaugaauuauuacauaauguaaauguugguaaauccaccacaaauaucaugauaacuacuauaauuauagugauuauaguaauauuguuauuauuaauugcaguugggcuguuccuauacugcaaggccagaugaggacuaguacuggcugcaucucccuuuccucuguccuccauccuucucccaggauggugaagggggaccugguacccagugauccccaccccaggauccuaaaucaugacuuaccugcuaauaaaaacucauuggaaaagugagaagaucuaaaaaaaaaaaaaaaaaaaaaaaaaaaaaaaaaaaaaaaaaaaaaaaaaaaaaaaaaaaaaaaaugcaucccccccccccccccccccccccccccccccaaaggcucuuuucagagccaccagaauu

SEQ ID NO: 12305 - RNA, 2031 nt, Artificial Sequence
  mRNA product Design e-6 comprising derived and/or modified sequence from HRSV(Memphis-37)__AIY60640.1__F-del (opt1)
gggagagcggcucggccauuuugucccagucaguccggaggcugcggcugcagaaguaccgccugcggaguaacugcaaagaagcuuaccauggagcugcccauccucaagaccaacgccaucaccacgauccuggccgcggugacccugugcuucgccagcucccagaacaucaccgaggaguucuaccagagcacgugcuccgccgucagcaagggcuaccucuccgcccugcgcaccgggugguacaccagcgugaucaccaucgagcuguccaacaucaaggagaacaagugcaacggcaccgacgccaaggugaagcucaucaagcaggagcuggacaaguacaagaacgcggucacggagcugcagcuccugaugcagagcaccccggccgccaacaaccgggcccgccgggagcugccccgcuucaugaacuacacccucaacaacaccaagaacaacaacgugacgcuguccaagaagcggaagcgccgguuccugggguuccuccugggcguggggagcgcgaucgccuccggcaucgccgucagcaaggugcugcaccucgagggcgaggugaacaagaucaagaacgcccugcuguccaccaacaaggccgucgugagccucuccaacggggugagcguccugaccuccaaggugcuggaccucaagaacuacaucgacaagcagcugcugcccaucgugaacaagcagagcugcuccaucagcaacaucgagaccgucaucgaguuccagcagaagaacaaccgccuccuggagaucacgcgggaguucagcgugaacgcgggcgugaccacccccgucuccaccuacaugcugacgaacagcgagcuccugucccugaucaacgacaugccgaucaccaacgaccagaagaagcucaugagcaacaacgugcagaucgugcgccagcaguccuacagcaucauguccaucaucaaggaggagguccuggccuacguggugcagcugccccucuacggggucaucgacacccccugcuggaagcugcacaccagcccccugugcacgaccaacaccaaggagggcuccaacaucugccucacccggacggaccgcgggugguacugcgacaacgccggcagcguguccuucuucccgcaggccgagaccugcaagguccagagcaaccggguguucugcgacaccaugaacucccugacccugcccagcgaggugaaccucugcaacaucgacaucuucaaccccaaguacgacugcaagaucaugacguccaagaccgacgucagcuccagcgugaucaccucccugggcgccaucgugagcugcuacgggaagaccaagugcacggcgagcaacaagaaccgcggcaucaucaagaccuucuccaacgggugcgacuacgucagcaacaagggcguggacaccguguccgucggcaacacccuguacuacgugaacaagcaggagggcaagagccucuacgugaagggggagcccaucaucaacuucuacgacccgcuggucuuccccuccgacgaguucgacgccagcaucucccaggugaacgagaagaucaaccagagccuggccuucauccggaaguccgacgagcuccugcacaacgugaacgucggcaagagcaccacgaacaucaugaucaccaccaucaucaucgugaucaucgugauccugcugcuccugaucgccgucgggcuguuccucuacugcaaggcccgcugaggacuaguacuggcugcaucucccuuuccucuguccuccauccuucucccaggauggugaagggggaccugguacccagugauccccaccccaggauccuaaaucaugacuuaccugcuaauaaaaacucauuggaaaagugagaagaucuaaaaaaaaaaaaaaaaaaaaaaaaaaaaaaaaaaaaaaaaaaaaaaaaaaaaaaaaaaaaaaaaugcaucccccccccccccccccccccccccccccccaaaggcucuuuucagagccaccagaauu

SEQ ID NO: 12306 - RNA, 2031 nt, Artificial Sequence
  mRNA product Design e-6 comprising derived and/or modified sequence from HRSV(Memphis-37)__AIY60640.1__F-del (opt2)
gggagagcggcucggccauuuugucccagucaguccggaggcugcggcugcagaaguaccgccugcggaguaacugcaaagaagcuuaccauggagcuccccauccucaagaccaacgccaucaccaccauccucgccgccgucacccucugcuucgccuccucccagaacaucaccgaggaguucuaccaguccaccugcuccgccgucuccaagggcuaccucuccgcccuccgcaccggcugguacaccuccgucaucaccaucgagcucuccaacaucaaggagaacaagugcaacggcaccgacgccaaggucaagcucaucaagcaggagcucgacaaguacaagaacgccgucaccgagcuccagcuccucaugcaguccacccccgccgccaacaaccgcgcccgccgcgagcucccccgcuucaugaacuacacccucaacaacaccaagaacaacaacgucacccucuccaagaagcgcaagcgccgcuuccucggcuuccuccucggcgucggcuccgccaucgccuccggcaucgccgucuccaagguccuccaccucgagggcgaggucaacaagaucaagaacgcccuccucuccaccaacaaggccgucgucucccucuccaacggcgucuccguccucaccuccaagguccucgaccucaagaacuacaucgacaagcagcuccuccccaucgucaacaagcaguccugcuccaucuccaacaucgagaccgucaucgaguuccagcagaagaacaaccgccuccucgagaucacccgcgaguucuccgucaacgccggcgucaccacccccgucuccaccuacaugcucaccaacuccgagcuccucucccucaucaacgacaugcccaucaccaacgaccagaagaagcucauguccaacaacguccagaucguccgccagcaguccuacuccaucauguccaucaucaaggaggagguccucgccuacgucguccagcucccccucuacggcgucaucgacacccccugcuggaagcuccacaccuccccccucugcaccaccaacaccaaggagggcuccaacaucugccucacccgcaccgaccgcggcugguacugcgacaacgccggcuccgucuccuucuucccccaggccgagaccugcaagguccaguccaaccgcgucuucugcgacaccaugaacucccucacccuccccuccgaggucaaccucugcaacaucgacaucuucaaccccaaguacgacugcaagaucaugaccuccaagaccgacgucuccuccuccgucaucaccucccucggcgccaucgucuccugcuacggcaagaccaagugcaccgccuccaacaagaaccgcggcaucaucaagaccuucuccaacggcugcgacuacgucuccaacaagggcgucgacaccgucuccgucggcaacacccucuacuacgucaacaagcaggagggcaagucccucuacgucaagggcgagcccaucaucaacuucuacgacccccucgucuuccccuccgacgaguucgacgccuccaucucccaggucaacgagaagaucaaccagucccucgccuucauccgcaaguccgacgagcuccuccacaacgucaacgucggcaaguccaccaccaacaucaugaucaccaccaucaucaucgucaucaucgucauccuccuccuccucaucgccgucggccucuuccucuacugcaaggcccgcugaggacuaguacuggcugcaucucccuuuccucuguccuccauccuucucccaggauggugaagggggaccugguacccagugauccccaccccaggauccuaaaucaugacuuaccugcuaauaaaaacucauuggaaaagugagaagaucuaaaaaaaaaaaaaaaaaaaaaaaaaaaaaaaaaaaaaaaaaaaaaaaaaaaaaaaaaaaaaaaaugcaucccccccccccccccccccccccccccccccaaaggcucuuuucagagccaccagaauu

SEQ ID NO: 12307 - RNA, 2031 nt, Artificial Sequence
  mRNA product Design e-6 comprising derived and/or modified sequence from HRSV(Memphis-37)__AIY60640.1__F-del (opt3)
gggagagcggcucggccauuuugucccagucaguccggaggcugcggcugcagaaguaccgccugcggaguaacugcaaagaagcuuaccauggagcugcccauccucaagaccaacgccauuacaacuauacuugcugcagugacgcugugcuucgccagcucccagaauaucaccgaagaguuuuaccaaucuacauguucagcggucaguaaaggcuauuugagcgcuuuaagaacugggugguacaccuccguuauuacaaucgaacugucuaacauuaaggagaauaaaugcaacggaaccgacgccaaggugaaacuaaucaagcaggaacucgauaaguauaaaaaugcaguaacugagcugcagcuucugaugcagucgaccccugccgcuaacaauagggcacggcgcgaguugccacgauucaugaacuacacacucaauaacacgaagaauaacaaugugacucugagcaaaaagcguaaaagaagguuucuggguuuccucuuaggcgucgggucagccauagcuaguggaaucgccguguccaagguucugcaccuugaaggcgaggugaacaagauuaaaaaugcguugcugucuaccaacaaggcagucgugagccuauccaacgguguaucaguucucacaaguaaagugcuggaccuuaagaauuauaucgauaaacaacuguugccgauugucaacaagcagagcuguucuaucuccaauauagaaacugugauugaguuucagcagaaaaacaaucggcuccuggagaucacccgcgaguucucagugaacgccggggucacaacccccguuagcacguacauguuaacuaauagugaacugcucucucuuauuaacgacaugccuaucacaaaugaucaaaagaagcugauguccaacaaugugcagaucguaagacagcagagcuauucgauuaugucuauaaucaaagaagagguguuggcuuacgucgugcaacuaccacuguacggaguuauugacacccccugcuggaagcuccauacuuccccucuguguacaaccaacacgaaagaaggcucaaauaucugccuuaccaggacagaucggggcugguauugugacaacgccgggagugugagcuuuuucccacaggcagagacuugcaagguccaguccaaucgcguguuuugugauaccaugaacucucugacauugcccagcgagguaaaccucugcaauauagacauuuucaacccuaaauacgauuguaagaucaugacuucaaagaccgacguuaguuccagcgugaucacaucucugggagcuauugucucaugcuaugguaaaaccaagugcacugccaguaauaaaaaccgaggcaucauuaagacguuuagcaaugggugugauuacguguccaacaaaggagucgacacagugucuguuggcaauaccuuauauuacgugaacaagcaagaagguaagucgcuguauguaaaaggggagccaauaaucaauuucuacgacccgcuagucuuucccagcgaugaguucgacgcguccauuucacaggugaacgaaaagaucaaucagagucucgccuucaucagaaaaucugaugaacugcuucacaacguuaaugugggaaagagcacuaccaacauuaugauaacaaccaucauuaucgucauuaucgugauauugcugcuccugaucgcaguaggccuuuuucuguacugcaaagcuaggugaggacuaguacuggcugcaucucccuuuccucuguccuccauccuucucccaggauggugaagggggaccugguacccagugauccccaccccaggauccuaaaucaugacuuaccugcuaauaaaaacucauuggaaaagugagaagaucuaaaaaaaaaaaaaaaaaaaaaaaaaaaaaaaaaaaaaaaaaaaaaaaaaaaaaaaaaaaaaaaaugcaucccccccccccccccccccccccccccccccaaaggcucuuuucagagccaccagaauu

SEQ ID NO: 12308 - RNA, 2031 nt, Artificial Sequence
  mRNA product Design e-6 comprising derived and/or modified sequence from HRSV(Memphis-37)__AIY60640.1__F-del (opt4)
gggagagcggcucggccauuuugucccagucaguccggaggcugcggcugcagaaguaccgccugcggaguaacugcaaagaagcuuaccauggagcugcccauccugaagaccaacgccaucaccaccauccuggccgccgugacccugugcuucgccagcagccagaacaucaccgaggaguucuaccagagcaccugcagcgccgugagcaagggcuaccugagcgcccugagaaccggcugguacaccagcgugaucaccaucgagcugagcaacaucaaggagaacaagugcaacggcaccgacgccaaggugaagcugaucaagcaggagcuggacaaguacaagaacgccgugaccgagcugcagcugcugaugcagagcacccccgccgccaacaacagagccagaagagagcugcccagauucaugaacuacacccugaacaacaccaagaacaacaacgugacccugagcaagaagagaaagagaagauuccugggcuuccugcugggcgugggcagcgccaucgccagcggcaucgccgugagcaaggugcugcaccuggagggcgaggugaacaagaucaagaacgcccugcugagcaccaacaaggccguggugagccugagcaacggcgugagcgugcugaccagcaaggugcuggaccugaagaacuacaucgacaagcagcugcugcccaucgugaacaagcagagcugcagcaucagcaacaucgagaccgugaucgaguuccagcagaagaacaacagacugcuggagaucaccagagaguucagcgugaacgccggcgugaccacccccgugagcaccuacaugcugaccaacagcgagcugcugagccugaucaacgacaugcccaucaccaacgaccagaagaagcugaugagcaacaacgugcagaucgugagacagcagagcuacagcaucaugagcaucaucaaggaggaggugcuggccuacguggugcagcugccccuguacggcgugaucgacacccccugcuggaagcugcacaccagcccccugugcaccaccaacaccaaggagggcagcaacaucugccugaccagaaccgacagaggcugguacugcgacaacgccggcagcgugagcuucuucccccaggccgagaccugcaaggugcagagcaacagaguguucugcgacaccaugaacagccugacccugcccagcgaggugaaccugugcaacaucgacaucuucaaccccaaguacgacugcaagaucaugaccagcaagaccgacgugagcagcagcgugaucaccagccugggcgccaucgugagcugcuacggcaagaccaagugcaccgccagcaacaagaacagaggcaucaucaagaccuucagcaacggcugcgacuacgugagcaacaagggcguggacaccgugagcgugggcaacacccuguacuacgugaacaagcaggagggcaagagccuguacgugaagggcgagcccaucaucaacuucuacgacccccugguguuccccagcgacgaguucgacgccagcaucagccaggugaacgagaagaucaaccagagccuggccuucaucagaaagagcgacgagcugcugcacaacgugaacgugggcaagagcaccaccaacaucaugaucaccaccaucaucaucgugaucaucgugauccugcugcugcugaucgccgugggccuguuccuguacugcaaggccagaugaggacuaguacuggcugcaucucccuuuccucuguccuccauccuucucccaggauggugaagggggaccugguacccagugauccccaccccaggauccuaaaucaugacuuaccugcuaauaaaaacucauuggaaaagugagaagaucuaaaaaaaaaaaaaaaaaaaaaaaaaaaaaaaaaaaaaaaaaaaaaaaaaaaaaaaaaaaaaaaaugcaucccccccccccccccccccccccccccccccaaaggcucuuuucagagccaccagaauu

SEQ ID NO: 12309 - RNA, 2031 nt, Artificial Sequence
  mRNA product Design e-6 comprising derived and/or modified sequence from HRSV(Memphis-37)__AIY60640.1__F-del (opt5)
gggagagcggcucggccauuuugucccagucaguccggaggcugcggcugcagaaguaccgccugcggaguaacugcaaagaagcuuaccauggagcugcccauccucaagaccaacgccauuacaacgauccuggcugccgugacccuuugcuucgcgagcucccagaauauuacagaagaguuuuaccaaucuaccuguagcgcugucuccaaaggcuaucugucugcccucagaacagggugguacaccagcguuaucacaauugaacuguccaacaucaaggagaauaaaugcaacggaaccgacgccaaggugaaacuuaucaagcaggaacuggauaaguauaaaaaugcugugacggagcuccagcugcugaugcagucuaccccugccgcuaacaaucgggcccgcagagagcucccgcgguucaugaacuacacacugaauaacaccaagaauaacaaugucacacuuagcaaaaagcgcaaaagacgguuucugggcuuccuccugggggugggauccgcgauugccagcggcaucgcuguuucuaaggugcuucaccuggaaggggaggucaacaagauuaaaaaugcccuccuguccaccaacaaggcugugguuagccugucuaacggaguguccguccucacgagcaaagugcuggaccuuaagaauuauaucgauaaacaacugcuccccauugugaacaagcagucuuguuccaucagcaauauugaaacagucaucgaguuucagcagaaaaacaaucgccugcuugagaucaccagagaauuuuccguuaacgccggcgugacaaccccugugucuaccuacaugcugacaaauagcgagcuccugucccugauuaacgacaugcccaucacgaaugaucaaaagaagcucaugagcaacaauguccagauugugcggcagcagucuuauuccaucaugagcauuaucaaagaagagguucuggcguacgugguccaacuuccucuguacggcgugaucgacacccccugcuggaagcuccauacaucuccucuguguaccacaaacaccaaagaagggagcaauauuugccuuacgcgcacagauagaggaugguauugugacaacgccggcuccguuucuuucuucccgcaggcugagaccugcaaggugcagagcaaucgggucuuuugugauaccaugaacucccugacacuccccagcgaggugaaccugugcaauaucgacauuuucaacccuaaauacgauuguaagaucaugaccucuaagacagacgucuccagcucugugauuacgucccugggggccaucguuagcugcuauggaaaaaccaagugcacagcuuccaauaaaaaccgcggcaucauuaagaccuuuucuaaugggugugauuacgugagcaacaaaggagucgacacaguguccguuggcaauacccucuauuacgugaacaagcaagaaggcaagucucuguaugucaaaggggagcccaucauuaauuucuacgacccucuuguguuucccagcgaugaguucgacgccuccaucagccaggugaacgaaaagauuaaucagucucuggccuucaucagaaaauccgaugaacuccugcacaacguuaaugucggaaagagcacgaccaacauuaugaucacaaccaucauuaucgugauuaucgugauucugcuucuccugaucgcugucggccuguuucucuacugcaaagcgcggugaggacuaguacuggcugcaucucccuuuccucuguccuccauccuucucccaggauggugaagggggaccugguacccagugauccccaccccaggauccuaaaucaugacuuaccugcuaauaaaaacucauuggaaaagugagaagaucuaaaaaaaaaaaaaaaaaaaaaaaaaaaaaaaaaaaaaaaaaaaaaaaaaaaaaaaaaaaaaaaaugcaucccccccccccccccccccccccccccccccaaaggcucuuuucagagccaccagaauu

SEQ ID NO: 12310 - RNA, 2031 nt, Artificial Sequence
  mRNA product Design e-6 comprising derived and/or modified sequence from HRSV(Memphis-37)__AIY60640.1__F-del (opt6)
gggagagcggcucggccauuuugucccagucaguccggaggcugcggcugcagaaguaccgccugcggaguaacugcaaagaagcuuaccauggaacucccaauauuaaaaacuaacgcaaucacaaccauauuagcagccgucacucuaugcuuugccuccucacaaaauauaacagaagaauuuuaccaauccacaugcucagccguuagcaaaggauaucuaucagcccuaagaacaggcugguauacuucaguaauaacaauagaacuaucaaauauaaaagaaaacaaaugcaacggaaccgacgcuaaaguaaagcucauaaaacaagaauuagacaaauacaaaaaugcaguaacagaacuacaacuccuaaugcaaucaaccccagccgccaauaacagagcuagacgagaacuaccccgauucaugaauuacacacuaaacaacacaaaaaacaacaauguaacacucucaaaaaaaagaaaacgaagauucuuagguuuucuccugggaguaggaucagcaaucgcuuccggaaucgcagucaguaaaguccuucaccuugaaggcgaaguaaacaaaauaaaaaaugcacuacuaucuacaaauaaagcaguaguaucccuauccaauggcgucucaguauuaaccucaaaaguacucgaccuuaaaaauuauauagacaaacaauuacuacccauagucaauaaacaauccuguuccauaucaaacauagaaacaguaaucgaauuucaacaaaaaaacaacagauuacuagaaauaacacgcgaauuuucagucaacgccggaguaaccacacccgucucaacauacaugcuaaccaacuccgaacuacuaucacuuaucaacgacaugccaauaacaaaugaccaaaaaaaacucaugucaaacaacguacaaauaguccgccaacaaucauacucuauaaugucuauuaucaaagaagaaguucucgcauacguaguacaacuaccacuauauggugucauagacacaccauguuggaaacuccauacaucacccuuauguacaaccaauacaaaagaaggcucaaacaucugccuaacucgaacagaccgaggaugguacugcgacaaugcaggaucugucucauucuucccucaagcagaaacauguaaaguucaaucuaauagaguuuucugcgauacaaugaacucacuaacucuaccaucagaaguaaaucucuguaauauugacauauucaacccaaaauacgauugcaagaucaugacaucaaaaacugacguaucauccucagucaucaccucauuaggagcaaucguaagcuguuacgggaaaacaaaaugcaccgcuucuaacaaaaauagaggaauaauuaaaaccuucucaaacggaugcgauuacgucuccaauaaaggaguagauacaguaagcguaggaaauacucuauacuacgucaauaaacaagaaggaaaaucacuuuaugucaaaggagaacccauaauaaauuucuacgacccauuagucuucccaucagaugaauuugacgcauccauaucccaagucaacgaaaaaaucaaucaaucacuagcauucauacgaaaaucagacgaacuacuacacaacguuaacguaggaaaaucaacaaccaacaucaugauaaccacuauaauaaucgucauaauagucauccuauuauuacuaauagccguaggccuuuuccuauacuguaaagcuagauaaggacuaguacuggcugcaucucccuuuccucuguccuccauccuucucccaggauggugaagggggaccugguacccagugauccccaccccaggauccuaaaucaugacuuaccugcuaauaaaaacucauuggaaaagugagaagaucuaaaaaaaaaaaaaaaaaaaaaaaaaaaaaaaaaaaaaaaaaaaaaaaaaaaaaaaaaaaaaaaaugcaucccccccccccccccccccccccccccccccaaaggcucuuuucagagccaccagaauu

SEQ ID NO: 12311 - RNA, 2031 nt, Artificial Sequence
  mRNA product Design e-6 comprising derived and/or modified sequence from HRSV(Memphis-37)__AIY60640.1__F-del (opt11)
gggagagcggcucggccauuuugucccagucaguccggaggcugcggcugcagaaguaccgccugcggaguaacugcaaagaagcuuaccauggaacucccgauccucaaaaccaacgccaucaccacuauccucgccgccguaacccucugcuucgccucaucccaaaacaucaccgaagaauuuuaccaauccacaugcuccgccgucuccaaagguuaccucucagcccuccgcaccggcugguacaccuccguuaucaccaucgaacuuuccaacauaaaagagaacaagugcaacggcaccgacgcaaaaguaaaacuaaucaaacaagaacuagacaaauacaaaaacgccgucaccgaacuccagcuccucaugcaaucgacgcccgccgccaacaaccgagcaaggcgcgaacuuccacgcuucaugaacuacacccucaacaacacuaaaaacaacaacgugacccuauccaaaaagcguaaacgccgauuccuagguuuccuucucggugucggcuccgccauugccuccggcaucgcuguuuccaaaguccuccaccucgaaggcgaaguaaacaagauaaaaaacgcccuccucucuacaaacaaggccgugguaucgcucucuaacggcgucucuguacucaccuccaaaguccucgaccucaaaaacuacaucgacaagcaacuccucccuaucgucaauaaacaauccugcuccauuuccaacaucgaaacagugaucgaauuucaacaaaaaaacaaccgauuacuagaaaucacccgcgaauuuucagucaacgccggcgucacaacgccagucucaaccuacaugcucaccaacucagaacucuuaucacucaucaacgacaugcccaucacuaacgaccagaaaaaacugauguccaacaacgugcaaauaguccgccaacaguccuacuccaucauguccauaaucaaggaggaggugcucgccuacguaguccaacucccccucuacggagucauugacaccccuugcuggaaacuacacaccuccccucucugcaccaccaacaccaaagaaggcagcaacaucugccuaaccaggacggaccgaggaugguacugcgacaaugcaggcuccgucagcuucuucccacaagccgaaacaugcaaaguucaaucaaaccguguauucugcgacaccaugaacucacucacccuccccucagaaguaaaccuaugcaacauagauaucuucaaccccaaauacgacugcaaaauuaugaccuccaaaaccgaugucuccagcuccguuaucacgucacucggcgccaucgucuccugcuacggcaagaccaaaugcaccgccuccaacaaaaaccgcggaauaaucaaaacauucucuaacggcugcgacuacgucuccaauaaaggcgucgacaccgucuccgugggcaacacgcuguacuacgucaacaaacaagaaggcaaaucucuuuacgucaaaggugaaccaaucaucaacuucuacgacccccucguauuccccuccgacgaauuugacgcgagcaucucccaagucaacgaaaagaucaaccaaucccucgccuucauccgaaaaagcgacgaacuccuccacaacgucaacgucggcaaaaguaccacaaacauuaugaucaccaccaucaucauagucaucaucgucauccugcuccuacuaauagccgucggccucuucuuguacugcaaggcacgaugaggacuaguacuggcugcaucucccuuuccucuguccuccauccuucucccaggauggugaagggggaccugguacccagugauccccaccccaggauccuaaaucaugacuuaccugcuaauaaaaacucauuggaaaagugagaagaucuaaaaaaaaaaaaaaaaaaaaaaaaaaaaaaaaaaaaaaaaaaaaaaaaaaaaaaaaaaaaaaaaugcaucccccccccccccccccccccccccccccccaaaggcucuuuucagagccaccagaauu

SEQ ID NO: 12312 - RNA, 2247 nt, Artificial Sequence
  mRNA product Design f-1 comprising derived and/or modified sequence from HRSV(Memphis-37)__AIY60640.1__F-del (wt)
gggagagcggcucggccauuuugucccagucaguccggaggcugcggcugcagaaguaccgccugcggaguaacugcaaagaagcuuaccauggaguugccaauccucaaaacaaaugcaauuaccacaauccuugcugcagucacacucuguuucgcuuccagucaaaacaucacugaagaauuuuaucaaucaacaugcagugcaguuagcaaaggcuaucuuagugcuuuaagaacugguugguauacuaguguuauaacuauagaauuaaguaauaucaaggaaaauaaguguaauggaacagaugcuaagguaaaauugauaaaacaagaauuagauaaauauaaaaaugcuguaacagaauugcaguugcucaugcaaagcacaccagcagccaacaaucgagccagaagagaacuaccaagguuuaugaauuauacacucaacaauaccaaaaauaacaauguaacauuaagcaagaaaaggaaaagaagauuucuuggcuuuuuguuagguguuggaucugcaaucgccaguggcauugcuguaucuaaaguccugcaccuagaaggggaagugaacaaaaucaaaaaugcucuacuauccacaaacaaggcuguagucagcuuaucaaauggaguuagugucuuaaccagcaaaguguuagaccucaaaaacuauauagauaaacaguuguuacccauugugaacaagcaaagcugcagcauaucaaacauugaaacugugauagaauuccaacaaaagaacaacagacuacuagagauuaccagggaauuuaguguuaaugcagguguaacuacaccuguaagcacuuauauguuaacaaauagugaauuauuaucauuaaucaaugauaugccuauaacaaaugaucagaaaaaguuaauguccaacaauguucaaauaguuagacagcaaaguuacucuaucauguccauaauaaaggaggaagucuuagcauauguaguucaauuaccacuauaugguguaauagauacaccuuguuggaaacuacacacauccccucuaugcacaaccaacacaaaggaaggguccaacaucuguuuaacaagaaccgacagaggaugguacugugacaaugcaggaucagugucuuucuucccacaagcugaaacaugcaaaguucaaucgaaucgaguauuuugugacacaaugaacagucuaacauuaccaagugaaguaaaucucugcaacauugacauauucaacccuaaauaugauugcaaaauuaugacuucaaaaacagaugugagcagcuccguuaucacaucucuaggagccauugugucaugcuauggcaaaacuaaauguacagcauccaauaaaaaucguggaaucauaaagacauuuucuaacgggugugauuauguaucaaauaaggggguggacacuguaucuguagguaauacauuauauuauguaaauaagcaagaaggaaaaagccucuauguaaaaggugaaccaauaauaaauuucuaugacccauuaguguucccuucugaugaauuugaugcaucaauaucucaagucaaugagaagauuaaccagagccuagcauuuauucguaaauccgaugaauuauuacauaauguaaauguugguaaauccaccacaaauaucaugauaacuacuauaauuauagugauuauaguaauauuguuauuauuaauugcaguugggcuguuccuauacugcaaggccagaugaggacuagugaagggaacacccaaauuuaauucagccuuaagcacaauuaauuaagagugaaacguaauuguacaagcaguuggucacccaccauagggcaugaucaacaccgcaaccuuuccuuuuucccccagugauucugaaaaaccccucuucccuucagcuugcuuagauguuccaaauuuaguaagcuuaaggcggccuacagaagaaaaagaaaaaaaaggccacaaaaguucccucucacuuucaguaaauaaaauaaaagcagcaacagaaauaaagaaauaaaugaaauucaaaaugaaauaaauauuguguugugcagcauuaaaaaaucaauaaaaauuaaaaaugagcaagaucuaaaaaaaaaaaaaaaaaaaaaaaaaaaaaaaaaaaaaaaaaaaaaaaaaaaaaaaaaaaaaaaaugcaucccccccccccccccccccccccccccccccaaaggcucuuuucagagccaccagaauu

SEQ ID NO: 12313 - RNA, 2247 nt, Artificial Sequence
  mRNA product Design f-1 comprising derived and/or modified sequence from HRSV(Memphis-37)__AIY60640.1__F-del (opt1)
gggagagcggcucggccauuuugucccagucaguccggaggcugcggcugcagaaguaccgccugcggaguaacugcaaagaagcuuaccauggagcugcccauccucaagaccaacgccaucaccacgauccuggccgcggugacccugugcuucgccagcucccagaacaucaccgaggaguucuaccagagcacgugcuccgccgucagcaagggcuaccucuccgcccugcgcaccgggugguacaccagcgugaucaccaucgagcuguccaacaucaaggagaacaagugcaacggcaccgacgccaaggugaagcucaucaagcaggagcuggacaaguacaagaacgcggucacggagcugcagcuccugaugcagagcaccccggccgccaacaaccgggcccgccgggagcugccccgcuucaugaacuacacccucaacaacaccaagaacaacaacgugacgcuguccaagaagcggaagcgccgguuccugggguuccuccugggcguggggagcgcgaucgccuccggcaucgccgucagcaaggugcugcaccucgagggcgaggugaacaagaucaagaacgcccugcuguccaccaacaaggccgucgugagccucuccaacggggugagcguccugaccuccaaggugcuggaccucaagaacuacaucgacaagcagcugcugcccaucgugaacaagcagagcugcuccaucagcaacaucgagaccgucaucgaguuccagcagaagaacaaccgccuccuggagaucacgcgggaguucagcgugaacgcgggcgugaccacccccgucuccaccuacaugcugacgaacagcgagcuccugucccugaucaacgacaugccgaucaccaacgaccagaagaagcucaugagcaacaacgugcagaucgugcgccagcaguccuacagcaucauguccaucaucaaggaggagguccuggccuacguggugcagcugccccucuacggggucaucgacacccccugcuggaagcugcacaccagcccccugugcacgaccaacaccaaggagggcuccaacaucugccucacccggacggaccgcgggugguacugcgacaacgccggcagcguguccuucuucccgcaggccgagaccugcaagguccagagcaaccggguguucugcgacaccaugaacucccugacccugcccagcgaggugaaccucugcaacaucgacaucuucaaccccaaguacgacugcaagaucaugacguccaagaccgacgucagcuccagcgugaucaccucccugggcgccaucgugagcugcuacgggaagaccaagugcacggcgagcaacaagaaccgcggcaucaucaagaccuucuccaacgggugcgacuacgucagcaacaagggcguggacaccguguccgucggcaacacccuguacuacgugaacaagcaggagggcaagagccucuacgugaagggggagcccaucaucaacuucuacgacccgcuggucuuccccuccgacgaguucgacgccagcaucucccaggugaacgagaagaucaaccagagccuggccuucauccggaaguccgacgagcuccugcacaacgugaacgucggcaagagcaccacgaacaucaugaucaccaccaucaucaucgugaucaucgugauccugcugcuccugaucgccgucgggcuguuccucuacugcaaggcccgcugaggacuagugaagggaacacccaaauuuaauucagccuuaagcacaauuaauuaagagugaaacguaauuguacaagcaguuggucacccaccauagggcaugaucaacaccgcaaccuuuccuuuuucccccagugauucugaaaaaccccucuucccuucagcuugcuuagauguuccaaauuuaguaagcuuaaggcggccuacagaagaaaaagaaaaaaaaggccacaaaaguucccucucacuuucaguaaauaaaauaaaagcagcaacagaaauaaagaaauaaaugaaauucaaaaugaaauaaauauuguguugugcagcauuaaaaaaucaauaaaaauuaaaaaugagcaagaucuaaaaaaaaaaaaaaaaaaaaaaaaaaaaaaaaaaaaaaaaaaaaaaaaaaaaaaaaaaaaaaaaugcaucccccccccccccccccccccccccccccccaaaggcucuuuucagagccaccagaauu

SEQ ID NO: 12314 - RNA, 2247 nt, Artificial Sequence
  mRNA product Design f-1 comprising derived and/or modified sequence from HRSV(Memphis-37)__AIY60640.1__F-del (opt2)
gggagagcggcucggccauuuugucccagucaguccggaggcugcggcugcagaaguaccgccugcggaguaacugcaaagaagcuuaccauggagcuccccauccucaagaccaacgccaucaccaccauccucgccgccgucacccucugcuucgccuccucccagaacaucaccgaggaguucuaccaguccaccugcuccgccgucuccaagggcuaccucuccgcccuccgcaccggcugguacaccuccgucaucaccaucgagcucuccaacaucaaggagaacaagugcaacggcaccgacgccaaggucaagcucaucaagcaggagcucgacaaguacaagaacgccgucaccgagcuccagcuccucaugcaguccacccccgccgccaacaaccgcgcccgccgcgagcucccccgcuucaugaacuacacccucaacaacaccaagaacaacaacgucacccucuccaagaagcgcaagcgccgcuuccucggcuuccuccucggcgucggcuccgccaucgccuccggcaucgccgucuccaagguccuccaccucgagggcgaggucaacaagaucaagaacgcccuccucuccaccaacaaggccgucgucucccucuccaacggcgucuccguccucaccuccaagguccucgaccucaagaacuacaucgacaagcagcuccuccccaucgucaacaagcaguccugcuccaucuccaacaucgagaccgucaucgaguuccagcagaagaacaaccgccuccucgagaucacccgcgaguucuccgucaacgccggcgucaccacccccgucuccaccuacaugcucaccaacuccgagcuccucucccucaucaacgacaugcccaucaccaacgaccagaagaagcucauguccaacaacguccagaucguccgccagcaguccuacuccaucauguccaucaucaaggaggagguccucgccuacgucguccagcucccccucuacggcgucaucgacacccccugcuggaagcuccacaccuccccccucugcaccaccaacaccaaggagggcuccaacaucugccucacccgcaccgaccgcggcugguacugcgacaacgccggcuccgucuccuucuucccccaggccgagaccugcaagguccaguccaaccgcgucuucugcgacaccaugaacucccucacccuccccuccgaggucaaccucugcaacaucgacaucuucaaccccaaguacgacugcaagaucaugaccuccaagaccgacgucuccuccuccgucaucaccucccucggcgccaucgucuccugcuacggcaagaccaagugcaccgccuccaacaagaaccgcggcaucaucaagaccuucuccaacggcugcgacuacgucuccaacaagggcgucgacaccgucuccgucggcaacacccucuacuacgucaacaagcaggagggcaagucccucuacgucaagggcgagcccaucaucaacuucuacgacccccucgucuuccccuccgacgaguucgacgccuccaucucccaggucaacgagaagaucaaccagucccucgccuucauccgcaaguccgacgagcuccuccacaacgucaacgucggcaaguccaccaccaacaucaugaucaccaccaucaucaucgucaucaucgucauccuccuccuccucaucgccgucggccucuuccucuacugcaaggcccgcugaggacuagugaagggaacacccaaauuuaauucagccuuaagcacaauuaauuaagagugaaacguaauuguacaagcaguuggucacccaccauagggcaugaucaacaccgcaaccuuuccuuuuucccccagugauucugaaaaaccccucuucccuucagcuugcuuagauguuccaaauuuaguaagcuuaaggcggccuacagaagaaaaagaaaaaaaaggccacaaaaguucccucucacuuucaguaaauaaaauaaaagcagcaacagaaauaaagaaauaaaugaaauucaaaaugaaauaaauauuguguugugcagcauuaaaaaaucaauaaaaauuaaaaaugagcaagaucuaaaaaaaaaaaaaaaaaaaaaaaaaaaaaaaaaaaaaaaaaaaaaaaaaaaaaaaaaaaaaaaaugcaucccccccccccccccccccccccccccccccaaaggcucuuuucagagccaccagaauu

SEQ ID NO: 12315 - RNA, 2247 nt, Artificial Sequence
  mRNA product Design f-1 comprising derived and/or modified sequence from HRSV(Memphis-37)__AIY60640.1__F-del (opt3)
gggagagcggcucggccauuuugucccagucaguccggaggcugcggcugcagaaguaccgccugcggaguaacugcaaagaagcuuaccauggagcugcccauccucaagaccaacgccauuacaacuauacuugcugcagugacgcugugcuucgccagcucccagaauaucaccgaagaguuuuaccaaucuacauguucagcggucaguaaaggcuauuugagcgcuuuaagaacugggugguacaccuccguuauuacaaucgaacugucuaacauuaaggagaauaaaugcaacggaaccgacgccaaggugaaacuaaucaagcaggaacucgauaaguauaaaaaugcaguaacugagcugcagcuucugaugcagucgaccccugccgcuaacaauagggcacggcgcgaguugccacgauucaugaacuacacacucaauaacacgaagaauaacaaugugacucugagcaaaaagcguaaaagaagguuucuggguuuccucuuaggcgucgggucagccauagcuaguggaaucgccguguccaagguucugcaccuugaaggcgaggugaacaagauuaaaaaugcguugcugucuaccaacaaggcagucgugagccuauccaacgguguaucaguucucacaaguaaagugcuggaccuuaagaauuauaucgauaaacaacuguugccgauugucaacaagcagagcuguucuaucuccaauauagaaacugugauugaguuucagcagaaaaacaaucggcuccuggagaucacccgcgaguucucagugaacgccggggucacaacccccguuagcacguacauguuaacuaauagugaacugcucucucuuauuaacgacaugccuaucacaaaugaucaaaagaagcugauguccaacaaugugcagaucguaagacagcagagcuauucgauuaugucuauaaucaaagaagagguguuggcuuacgucgugcaacuaccacuguacggaguuauugacacccccugcuggaagcuccauacuuccccucuguguacaaccaacacgaaagaaggcucaaauaucugccuuaccaggacagaucggggcugguauugugacaacgccgggagugugagcuuuuucccacaggcagagacuugcaagguccaguccaaucgcguguuuugugauaccaugaacucucugacauugcccagcgagguaaaccucugcaauauagacauuuucaacccuaaauacgauuguaagaucaugacuucaaagaccgacguuaguuccagcgugaucacaucucugggagcuauugucucaugcuaugguaaaaccaagugcacugccaguaauaaaaaccgaggcaucauuaagacguuuagcaaugggugugauuacguguccaacaaaggagucgacacagugucuguuggcaauaccuuauauuacgugaacaagcaagaagguaagucgcuguauguaaaaggggagccaauaaucaauuucuacgacccgcuagucuuucccagcgaugaguucgacgcguccauuucacaggugaacgaaaagaucaaucagagucucgccuucaucagaaaaucugaugaacugcuucacaacguuaaugugggaaagagcacuaccaacauuaugauaacaaccaucauuaucgucauuaucgugauauugcugcuccugaucgcaguaggccuuuuucuguacugcaaagcuaggugaggacuagugaagggaacacccaaauuuaauucagccuuaagcacaauuaauuaagagugaaacguaauuguacaagcaguuggucacccaccauagggcaugaucaacaccgcaaccuuuccuuuuucccccagugauucugaaaaaccccucuucccuucagcuugcuuagauguuccaaauuuaguaagcuuaaggcggccuacagaagaaaaagaaaaaaaaggccacaaaaguucccucucacuuucaguaaauaaaauaaaagcagcaacagaaauaaagaaauaaaugaaauucaaaaugaaauaaauauuguguugugcagcauuaaaaaaucaauaaaaauuaaaaaugagcaagaucuaaaaaaaaaaaaaaaaaaaaaaaaaaaaaaaaaaaaaaaaaaaaaaaaaaaaaaaaaaaaaaaaugcaucccccccccccccccccccccccccccccccaaaggcucuuuucagagccaccagaauu

SEQ ID NO: 12316 - RNA, 2247 nt, Artificial Sequence
  mRNA product Design f-1 comprising derived and/or modified sequence from HRSV(Memphis-37)__AIY60640.1__F-del (opt4)
gggagagcggcucggccauuuugucccagucaguccggaggcugcggcugcagaaguaccgccugcggaguaacugcaaagaagcuuaccauggagcugcccauccugaagaccaacgccaucaccaccauccuggccgccgugacccugugcuucgccagcagccagaacaucaccgaggaguucuaccagagcaccugcagcgccgugagcaagggcuaccugagcgcccugagaaccggcugguacaccagcgugaucaccaucgagcugagcaacaucaaggagaacaagugcaacggcaccgacgccaaggugaagcugaucaagcaggagcuggacaaguacaagaacgccgugaccgagcugcagcugcugaugcagagcacccccgccgccaacaacagagccagaagagagcugcccagauucaugaacuacacccugaacaacaccaagaacaacaacgugacccugagcaagaagagaaagagaagauuccugggcuuccugcugggcgugggcagcgccaucgccagcggcaucgccgugagcaaggugcugcaccuggagggcgaggugaacaagaucaagaacgcccugcugagcaccaacaaggccguggugagccugagcaacggcgugagcgugcugaccagcaaggugcuggaccugaagaacuacaucgacaagcagcugcugcccaucgugaacaagcagagcugcagcaucagcaacaucgagaccgugaucgaguuccagcagaagaacaacagacugcuggagaucaccagagaguucagcgugaacgccggcgugaccacccccgugagcaccuacaugcugaccaacagcgagcugcugagccugaucaacgacaugcccaucaccaacgaccagaagaagcugaugagcaacaacgugcagaucgugagacagcagagcuacagcaucaugagcaucaucaaggaggaggugcuggccuacguggugcagcugccccuguacggcgugaucgacacccccugcuggaagcugcacaccagcccccugugcaccaccaacaccaaggagggcagcaacaucugccugaccagaaccgacagaggcugguacugcgacaacgccggcagcgugagcuucuucccccaggccgagaccugcaaggugcagagcaacagaguguucugcgacaccaugaacagccugacccugcccagcgaggugaaccugugcaacaucgacaucuucaaccccaaguacgacugcaagaucaugaccagcaagaccgacgugagcagcagcgugaucaccagccugggcgccaucgugagcugcuacggcaagaccaagugcaccgccagcaacaagaacagaggcaucaucaagaccuucagcaacggcugcgacuacgugagcaacaagggcguggacaccgugagcgugggcaacacccuguacuacgugaacaagcaggagggcaagagccuguacgugaagggcgagcccaucaucaacuucuacgacccccugguguuccccagcgacgaguucgacgccagcaucagccaggugaacgagaagaucaaccagagccuggccuucaucagaaagagcgacgagcugcugcacaacgugaacgugggcaagagcaccaccaacaucaugaucaccaccaucaucaucgugaucaucgugauccugcugcugcugaucgccgugggccuguuccuguacugcaaggccagaugaggacuagugaagggaacacccaaauuuaauucagccuuaagcacaauuaauuaagagugaaacguaauuguacaagcaguuggucacccaccauagggcaugaucaacaccgcaaccuuuccuuuuucccccagugauucugaaaaaccccucuucccuucagcuugcuuagauguuccaaauuuaguaagcuuaaggcggccuacagaagaaaaagaaaaaaaaggccacaaaaguucccucucacuuucaguaaauaaaauaaaagcagcaacagaaauaaagaaauaaaugaaauucaaaaugaaauaaauauuguguugugcagcauuaaaaaaucaauaaaaauuaaaaaugagcaagaucuaaaaaaaaaaaaaaaaaaaaaaaaaaaaaaaaaaaaaaaaaaaaaaaaaaaaaaaaaaaaaaaaugcaucccccccccccccccccccccccccccccccaaaggcucuuuucagagccaccagaauu

SEQ ID NO: 12317 - RNA, 2247 nt, Artificial Sequence
  mRNA product Design f-1 comprising derived and/or modified sequence from HRSV(Memphis-37)__AIY60640.1__F-del (opt5)
gggagagcggcucggccauuuugucccagucaguccggaggcugcggcugcagaaguaccgccugcggaguaacugcaaagaagcuuaccauggagcugcccauccucaagaccaacgccauuacaacgauccuggcugccgugacccuuugcuucgcgagcucccagaauauuacagaagaguuuuaccaaucuaccuguagcgcugucuccaaaggcuaucugucugcccucagaacagggugguacaccagcguuaucacaauugaacuguccaacaucaaggagaauaaaugcaacggaaccgacgccaaggugaaacuuaucaagcaggaacuggauaaguauaaaaaugcugugacggagcuccagcugcugaugcagucuaccccugccgcuaacaaucgggcccgcagagagcucccgcgguucaugaacuacacacugaauaacaccaagaauaacaaugucacacuuagcaaaaagcgcaaaagacgguuucugggcuuccuccugggggugggauccgcgauugccagcggcaucgcuguuucuaaggugcuucaccuggaaggggaggucaacaagauuaaaaaugcccuccuguccaccaacaaggcugugguuagccugucuaacggaguguccguccucacgagcaaagugcuggaccuuaagaauuauaucgauaaacaacugcuccccauugugaacaagcagucuuguuccaucagcaauauugaaacagucaucgaguuucagcagaaaaacaaucgccugcuugagaucaccagagaauuuuccguuaacgccggcgugacaaccccugugucuaccuacaugcugacaaauagcgagcuccugucccugauuaacgacaugcccaucacgaaugaucaaaagaagcucaugagcaacaauguccagauugugcggcagcagucuuauuccaucaugagcauuaucaaagaagagguucuggcguacgugguccaacuuccucuguacggcgugaucgacacccccugcuggaagcuccauacaucuccucuguguaccacaaacaccaaagaagggagcaauauuugccuuacgcgcacagauagaggaugguauugugacaacgccggcuccguuucuuucuucccgcaggcugagaccugcaaggugcagagcaaucgggucuuuugugauaccaugaacucccugacacuccccagcgaggugaaccugugcaauaucgacauuuucaacccuaaauacgauuguaagaucaugaccucuaagacagacgucuccagcucugugauuacgucccugggggccaucguuagcugcuauggaaaaaccaagugcacagcuuccaauaaaaaccgcggcaucauuaagaccuuuucuaaugggugugauuacgugagcaacaaaggagucgacacaguguccguuggcaauacccucuauuacgugaacaagcaagaaggcaagucucuguaugucaaaggggagcccaucauuaauuucuacgacccucuuguguuucccagcgaugaguucgacgccuccaucagccaggugaacgaaaagauuaaucagucucuggccuucaucagaaaauccgaugaacuccugcacaacguuaaugucggaaagagcacgaccaacauuaugaucacaaccaucauuaucgugauuaucgugauucugcuucuccugaucgcugucggccuguuucucuacugcaaagcgcggugaggacuagugaagggaacacccaaauuuaauucagccuuaagcacaauuaauuaagagugaaacguaauuguacaagcaguuggucacccaccauagggcaugaucaacaccgcaaccuuuccuuuuucccccagugauucugaaaaaccccucuucccuucagcuugcuuagauguuccaaauuuaguaagcuuaaggcggccuacagaagaaaaagaaaaaaaaggccacaaaaguucccucucacuuucaguaaauaaaauaaaagcagcaacagaaauaaagaaauaaaugaaauucaaaaugaaauaaauauuguguugugcagcauuaaaaaaucaauaaaaauuaaaaaugagcaagaucuaaaaaaaaaaaaaaaaaaaaaaaaaaaaaaaaaaaaaaaaaaaaaaaaaaaaaaaaaaaaaaaaugcaucccccccccccccccccccccccccccccccaaaggcucuuuucagagccaccagaauu

SEQ ID NO: 12318 - RNA, 2247 nt, Artificial Sequence
  mRNA product Design f-1 comprising derived and/or modified sequence from HRSV(Memphis-37)__AIY60640.1__F-del (opt6)
gggagagcggcucggccauuuugucccagucaguccggaggcugcggcugcagaaguaccgccugcggaguaacugcaaagaagcuuaccauggaacucccaauauuaaaaacuaacgcaaucacaaccauauuagcagccgucacucuaugcuuugccuccucacaaaauauaacagaagaauuuuaccaauccacaugcucagccguuagcaaaggauaucuaucagcccuaagaacaggcugguauacuucaguaauaacaauagaacuaucaaauauaaaagaaaacaaaugcaacggaaccgacgcuaaaguaaagcucauaaaacaagaauuagacaaauacaaaaaugcaguaacagaacuacaacuccuaaugcaaucaaccccagccgccaauaacagagcuagacgagaacuaccccgauucaugaauuacacacuaaacaacacaaaaaacaacaauguaacacucucaaaaaaaagaaaacgaagauucuuagguuuucuccugggaguaggaucagcaaucgcuuccggaaucgcagucaguaaaguccuucaccuugaaggcgaaguaaacaaaauaaaaaaugcacuacuaucuacaaauaaagcaguaguaucccuauccaauggcgucucaguauuaaccucaaaaguacucgaccuuaaaaauuauauagacaaacaauuacuacccauagucaauaaacaauccuguuccauaucaaacauagaaacaguaaucgaauuucaacaaaaaaacaacagauuacuagaaauaacacgcgaauuuucagucaacgccggaguaaccacacccgucucaacauacaugcuaaccaacuccgaacuacuaucacuuaucaacgacaugccaauaacaaaugaccaaaaaaaacucaugucaaacaacguacaaauaguccgccaacaaucauacucuauaaugucuauuaucaaagaagaaguucucgcauacguaguacaacuaccacuauauggugucauagacacaccauguuggaaacuccauacaucacccuuauguacaaccaauacaaaagaaggcucaaacaucugccuaacucgaacagaccgaggaugguacugcgacaaugcaggaucugucucauucuucccucaagcagaaacauguaaaguucaaucuaauagaguuuucugcgauacaaugaacucacuaacucuaccaucagaaguaaaucucuguaauauugacauauucaacccaaaauacgauugcaagaucaugacaucaaaaacugacguaucauccucagucaucaccucauuaggagcaaucguaagcuguuacgggaaaacaaaaugcaccgcuucuaacaaaaauagaggaauaauuaaaaccuucucaaacggaugcgauuacgucuccaauaaaggaguagauacaguaagcguaggaaauacucuauacuacgucaauaaacaagaaggaaaaucacuuuaugucaaaggagaacccauaauaaauuucuacgacccauuagucuucccaucagaugaauuugacgcauccauaucccaagucaacgaaaaaaucaaucaaucacuagcauucauacgaaaaucagacgaacuacuacacaacguuaacguaggaaaaucaacaaccaacaucaugauaaccacuauaauaaucgucauaauagucauccuauuauuacuaauagccguaggccuuuuccuauacuguaaagcuagauaaggacuagugaagggaacacccaaauuuaauucagccuuaagcacaauuaauuaagagugaaacguaauuguacaagcaguuggucacccaccauagggcaugaucaacaccgcaaccuuuccuuuuucccccagugauucugaaaaaccccucuucccuucagcuugcuuagauguuccaaauuuaguaagcuuaaggcggccuacagaagaaaaagaaaaaaaaggccacaaaaguucccucucacuuucaguaaauaaaauaaaagcagcaacagaaauaaagaaauaaaugaaauucaaaaugaaauaaauauuguguugugcagcauuaaaaaaucaauaaaaauuaaaaaugagcaagaucuaaaaaaaaaaaaaaaaaaaaaaaaaaaaaaaaaaaaaaaaaaaaaaaaaaaaaaaaaaaaaaaaugcaucccccccccccccccccccccccccccccccaaaggcucuuuucagagccaccagaauu

SEQ ID NO: 12319 - RNA, 2247 nt, Artificial Sequence
  mRNA product Design f-1 comprising derived and/or modified sequence from HRSV(Memphis-37)__AIY60640.1__F-del (opt11)
gggagagcggcucggccauuuugucccagucaguccggaggcugcggcugcagaaguaccgccugcggaguaacugcaaagaagcuuaccauggaacucccgauccucaaaaccaacgccaucaccacuauccucgccgccguaacccucugcuucgccucaucccaaaacaucaccgaagaauuuuaccaauccacaugcuccgccgucuccaaagguuaccucucagcccuccgcaccggcugguacaccuccguuaucaccaucgaacuuuccaacauaaaagagaacaagugcaacggcaccgacgcaaaaguaaaacuaaucaaacaagaacuagacaaauacaaaaacgccgucaccgaacuccagcuccucaugcaaucgacgcccgccgccaacaaccgagcaaggcgcgaacuuccacgcuucaugaacuacacccucaacaacacuaaaaacaacaacgugacccuauccaaaaagcguaaacgccgauuccuagguuuccuucucggugucggcuccgccauugccuccggcaucgcuguuuccaaaguccuccaccucgaaggcgaaguaaacaagauaaaaaacgcccuccucucuacaaacaaggccgugguaucgcucucuaacggcgucucuguacucaccuccaaaguccucgaccucaaaaacuacaucgacaagcaacuccucccuaucgucaauaaacaauccugcuccauuuccaacaucgaaacagugaucgaauuucaacaaaaaaacaaccgauuacuagaaaucacccgcgaauuuucagucaacgccggcgucacaacgccagucucaaccuacaugcucaccaacucagaacucuuaucacucaucaacgacaugcccaucacuaacgaccagaaaaaacugauguccaacaacgugcaaauaguccgccaacaguccuacuccaucauguccauaaucaaggaggaggugcucgccuacguaguccaacucccccucuacggagucauugacaccccuugcuggaaacuacacaccuccccucucugcaccaccaacaccaaagaaggcagcaacaucugccuaaccaggacggaccgaggaugguacugcgacaaugcaggcuccgucagcuucuucccacaagccgaaacaugcaaaguucaaucaaaccguguauucugcgacaccaugaacucacucacccuccccucagaaguaaaccuaugcaacauagauaucuucaaccccaaauacgacugcaaaauuaugaccuccaaaaccgaugucuccagcuccguuaucacgucacucggcgccaucgucuccugcuacggcaagaccaaaugcaccgccuccaacaaaaaccgcggaauaaucaaaacauucucuaacggcugcgacuacgucuccaauaaaggcgucgacaccgucuccgugggcaacacgcuguacuacgucaacaaacaagaaggcaaaucucuuuacgucaaaggugaaccaaucaucaacuucuacgacccccucguauuccccuccgacgaauuugacgcgagcaucucccaagucaacgaaaagaucaaccaaucccucgccuucauccgaaaaagcgacgaacuccuccacaacgucaacgucggcaaaaguaccacaaacauuaugaucaccaccaucaucauagucaucaucgucauccugcuccuacuaauagccgucggccucuucuuguacugcaaggcacgaugaggacuagugaagggaacacccaaauuuaauucagccuuaagcacaauuaauuaagagugaaacguaauuguacaagcaguuggucacccaccauagggcaugaucaacaccgcaaccuuuccuuuuucccccagugauucugaaaaaccccucuucccuucagcuugcuuagauguuccaaauuuaguaagcuuaaggcggccuacagaagaaaaagaaaaaaaaggccacaaaaguucccucucacuuucaguaaauaaaauaaaagcagcaacagaaauaaagaaauaaaugaaauucaaaaugaaauaaauauuguguugugcagcauuaaaaaaucaauaaaaauuaaaaaugagcaagaucuaaaaaaaaaaaaaaaaaaaaaaaaaaaaaaaaaaaaaaaaaaaaaaaaaaaaaaaaaaaaaaaaugcaucccccccccccccccccccccccccccccccaaaggcucuuuucagagccaccagaauu

SEQ ID NO: 12320 - RNA, 2027 nt, Artificial Sequence
  mRNA product Design f-2 comprising derived and/or modified sequence from HRSV(Memphis-37)__AIY60640.1__F-del (wt)
gggagagcggcucggccauuuugucccagucaguccggaggcugcggcugcagaaguaccgccugcggaguaacugcaaagaagcuuaccauggaguugccaauccucaaaacaaaugcaauuaccacaauccuugcugcagucacacucuguuucgcuuccagucaaaacaucacugaagaauuuuaucaaucaacaugcagugcaguuagcaaaggcuaucuuagugcuuuaagaacugguugguauacuaguguuauaacuauagaauuaaguaauaucaaggaaaauaaguguaauggaacagaugcuaagguaaaauugauaaaacaagaauuagauaaauauaaaaaugcuguaacagaauugcaguugcucaugcaaagcacaccagcagccaacaaucgagccagaagagaacuaccaagguuuaugaauuauacacucaacaauaccaaaaauaacaauguaacauuaagcaagaaaaggaaaagaagauuucuuggcuuuuuguuagguguuggaucugcaaucgccaguggcauugcuguaucuaaaguccugcaccuagaaggggaagugaacaaaaucaaaaaugcucuacuauccacaaacaaggcuguagucagcuuaucaaauggaguuagugucuuaaccagcaaaguguuagaccucaaaaacuauauagauaaacaguuguuacccauugugaacaagcaaagcugcagcauaucaaacauugaaacugugauagaauuccaacaaaagaacaacagacuacuagagauuaccagggaauuuaguguuaaugcagguguaacuacaccuguaagcacuuauauguuaacaaauagugaauuauuaucauuaaucaaugauaugccuauaacaaaugaucagaaaaaguuaauguccaacaauguucaaauaguuagacagcaaaguuacucuaucauguccauaauaaaggaggaagucuuagcauauguaguucaauuaccacuauaugguguaauagauacaccuuguuggaaacuacacacauccccucuaugcacaaccaacacaaaggaaggguccaacaucuguuuaacaagaaccgacagaggaugguacugugacaaugcaggaucagugucuuucuucccacaagcugaaacaugcaaaguucaaucgaaucgaguauuuugugacacaaugaacagucuaacauuaccaagugaaguaaaucucugcaacauugacauauucaacccuaaauaugauugcaaaauuaugacuucaaaaacagaugugagcagcuccguuaucacaucucuaggagccauugugucaugcuauggcaaaacuaaauguacagcauccaauaaaaaucguggaaucauaaagacauuuucuaacgggugugauuauguaucaaauaaggggguggacacuguaucuguagguaauacauuauauuauguaaauaagcaagaaggaaaaagccucuauguaaaaggugaaccaauaauaaauuucuaugacccauuaguguucccuucugaugaauuugaugcaucaauaucucaagucaaugagaagauuaaccagagccuagcauuuauucguaaauccgaugaauuauuacauaauguaaauguugguaaauccaccacaaauaucaugauaacuacuauaauuauagugauuauaguaauauuguuauuauuaauugcaguugggcuguuccuauacugcaaggccagaugaggacuaguggaagcauuuuccuggcugauuaaaagaaauuacucagcuauggucaucuguuccuguuagaaggcuaugcagcauauuauauacuaugcgcauguuaugaaaugcauaauaaaaaauuuuaaaaaaucuaaaagaucuaaaaaaaaaaaaaaaaaaaaaaaaaaaaaaaaaaaaaaaaaaaaaaaaaaaaaaaaaaaaaaaaugcaucccccccccccccccccccccccccccccccaaaggcucuuuucagagccaccagaauu

SEQ ID NO: 12321 - RNA, 2027 nt, Artificial Sequence
  mRNA product Design f-2 comprising derived and/or modified sequence from HRSV(Memphis-37)__AIY60640.1__F-del (opt1)
gggagagcggcucggccauuuugucccagucaguccggaggcugcggcugcagaaguaccgccugcggaguaacugcaaagaagcuuaccauggagcugcccauccucaagaccaacgccaucaccacgauccuggccgcggugacccugugcuucgccagcucccagaacaucaccgaggaguucuaccagagcacgugcuccgccgucagcaagggcuaccucuccgcccugcgcaccgggugguacaccagcgugaucaccaucgagcuguccaacaucaaggagaacaagugcaacggcaccgacgccaaggugaagcucaucaagcaggagcuggacaaguacaagaacgcggucacggagcugcagcuccugaugcagagcaccccggccgccaacaaccgggcccgccgggagcugccccgcuucaugaacuacacccucaacaacaccaagaacaacaacgugacgcuguccaagaagcggaagcgccgguuccugggguuccuccugggcguggggagcgcgaucgccuccggcaucgccgucagcaaggugcugcaccucgagggcgaggugaacaagaucaagaacgcccugcuguccaccaacaaggccgucgugagccucuccaacggggugagcguccugaccuccaaggugcuggaccucaagaacuacaucgacaagcagcugcugcccaucgugaacaagcagagcugcuccaucagcaacaucgagaccgucaucgaguuccagcagaagaacaaccgccuccuggagaucacgcgggaguucagcgugaacgcgggcgugaccacccccgucuccaccuacaugcugacgaacagcgagcuccugucccugaucaacgacaugccgaucaccaacgaccagaagaagcucaugagcaacaacgugcagaucgugcgccagcaguccuacagcaucauguccaucaucaaggaggagguccuggccuacguggugcagcugccccucuacggggucaucgacacccccugcuggaagcugcacaccagcccccugugcacgaccaacaccaaggagggcuccaacaucugccucacccggacggaccgcgggugguacugcgacaacgccggcagcguguccuucuucccgcaggccgagaccugcaagguccagagcaaccggguguucugcgacaccaugaacucccugacccugcccagcgaggugaaccucugcaacaucgacaucuucaaccccaaguacgacugcaagaucaugacguccaagaccgacgucagcuccagcgugaucaccucccugggcgccaucgugagcugcuacgggaagaccaagugcacggcgagcaacaagaaccgcggcaucaucaagaccuucuccaacgggugcgacuacgucagcaacaagggcguggacaccguguccgucggcaacacccuguacuacgugaacaagcaggagggcaagagccucuacgugaagggggagcccaucaucaacuucuacgacccgcuggucuuccccuccgacgaguucgacgccagcaucucccaggugaacgagaagaucaaccagagccuggccuucauccggaaguccgacgagcuccugcacaacgugaacgucggcaagagcaccacgaacaucaugaucaccaccaucaucaucgugaucaucgugauccugcugcuccugaucgccgucgggcuguuccucuacugcaaggcccgcugaggacuaguggaagcauuuuccuggcugauuaaaagaaauuacucagcuauggucaucuguuccuguuagaaggcuaugcagcauauuauauacuaugcgcauguuaugaaaugcauaauaaaaaauuuuaaaaaaucuaaaagaucuaaaaaaaaaaaaaaaaaaaaaaaaaaaaaaaaaaaaaaaaaaaaaaaaaaaaaaaaaaaaaaaaugcaucccccccccccccccccccccccccccccccaaaggcucuuuucagagccaccagaauu

SEQ ID NO: 12322 - RNA, 2027 nt, Artificial Sequence
  mRNA product Design f-2 comprising derived and/or modified sequence from HRSV(Memphis-37)__AIY60640.1__F-del (opt2)
gggagagcggcucggccauuuugucccagucaguccggaggcugcggcugcagaaguaccgccugcggaguaacugcaaagaagcuuaccauggagcuccccauccucaagaccaacgccaucaccaccauccucgccgccgucacccucugcuucgccuccucccagaacaucaccgaggaguucuaccaguccaccugcuccgccgucuccaagggcuaccucuccgcccuccgcaccggcugguacaccuccgucaucaccaucgagcucuccaacaucaaggagaacaagugcaacggcaccgacgccaaggucaagcucaucaagcaggagcucgacaaguacaagaacgccgucaccgagcuccagcuccucaugcaguccacccccgccgccaacaaccgcgcccgccgcgagcucccccgcuucaugaacuacacccucaacaacaccaagaacaacaacgucacccucuccaagaagcgcaagcgccgcuuccucggcuuccuccucggcgucggcuccgccaucgccuccggcaucgccgucuccaagguccuccaccucgagggcgaggucaacaagaucaagaacgcccuccucuccaccaacaaggccgucgucucccucuccaacggcgucuccguccucaccuccaagguccucgaccucaagaacuacaucgacaagcagcuccuccccaucgucaacaagcaguccugcuccaucuccaacaucgagaccgucaucgaguuccagcagaagaacaaccgccuccucgagaucacccgcgaguucuccgucaacgccggcgucaccacccccgucuccaccuacaugcucaccaacuccgagcuccucucccucaucaacgacaugcccaucaccaacgaccagaagaagcucauguccaacaacguccagaucguccgccagcaguccuacuccaucauguccaucaucaaggaggagguccucgccuacgucguccagcucccccucuacggcgucaucgacacccccugcuggaagcuccacaccuccccccucugcaccaccaacaccaaggagggcuccaacaucugccucacccgcaccgaccgcggcugguacugcgacaacgccggcuccgucuccuucuucccccaggccgagaccugcaagguccaguccaaccgcgucuucugcgacaccaugaacucccucacccuccccuccgaggucaaccucugcaacaucgacaucuucaaccccaaguacgacugcaagaucaugaccuccaagaccgacgucuccuccuccgucaucaccucccucggcgccaucgucuccugcuacggcaagaccaagugcaccgccuccaacaagaaccgcggcaucaucaagaccuucuccaacggcugcgacuacgucuccaacaagggcgucgacaccgucuccgucggcaacacccucuacuacgucaacaagcaggagggcaagucccucuacgucaagggcgagcccaucaucaacuucuacgacccccucgucuuccccuccgacgaguucgacgccuccaucucccaggucaacgagaagaucaaccagucccucgccuucauccgcaaguccgacgagcuccuccacaacgucaacgucggcaaguccaccaccaacaucaugaucaccaccaucaucaucgucaucaucgucauccuccuccuccucaucgccgucggccucuuccucuacugcaaggcccgcugaggacuaguggaagcauuuuccuggcugauuaaaagaaauuacucagcuauggucaucuguuccuguuagaaggcuaugcagcauauuauauacuaugcgcauguuaugaaaugcauaauaaaaaauuuuaaaaaaucuaaaagaucuaaaaaaaaaaaaaaaaaaaaaaaaaaaaaaaaaaaaaaaaaaaaaaaaaaaaaaaaaaaaaaaaugcaucccccccccccccccccccccccccccccccaaaggcucuuuucagagccaccagaauu

SEQ ID NO: 12323 - RNA, 2027 nt, Artificial Sequence
  mRNA product Design f-2 comprising derived and/or modified sequence from HRSV(Memphis-37)__AIY60640.1__F-del (opt3)
gggagagcggcucggccauuuugucccagucaguccggaggcugcggcugcagaaguaccgccugcggaguaacugcaaagaagcuuaccauggagcugcccauccucaagaccaacgccauuacaacuauacuugcugcagugacgcugugcuucgccagcucccagaauaucaccgaagaguuuuaccaaucuacauguucagcggucaguaaaggcuauuugagcgcuuuaagaacugggugguacaccuccguuauuacaaucgaacugucuaacauuaaggagaauaaaugcaacggaaccgacgccaaggugaaacuaaucaagcaggaacucgauaaguauaaaaaugcaguaacugagcugcagcuucugaugcagucgaccccugccgcuaacaauagggcacggcgcgaguugccacgauucaugaacuacacacucaauaacacgaagaauaacaaugugacucugagcaaaaagcguaaaagaagguuucuggguuuccucuuaggcgucgggucagccauagcuaguggaaucgccguguccaagguucugcaccuugaaggcgaggugaacaagauuaaaaaugcguugcugucuaccaacaaggcagucgugagccuauccaacgguguaucaguucucacaaguaaagugcuggaccuuaagaauuauaucgauaaacaacuguugccgauugucaacaagcagagcuguucuaucuccaauauagaaacugugauugaguuucagcagaaaaacaaucggcuccuggagaucacccgcgaguucucagugaacgccggggucacaacccccguuagcacguacauguuaacuaauagugaacugcucucucuuauuaacgacaugccuaucacaaaugaucaaaagaagcugauguccaacaaugugcagaucguaagacagcagagcuauucgauuaugucuauaaucaaagaagagguguuggcuuacgucgugcaacuaccacuguacggaguuauugacacccccugcuggaagcuccauacuuccccucuguguacaaccaacacgaaagaaggcucaaauaucugccuuaccaggacagaucggggcugguauugugacaacgccgggagugugagcuuuuucccacaggcagagacuugcaagguccaguccaaucgcguguuuugugauaccaugaacucucugacauugcccagcgagguaaaccucugcaauauagacauuuucaacccuaaauacgauuguaagaucaugacuucaaagaccgacguuaguuccagcgugaucacaucucugggagcuauugucucaugcuaugguaaaaccaagugcacugccaguaauaaaaaccgaggcaucauuaagacguuuagcaaugggugugauuacguguccaacaaaggagucgacacagugucuguuggcaauaccuuauauuacgugaacaagcaagaagguaagucgcuguauguaaaaggggagccaauaaucaauuucuacgacccgcuagucuuucccagcgaugaguucgacgcguccauuucacaggugaacgaaaagaucaaucagagucucgccuucaucagaaaaucugaugaacugcuucacaacguuaaugugggaaagagcacuaccaacauuaugauaacaaccaucauuaucgucauuaucgugauauugcugcuccugaucgcaguaggccuuuuucuguacugcaaagcuaggugaggacuaguggaagcauuuuccuggcugauuaaaagaaauuacucagcuauggucaucuguuccuguuagaaggcuaugcagcauauuauauacuaugcgcauguuaugaaaugcauaauaaaaaauuuuaaaaaaucuaaaagaucuaaaaaaaaaaaaaaaaaaaaaaaaaaaaaaaaaaaaaaaaaaaaaaaaaaaaaaaaaaaaaaaaugcaucccccccccccccccccccccccccccccccaaaggcucuuuucagagccaccagaauu

SEQ ID NO: 12324 - RNA, 2027 nt, Artificial Sequence
  mRNA product Design f-2 comprising derived and/or modified sequence from HRSV(Memphis-37)__AIY60640.1__F-del (opt4)
gggagagcggcucggccauuuugucccagucaguccggaggcugcggcugcagaaguaccgccugcggaguaacugcaaagaagcuuaccauggagcugcccauccugaagaccaacgccaucaccaccauccuggccgccgugacccugugcuucgccagcagccagaacaucaccgaggaguucuaccagagcaccugcagcgccgugagcaagggcuaccugagcgcccugagaaccggcugguacaccagcgugaucaccaucgagcugagcaacaucaaggagaacaagugcaacggcaccgacgccaaggugaagcugaucaagcaggagcuggacaaguacaagaacgccgugaccgagcugcagcugcugaugcagagcacccccgccgccaacaacagagccagaagagagcugcccagauucaugaacuacacccugaacaacaccaagaacaacaacgugacccugagcaagaagagaaagagaagauuccugggcuuccugcugggcgugggcagcgccaucgccagcggcaucgccgugagcaaggugcugcaccuggagggcgaggugaacaagaucaagaacgcccugcugagcaccaacaaggccguggugagccugagcaacggcgugagcgugcugaccagcaaggugcuggaccugaagaacuacaucgacaagcagcugcugcccaucgugaacaagcagagcugcagcaucagcaacaucgagaccgugaucgaguuccagcagaagaacaacagacugcuggagaucaccagagaguucagcgugaacgccggcgugaccacccccgugagcaccuacaugcugaccaacagcgagcugcugagccugaucaacgacaugcccaucaccaacgaccagaagaagcugaugagcaacaacgugcagaucgugagacagcagagcuacagcaucaugagcaucaucaaggaggaggugcuggccuacguggugcagcugccccuguacggcgugaucgacacccccugcuggaagcugcacaccagcccccugugcaccaccaacaccaaggagggcagcaacaucugccugaccagaaccgacagaggcugguacugcgacaacgccggcagcgugagcuucuucccccaggccgagaccugcaaggugcagagcaacagaguguucugcgacaccaugaacagccugacccugcccagcgaggugaaccugugcaacaucgacaucuucaaccccaaguacgacugcaagaucaugaccagcaagaccgacgugagcagcagcgugaucaccagccugggcgccaucgugagcugcuacggcaagaccaagugcaccgccagcaacaagaacagaggcaucaucaagaccuucagcaacggcugcgacuacgugagcaacaagggcguggacaccgugagcgugggcaacacccuguacuacgugaacaagcaggagggcaagagccuguacgugaagggcgagcccaucaucaacuucuacgacccccugguguuccccagcgacgaguucgacgccagcaucagccaggugaacgagaagaucaaccagagccuggccuucaucagaaagagcgacgagcugcugcacaacgugaacgugggcaagagcaccaccaacaucaugaucaccaccaucaucaucgugaucaucgugauccugcugcugcugaucgccgugggccuguuccuguacugcaaggccagaugaggacuaguggaagcauuuuccuggcugauuaaaagaaauuacucagcuauggucaucuguuccuguuagaaggcuaugcagcauauuauauacuaugcgcauguuaugaaaugcauaauaaaaaauuuuaaaaaaucuaaaagaucuaaaaaaaaaaaaaaaaaaaaaaaaaaaaaaaaaaaaaaaaaaaaaaaaaaaaaaaaaaaaaaaaugcaucccccccccccccccccccccccccccccccaaaggcucuuuucagagccaccagaauu

SEQ ID NO: 12325 - RNA, 2027 nt, Artificial Sequence
  mRNA product Design f-2 comprising derived and/or modified sequence from HRSV(Memphis-37)__AIY60640.1__F-del (opt5)
gggagagcggcucggccauuuugucccagucaguccggaggcugcggcugcagaaguaccgccugcggaguaacugcaaagaagcuuaccauggagcugcccauccucaagaccaacgccauuacaacgauccuggcugccgugacccuuugcuucgcgagcucccagaauauuacagaagaguuuuaccaaucuaccuguagcgcugucuccaaaggcuaucugucugcccucagaacagggugguacaccagcguuaucacaauugaacuguccaacaucaaggagaauaaaugcaacggaaccgacgccaaggugaaacuuaucaagcaggaacuggauaaguauaaaaaugcugugacggagcuccagcugcugaugcagucuaccccugccgcuaacaaucgggcccgcagagagcucccgcgguucaugaacuacacacugaauaacaccaagaauaacaaugucacacuuagcaaaaagcgcaaaagacgguuucugggcuuccuccugggggugggauccgcgauugccagcggcaucgcuguuucuaaggugcuucaccuggaaggggaggucaacaagauuaaaaaugcccuccuguccaccaacaaggcugugguuagccugucuaacggaguguccguccucacgagcaaagugcuggaccuuaagaauuauaucgauaaacaacugcuccccauugugaacaagcagucuuguuccaucagcaauauugaaacagucaucgaguuucagcagaaaaacaaucgccugcuugagaucaccagagaauuuuccguuaacgccggcgugacaaccccugugucuaccuacaugcugacaaauagcgagcuccugucccugauuaacgacaugcccaucacgaaugaucaaaagaagcucaugagcaacaauguccagauugugcggcagcagucuuauuccaucaugagcauuaucaaagaagagguucuggcguacgugguccaacuuccucuguacggcgugaucgacacccccugcuggaagcuccauacaucuccucuguguaccacaaacaccaaagaagggagcaauauuugccuuacgcgcacagauagaggaugguauugugacaacgccggcuccguuucuuucuucccgcaggcugagaccugcaaggugcagagcaaucgggucuuuugugauaccaugaacucccugacacuccccagcgaggugaaccugugcaauaucgacauuuucaacccuaaauacgauuguaagaucaugaccucuaagacagacgucuccagcucugugauuacgucccugggggccaucguuagcugcuauggaaaaaccaagugcacagcuuccaauaaaaaccgcggcaucauuaagaccuuuucuaaugggugugauuacgugagcaacaaaggagucgacacaguguccguuggcaauacccucuauuacgugaacaagcaagaaggcaagucucuguaugucaaaggggagcccaucauuaauuucuacgacccucuuguguuucccagcgaugaguucgacgccuccaucagccaggugaacgaaaagauuaaucagucucuggccuucaucagaaaauccgaugaacuccugcacaacguuaaugucggaaagagcacgaccaacauuaugaucacaaccaucauuaucgugauuaucgugauucugcuucuccugaucgcugucggccuguuucucuacugcaaagcgcggugaggacuaguggaagcauuuuccuggcugauuaaaagaaauuacucagcuauggucaucuguuccuguuagaaggcuaugcagcauauuauauacuaugcgcauguuaugaaaugcauaauaaaaaauuuuaaaaaaucuaaaagaucuaaaaaaaaaaaaaaaaaaaaaaaaaaaaaaaaaaaaaaaaaaaaaaaaaaaaaaaaaaaaaaaaugcaucccccccccccccccccccccccccccccccaaaggcucuuuucagagccaccagaauu

SEQ ID NO: 12326 - RNA, 2027 nt, Artificial Sequence
  mRNA product Design f-2 comprising derived and/or modified sequence from HRSV(Memphis-37)__AIY60640.1__F-del (opt6)
gggagagcggcucggccauuuugucccagucaguccggaggcugcggcugcagaaguaccgccugcggaguaacugcaaagaagcuuaccauggaacucccaauauuaaaaacuaacgcaaucacaaccauauuagcagccgucacucuaugcuuugccuccucacaaaauauaacagaagaauuuuaccaauccacaugcucagccguuagcaaaggauaucuaucagcccuaagaacaggcugguauacuucaguaauaacaauagaacuaucaaauauaaaagaaaacaaaugcaacggaaccgacgcuaaaguaaagcucauaaaacaagaauuagacaaauacaaaaaugcaguaacagaacuacaacuccuaaugcaaucaaccccagccgccaauaacagagcuagacgagaacuaccccgauucaugaauuacacacuaaacaacacaaaaaacaacaauguaacacucucaaaaaaaagaaaacgaagauucuuagguuuucuccugggaguaggaucagcaaucgcuuccggaaucgcagucaguaaaguccuucaccuugaaggcgaaguaaacaaaauaaaaaaugcacuacuaucuacaaauaaagcaguaguaucccuauccaauggcgucucaguauuaaccucaaaaguacucgaccuuaaaaauuauauagacaaacaauuacuacccauagucaauaaacaauccuguuccauaucaaacauagaaacaguaaucgaauuucaacaaaaaaacaacagauuacuagaaauaacacgcgaauuuucagucaacgccggaguaaccacacccgucucaacauacaugcuaaccaacuccgaacuacuaucacuuaucaacgacaugccaauaacaaaugaccaaaaaaaacucaugucaaacaacguacaaauaguccgccaacaaucauacucuauaaugucuauuaucaaagaagaaguucucgcauacguaguacaacuaccacuauauggugucauagacacaccauguuggaaacuccauacaucacccuuauguacaaccaauacaaaagaaggcucaaacaucugccuaacucgaacagaccgaggaugguacugcgacaaugcaggaucugucucauucuucccucaagcagaaacauguaaaguucaaucuaauagaguuuucugcgauacaaugaacucacuaacucuaccaucagaaguaaaucucuguaauauugacauauucaacccaaaauacgauugcaagaucaugacaucaaaaacugacguaucauccucagucaucaccucauuaggagcaaucguaagcuguuacgggaaaacaaaaugcaccgcuucuaacaaaaauagaggaauaauuaaaaccuucucaaacggaugcgauuacgucuccaauaaaggaguagauacaguaagcguaggaaauacucuauacuacgucaauaaacaagaaggaaaaucacuuuaugucaaaggagaacccauaauaaauuucuacgacccauuagucuucccaucagaugaauuugacgcauccauaucccaagucaacgaaaaaaucaaucaaucacuagcauucauacgaaaaucagacgaacuacuacacaacguuaacguaggaaaaucaacaaccaacaucaugauaaccacuauaauaaucgucauaauagucauccuauuauuacuaauagccguaggccuuuuccuauacuguaaagcuagauaaggacuaguggaagcauuuuccuggcugauuaaaagaaauuacucagcuauggucaucuguuccuguuagaaggcuaugcagcauauuauauacuaugcgcauguuaugaaaugcauaauaaaaaauuuuaaaaaaucuaaaagaucuaaaaaaaaaaaaaaaaaaaaaaaaaaaaaaaaaaaaaaaaaaaaaaaaaaaaaaaaaaaaaaaaugcaucccccccccccccccccccccccccccccccaaaggcucuuuucagagccaccagaauu

SEQ ID NO: 12327 - RNA, 2027 nt, Artificial Sequence
  mRNA product Design f-2 comprising derived and/or modified sequence from HRSV(Memphis-37)__AIY60640.1__F-del (opt11)
gggagagcggcucggccauuuugucccagucaguccggaggcugcggcugcagaaguaccgccugcggaguaacugcaaagaagcuuaccauggaacucccgauccucaaaaccaacgccaucaccacuauccucgccgccguaacccucugcuucgccucaucccaaaacaucaccgaagaauuuuaccaauccacaugcuccgccgucuccaaagguuaccucucagcccuccgcaccggcugguacaccuccguuaucaccaucgaacuuuccaacauaaaagagaacaagugcaacggcaccgacgcaaaaguaaaacuaaucaaacaagaacuagacaaauacaaaaacgccgucaccgaacuccagcuccucaugcaaucgacgcccgccgccaacaaccgagcaaggcgcgaacuuccacgcuucaugaacuacacccucaacaacacuaaaaacaacaacgugacccuauccaaaaagcguaaacgccgauuccuagguuuccuucucggugucggcuccgccauugccuccggcaucgcuguuuccaaaguccuccaccucgaaggcgaaguaaacaagauaaaaaacgcccuccucucuacaaacaaggccgugguaucgcucucuaacggcgucucuguacucaccuccaaaguccucgaccucaaaaacuacaucgacaagcaacuccucccuaucgucaauaaacaauccugcuccauuuccaacaucgaaacagugaucgaauuucaacaaaaaaacaaccgauuacuagaaaucacccgcgaauuuucagucaacgccggcgucacaacgccagucucaaccuacaugcucaccaacucagaacucuuaucacucaucaacgacaugcccaucacuaacgaccagaaaaaacugauguccaacaacgugcaaauaguccgccaacaguccuacuccaucauguccauaaucaaggaggaggugcucgccuacguaguccaacucccccucuacggagucauugacaccccuugcuggaaacuacacaccuccccucucugcaccaccaacaccaaagaaggcagcaacaucugccuaaccaggacggaccgaggaugguacugcgacaaugcaggcuccgucagcuucuucccacaagccgaaacaugcaaaguucaaucaaaccguguauucugcgacaccaugaacucacucacccuccccucagaaguaaaccuaugcaacauagauaucuucaaccccaaauacgacugcaaaauuaugaccuccaaaaccgaugucuccagcuccguuaucacgucacucggcgccaucgucuccugcuacggcaagaccaaaugcaccgccuccaacaaaaaccgcggaauaaucaaaacauucucuaacggcugcgacuacgucuccaauaaaggcgucgacaccgucuccgugggcaacacgcuguacuacgucaacaaacaagaaggcaaaucucuuuacgucaaaggugaaccaaucaucaacuucuacgacccccucguauuccccuccgacgaauuugacgcgagcaucucccaagucaacgaaaagaucaaccaaucccucgccuucauccgaaaaagcgacgaacuccuccacaacgucaacgucggcaaaaguaccacaaacauuaugaucaccaccaucaucauagucaucaucgucauccugcuccuacuaauagccgucggccucuucuuguacugcaaggcacgaugaggacuaguggaagcauuuuccuggcugauuaaaagaaauuacucagcuauggucaucuguuccuguuagaaggcuaugcagcauauuauauacuaugcgcauguuaugaaaugcauaauaaaaaauuuuaaaaaaucuaaaagaucuaaaaaaaaaaaaaaaaaaaaaaaaaaaaaaaaaaaaaaaaaaaaaaaaaaaaaaaaaaaaaaaaugcaucccccccccccccccccccccccccccccccaaaggcucuuuucagagccaccagaauu

SEQ ID NO: 12328 - RNA, 2018 nt, Artificial Sequence
  mRNA product Design f-3 comprising derived and/or modified sequence from HRSV(Memphis-37)__AIY60640.1__F-del (wt)
gggagagucccgcagucggcguccagcggcucugcuuguucgugugugugucguugcaggccuuauucaagcuuaccauggaguugccaauccucaaaacaaaugcaauuaccacaauccuugcugcagucacacucuguuucgcuuccagucaaaacaucacugaagaauuuuaucaaucaacaugcagugcaguuagcaaaggcuaucuuagugcuuuaagaacugguugguauacuaguguuauaacuauagaauuaaguaauaucaaggaaaauaaguguaauggaacagaugcuaagguaaaauugauaaaacaagaauuagauaaauauaaaaaugcuguaacagaauugcaguugcucaugcaaagcacaccagcagccaacaaucgagccagaagagaacuaccaagguuuaugaauuauacacucaacaauaccaaaaauaacaauguaacauuaagcaagaaaaggaaaagaagauuucuuggcuuuuuguuagguguuggaucugcaaucgccaguggcauugcuguaucuaaaguccugcaccuagaaggggaagugaacaaaaucaaaaaugcucuacuauccacaaacaaggcuguagucagcuuaucaaauggaguuagugucuuaaccagcaaaguguuagaccucaaaaacuauauagauaaacaguuguuacccauugugaacaagcaaagcugcagcauaucaaacauugaaacugugauagaauuccaacaaaagaacaacagacuacuagagauuaccagggaauuuaguguuaaugcagguguaacuacaccuguaagcacuuauauguuaacaaauagugaauuauuaucauuaaucaaugauaugccuauaacaaaugaucagaaaaaguuaauguccaacaauguucaaauaguuagacagcaaaguuacucuaucauguccauaauaaaggaggaagucuuagcauauguaguucaauuaccacuauaugguguaauagauacaccuuguuggaaacuacacacauccccucuaugcacaaccaacacaaaggaaggguccaacaucuguuuaacaagaaccgacagaggaugguacugugacaaugcaggaucagugucuuucuucccacaagcugaaacaugcaaaguucaaucgaaucgaguauuuugugacacaaugaacagucuaacauuaccaagugaaguaaaucucugcaacauugacauauucaacccuaaauaugauugcaaaauuaugacuucaaaaacagaugugagcagcuccguuaucacaucucuaggagccauugugucaugcuauggcaaaacuaaauguacagcauccaauaaaaaucguggaaucauaaagacauuuucuaacgggugugauuauguaucaaauaaggggguggacacuguaucuguagguaauacauuauauuauguaaauaagcaagaaggaaaaagccucuauguaaaaggugaaccaauaauaaauuucuaugacccauuaguguucccuucugaugaauuugaugcaucaauaucucaagucaaugagaagauuaaccagagccuagcauuuauucguaaauccgaugaauuauuacauaauguaaauguugguaaauccaccacaaauaucaugauaacuacuauaauuauagugauuauaguaauauuguuauuauuaauugcaguugggcuguuccuauacugcaaggccagaugaggacuaguacuggcugcaucucccuuuccucuguccuccauccuucucccaggauggugaagggggaccugguacccagugauccccaccccaggauccuaaaucaugacuuaccugcuaauaaaaacucauuggaaaagugagaagaucuaaaaaaaaaaaaaaaaaaaaaaaaaaaaaaaaaaaaaaaaaaaaaaaaaaaaaaaaaaaaaaaaugcaucccccccccccccccccccccccccccccccaaaggcucuuuucagagccaccagaauu

SEQ ID NO: 12329 - RNA, 2018 nt, Artificial Sequence
  mRNA product Design f-3 comprising derived and/or modified sequence from HRSV(Memphis-37)__AIY60640.1__F-del (opt1)
gggagagucccgcagucggcguccagcggcucugcuuguucgugugugugucguugcaggccuuauucaagcuuaccauggagcugcccauccucaagaccaacgccaucaccacgauccuggccgcggugacccugugcuucgccagcucccagaacaucaccgaggaguucuaccagagcacgugcuccgccgucagcaagggcuaccucuccgcccugcgcaccgggugguacaccagcgugaucaccaucgagcuguccaacaucaaggagaacaagugcaacggcaccgacgccaaggugaagcucaucaagcaggagcuggacaaguacaagaacgcggucacggagcugcagcuccugaugcagagcaccccggccgccaacaaccgggcccgccgggagcugccccgcuucaugaacuacacccucaacaacaccaagaacaacaacgugacgcuguccaagaagcggaagcgccgguuccugggguuccuccugggcguggggagcgcgaucgccuccggcaucgccgucagcaaggugcugcaccucgagggcgaggugaacaagaucaagaacgcccugcuguccaccaacaaggccgucgugagccucuccaacggggugagcguccugaccuccaaggugcuggaccucaagaacuacaucgacaagcagcugcugcccaucgugaacaagcagagcugcuccaucagcaacaucgagaccgucaucgaguuccagcagaagaacaaccgccuccuggagaucacgcgggaguucagcgugaacgcgggcgugaccacccccgucuccaccuacaugcugacgaacagcgagcuccugucccugaucaacgacaugccgaucaccaacgaccagaagaagcucaugagcaacaacgugcagaucgugcgccagcaguccuacagcaucauguccaucaucaaggaggagguccuggccuacguggugcagcugccccucuacggggucaucgacacccccugcuggaagcugcacaccagcccccugugcacgaccaacaccaaggagggcuccaacaucugccucacccggacggaccgcgggugguacugcgacaacgccggcagcguguccuucuucccgcaggccgagaccugcaagguccagagcaaccggguguucugcgacaccaugaacucccugacccugcccagcgaggugaaccucugcaacaucgacaucuucaaccccaaguacgacugcaagaucaugacguccaagaccgacgucagcuccagcgugaucaccucccugggcgccaucgugagcugcuacgggaagaccaagugcacggcgagcaacaagaaccgcggcaucaucaagaccuucuccaacgggugcgacuacgucagcaacaagggcguggacaccguguccgucggcaacacccuguacuacgugaacaagcaggagggcaagagccucuacgugaagggggagcccaucaucaacuucuacgacccgcuggucuuccccuccgacgaguucgacgccagcaucucccaggugaacgagaagaucaaccagagccuggccuucauccggaaguccgacgagcuccugcacaacgugaacgucggcaagagcaccacgaacaucaugaucaccaccaucaucaucgugaucaucgugauccugcugcuccugaucgccgucgggcuguuccucuacugcaaggcccgcugaggacuaguacuggcugcaucucccuuuccucuguccuccauccuucucccaggauggugaagggggaccugguacccagugauccccaccccaggauccuaaaucaugacuuaccugcuaauaaaaacucauuggaaaagugagaagaucuaaaaaaaaaaaaaaaaaaaaaaaaaaaaaaaaaaaaaaaaaaaaaaaaaaaaaaaaaaaaaaaaugcaucccccccccccccccccccccccccccccccaaaggcucuuuucagagccaccagaauu

SEQ ID NO: 12330 - RNA, 2018 nt, Artificial Sequence
  mRNA product Design f-3 comprising derived and/or modified sequence from HRSV(Memphis-37)__AIY60640.1__F-del (opt2)
gggagagucccgcagucggcguccagcggcucugcuuguucgugugugugucguugcaggccuuauucaagcuuaccauggagcuccccauccucaagaccaacgccaucaccaccauccucgccgccgucacccucugcuucgccuccucccagaacaucaccgaggaguucuaccaguccaccugcuccgccgucuccaagggcuaccucuccgcccuccgcaccggcugguacaccuccgucaucaccaucgagcucuccaacaucaaggagaacaagugcaacggcaccgacgccaaggucaagcucaucaagcaggagcucgacaaguacaagaacgccgucaccgagcuccagcuccucaugcaguccacccccgccgccaacaaccgcgcccgccgcgagcucccccgcuucaugaacuacacccucaacaacaccaagaacaacaacgucacccucuccaagaagcgcaagcgccgcuuccucggcuuccuccucggcgucggcuccgccaucgccuccggcaucgccgucuccaagguccuccaccucgagggcgaggucaacaagaucaagaacgcccuccucuccaccaacaaggccgucgucucccucuccaacggcgucuccguccucaccuccaagguccucgaccucaagaacuacaucgacaagcagcuccuccccaucgucaacaagcaguccugcuccaucuccaacaucgagaccgucaucgaguuccagcagaagaacaaccgccuccucgagaucacccgcgaguucuccgucaacgccggcgucaccacccccgucuccaccuacaugcucaccaacuccgagcuccucucccucaucaacgacaugcccaucaccaacgaccagaagaagcucauguccaacaacguccagaucguccgccagcaguccuacuccaucauguccaucaucaaggaggagguccucgccuacgucguccagcucccccucuacggcgucaucgacacccccugcuggaagcuccacaccuccccccucugcaccaccaacaccaaggagggcuccaacaucugccucacccgcaccgaccgcggcugguacugcgacaacgccggcuccgucuccuucuucccccaggccgagaccugcaagguccaguccaaccgcgucuucugcgacaccaugaacucccucacccuccccuccgaggucaaccucugcaacaucgacaucuucaaccccaaguacgacugcaagaucaugaccuccaagaccgacgucuccuccuccgucaucaccucccucggcgccaucgucuccugcuacggcaagaccaagugcaccgccuccaacaagaaccgcggcaucaucaagaccuucuccaacggcugcgacuacgucuccaacaagggcgucgacaccgucuccgucggcaacacccucuacuacgucaacaagcaggagggcaagucccucuacgucaagggcgagcccaucaucaacuucuacgacccccucgucuuccccuccgacgaguucgacgccuccaucucccaggucaacgagaagaucaaccagucccucgccuucauccgcaaguccgacgagcuccuccacaacgucaacgucggcaaguccaccaccaacaucaugaucaccaccaucaucaucgucaucaucgucauccuccuccuccucaucgccgucggccucuuccucuacugcaaggcccgcugaggacuaguacuggcugcaucucccuuuccucuguccuccauccuucucccaggauggugaagggggaccugguacccagugauccccaccccaggauccuaaaucaugacuuaccugcuaauaaaaacucauuggaaaagugagaagaucuaaaaaaaaaaaaaaaaaaaaaaaaaaaaaaaaaaaaaaaaaaaaaaaaaaaaaaaaaaaaaaaaugcaucccccccccccccccccccccccccccccccaaaggcucuuuucagagccaccagaauu

SEQ ID NO: 12331 - RNA, 2018 nt, Artificial Sequence
  mRNA product Design f-3 comprising derived and/or modified sequence from HRSV(Memphis-37)__AIY60640.1__F-del (opt3)
gggagagucccgcagucggcguccagcggcucugcuuguucgugugugugucguugcaggccuuauucaagcuuaccauggagcugcccauccucaagaccaacgccauuacaacuauacuugcugcagugacgcugugcuucgccagcucccagaauaucaccgaagaguuuuaccaaucuacauguucagcggucaguaaaggcuauuugagcgcuuuaagaacugggugguacaccuccguuauuacaaucgaacugucuaacauuaaggagaauaaaugcaacggaaccgacgccaaggugaaacuaaucaagcaggaacucgauaaguauaaaaaugcaguaacugagcugcagcuucugaugcagucgaccccugccgcuaacaauagggcacggcgcgaguugccacgauucaugaacuacacacucaauaacacgaagaauaacaaugugacucugagcaaaaagcguaaaagaagguuucuggguuuccucuuaggcgucgggucagccauagcuaguggaaucgccguguccaagguucugcaccuugaaggcgaggugaacaagauuaaaaaugcguugcugucuaccaacaaggcagucgugagccuauccaacgguguaucaguucucacaaguaaagugcuggaccuuaagaauuauaucgauaaacaacuguugccgauugucaacaagcagagcuguucuaucuccaauauagaaacugugauugaguuucagcagaaaaacaaucggcuccuggagaucacccgcgaguucucagugaacgccggggucacaacccccguuagcacguacauguuaacuaauagugaacugcucucucuuauuaacgacaugccuaucacaaaugaucaaaagaagcugauguccaacaaugugcagaucguaagacagcagagcuauucgauuaugucuauaaucaaagaagagguguuggcuuacgucgugcaacuaccacuguacggaguuauugacacccccugcuggaagcuccauacuuccccucuguguacaaccaacacgaaagaaggcucaaauaucugccuuaccaggacagaucggggcugguauugugacaacgccgggagugugagcuuuuucccacaggcagagacuugcaagguccaguccaaucgcguguuuugugauaccaugaacucucugacauugcccagcgagguaaaccucugcaauauagacauuuucaacccuaaauacgauuguaagaucaugacuucaaagaccgacguuaguuccagcgugaucacaucucugggagcuauugucucaugcuaugguaaaaccaagugcacugccaguaauaaaaaccgaggcaucauuaagacguuuagcaaugggugugauuacguguccaacaaaggagucgacacagugucuguuggcaauaccuuauauuacgugaacaagcaagaagguaagucgcuguauguaaaaggggagccaauaaucaauuucuacgacccgcuagucuuucccagcgaugaguucgacgcguccauuucacaggugaacgaaaagaucaaucagagucucgccuucaucagaaaaucugaugaacugcuucacaacguuaaugugggaaagagcacuaccaacauuaugauaacaaccaucauuaucgucauuaucgugauauugcugcuccugaucgcaguaggccuuuuucuguacugcaaagcuaggugaggacuaguacuggcugcaucucccuuuccucuguccuccauccuucucccaggauggugaagggggaccugguacccagugauccccaccccaggauccuaaaucaugacuuaccugcuaauaaaaacucauuggaaaagugagaagaucuaaaaaaaaaaaaaaaaaaaaaaaaaaaaaaaaaaaaaaaaaaaaaaaaaaaaaaaaaaaaaaaaugcaucccccccccccccccccccccccccccccccaaaggcucuuuucagagccaccagaauu

SEQ ID NO: 12332 - RNA, 2018 nt, Artificial Sequence
  mRNA product Design f-3 comprising derived and/or modified sequence from HRSV(Memphis-37)__AIY60640.1__F-del (opt4)
gggagagucccgcagucggcguccagcggcucugcuuguucgugugugugucguugcaggccuuauucaagcuuaccauggagcugcccauccugaagaccaacgccaucaccaccauccuggccgccgugacccugugcuucgccagcagccagaacaucaccgaggaguucuaccagagcaccugcagcgccgugagcaagggcuaccugagcgcccugagaaccggcugguacaccagcgugaucaccaucgagcugagcaacaucaaggagaacaagugcaacggcaccgacgccaaggugaagcugaucaagcaggagcuggacaaguacaagaacgccgugaccgagcugcagcugcugaugcagagcacccccgccgccaacaacagagccagaagagagcugcccagauucaugaacuacacccugaacaacaccaagaacaacaacgugacccugagcaagaagagaaagagaagauuccugggcuuccugcugggcgugggcagcgccaucgccagcggcaucgccgugagcaaggugcugcaccuggagggcgaggugaacaagaucaagaacgcccugcugagcaccaacaaggccguggugagccugagcaacggcgugagcgugcugaccagcaaggugcuggaccugaagaacuacaucgacaagcagcugcugcccaucgugaacaagcagagcugcagcaucagcaacaucgagaccgugaucgaguuccagcagaagaacaacagacugcuggagaucaccagagaguucagcgugaacgccggcgugaccacccccgugagcaccuacaugcugaccaacagcgagcugcugagccugaucaacgacaugcccaucaccaacgaccagaagaagcugaugagcaacaacgugcagaucgugagacagcagagcuacagcaucaugagcaucaucaaggaggaggugcuggccuacguggugcagcugccccuguacggcgugaucgacacccccugcuggaagcugcacaccagcccccugugcaccaccaacaccaaggagggcagcaacaucugccugaccagaaccgacagaggcugguacugcgacaacgccggcagcgugagcuucuucccccaggccgagaccugcaaggugcagagcaacagaguguucugcgacaccaugaacagccugacccugcccagcgaggugaaccugugcaacaucgacaucuucaaccccaaguacgacugcaagaucaugaccagcaagaccgacgugagcagcagcgugaucaccagccugggcgccaucgugagcugcuacggcaagaccaagugcaccgccagcaacaagaacagaggcaucaucaagaccuucagcaacggcugcgacuacgugagcaacaagggcguggacaccgugagcgugggcaacacccuguacuacgugaacaagcaggagggcaagagccuguacgugaagggcgagcccaucaucaacuucuacgacccccugguguuccccagcgacgaguucgacgccagcaucagccaggugaacgagaagaucaaccagagccuggccuucaucagaaagagcgacgagcugcugcacaacgugaacgugggcaagagcaccaccaacaucaugaucaccaccaucaucaucgugaucaucgugauccugcugcugcugaucgccgugggccuguuccuguacugcaaggccagaugaggacuaguacuggcugcaucucccuuuccucuguccuccauccuucucccaggauggugaagggggaccugguacccagugauccccaccccaggauccuaaaucaugacuuaccugcuaauaaaaacucauuggaaaagugagaagaucuaaaaaaaaaaaaaaaaaaaaaaaaaaaaaaaaaaaaaaaaaaaaaaaaaaaaaaaaaaaaaaaaugcaucccccccccccccccccccccccccccccccaaaggcucuuuucagagccaccagaauu

SEQ ID NO: 12333 - RNA, 2018 nt, Artificial Sequence
  mRNA product Design f-3 comprising derived and/or modified sequence from HRSV(Memphis-37)__AIY60640.1__F-del (opt5)
gggagagucccgcagucggcguccagcggcucugcuuguucgugugugugucguugcaggccuuauucaagcuuaccauggagcugcccauccucaagaccaacgccauuacaacgauccuggcugccgugacccuuugcuucgcgagcucccagaauauuacagaagaguuuuaccaaucuaccuguagcgcugucuccaaaggcuaucugucugcccucagaacagggugguacaccagcguuaucacaauugaacuguccaacaucaaggagaauaaaugcaacggaaccgacgccaaggugaaacuuaucaagcaggaacuggauaaguauaaaaaugcugugacggagcuccagcugcugaugcagucuaccccugccgcuaacaaucgggcccgcagagagcucccgcgguucaugaacuacacacugaauaacaccaagaauaacaaugucacacuuagcaaaaagcgcaaaagacgguuucugggcuuccuccugggggugggauccgcgauugccagcggcaucgcuguuucuaaggugcuucaccuggaaggggaggucaacaagauuaaaaaugcccuccuguccaccaacaaggcugugguuagccugucuaacggaguguccguccucacgagcaaagugcuggaccuuaagaauuauaucgauaaacaacugcuccccauugugaacaagcagucuuguuccaucagcaauauugaaacagucaucgaguuucagcagaaaaacaaucgccugcuugagaucaccagagaauuuuccguuaacgccggcgugacaaccccugugucuaccuacaugcugacaaauagcgagcuccugucccugauuaacgacaugcccaucacgaaugaucaaaagaagcucaugagcaacaauguccagauugugcggcagcagucuuauuccaucaugagcauuaucaaagaagagguucuggcguacgugguccaacuuccucuguacggcgugaucgacacccccugcuggaagcuccauacaucuccucuguguaccacaaacaccaaagaagggagcaauauuugccuuacgcgcacagauagaggaugguauugugacaacgccggcuccguuucuuucuucccgcaggcugagaccugcaaggugcagagcaaucgggucuuuugugauaccaugaacucccugacacuccccagcgaggugaaccugugcaauaucgacauuuucaacccuaaauacgauuguaagaucaugaccucuaagacagacgucuccagcucugugauuacgucccugggggccaucguuagcugcuauggaaaaaccaagugcacagcuuccaauaaaaaccgcggcaucauuaagaccuuuucuaaugggugugauuacgugagcaacaaaggagucgacacaguguccguuggcaauacccucuauuacgugaacaagcaagaaggcaagucucuguaugucaaaggggagcccaucauuaauuucuacgacccucuuguguuucccagcgaugaguucgacgccuccaucagccaggugaacgaaaagauuaaucagucucuggccuucaucagaaaauccgaugaacuccugcacaacguuaaugucggaaagagcacgaccaacauuaugaucacaaccaucauuaucgugauuaucgugauucugcuucuccugaucgcugucggccuguuucucuacugcaaagcgcggugaggacuaguacuggcugcaucucccuuuccucuguccuccauccuucucccaggauggugaagggggaccugguacccagugauccccaccccaggauccuaaaucaugacuuaccugcuaauaaaaacucauuggaaaagugagaagaucuaaaaaaaaaaaaaaaaaaaaaaaaaaaaaaaaaaaaaaaaaaaaaaaaaaaaaaaaaaaaaaaaugcaucccccccccccccccccccccccccccccccaaaggcucuuuucagagccaccagaauu

SEQ ID NO: 12334 - RNA, 2018 nt, Artificial Sequence
  mRNA product Design f-3 comprising derived and/or modified sequence from HRSV(Memphis-37)__AIY60640.1__F-del (opt6)
gggagagucccgcagucggcguccagcggcucugcuuguucgugugugugucguugcaggccuuauucaagcuuaccauggaacucccaauauuaaaaacuaacgcaaucacaaccauauuagcagccgucacucuaugcuuugccuccucacaaaauauaacagaagaauuuuaccaauccacaugcucagccguuagcaaaggauaucuaucagcccuaagaacaggcugguauacuucaguaauaacaauagaacuaucaaauauaaaagaaaacaaaugcaacggaaccgacgcuaaaguaaagcucauaaaacaagaauuagacaaauacaaaaaugcaguaacagaacuacaacuccuaaugcaaucaaccccagccgccaauaacagagcuagacgagaacuaccccgauucaugaauuacacacuaaacaacacaaaaaacaacaauguaacacucucaaaaaaaagaaaacgaagauucuuagguuuucuccugggaguaggaucagcaaucgcuuccggaaucgcagucaguaaaguccuucaccuugaaggcgaaguaaacaaaauaaaaaaugcacuacuaucuacaaauaaagcaguaguaucccuauccaauggcgucucaguauuaaccucaaaaguacucgaccuuaaaaauuauauagacaaacaauuacuacccauagucaauaaacaauccuguuccauaucaaacauagaaacaguaaucgaauuucaacaaaaaaacaacagauuacuagaaauaacacgcgaauuuucagucaacgccggaguaaccacacccgucucaacauacaugcuaaccaacuccgaacuacuaucacuuaucaacgacaugccaauaacaaaugaccaaaaaaaacucaugucaaacaacguacaaauaguccgccaacaaucauacucuauaaugucuauuaucaaagaagaaguucucgcauacguaguacaacuaccacuauauggugucauagacacaccauguuggaaacuccauacaucacccuuauguacaaccaauacaaaagaaggcucaaacaucugccuaacucgaacagaccgaggaugguacugcgacaaugcaggaucugucucauucuucccucaagcagaaacauguaaaguucaaucuaauagaguuuucugcgauacaaugaacucacuaacucuaccaucagaaguaaaucucuguaauauugacauauucaacccaaaauacgauugcaagaucaugacaucaaaaacugacguaucauccucagucaucaccucauuaggagcaaucguaagcuguuacgggaaaacaaaaugcaccgcuucuaacaaaaauagaggaauaauuaaaaccuucucaaacggaugcgauuacgucuccaauaaaggaguagauacaguaagcguaggaaauacucuauacuacgucaauaaacaagaaggaaaaucacuuuaugucaaaggagaacccauaauaaauuucuacgacccauuagucuucccaucagaugaauuugacgcauccauaucccaagucaacgaaaaaaucaaucaaucacuagcauucauacgaaaaucagacgaacuacuacacaacguuaacguaggaaaaucaacaaccaacaucaugauaaccacuauaauaaucgucauaauagucauccuauuauuacuaauagccguaggccuuuuccuauacuguaaagcuagauaaggacuaguacuggcugcaucucccuuuccucuguccuccauccuucucccaggauggugaagggggaccugguacccagugauccccaccccaggauccuaaaucaugacuuaccugcuaauaaaaacucauuggaaaagugagaagaucuaaaaaaaaaaaaaaaaaaaaaaaaaaaaaaaaaaaaaaaaaaaaaaaaaaaaaaaaaaaaaaaaugcaucccccccccccccccccccccccccccccccaaaggcucuuuucagagccaccagaauu

SEQ ID NO: 12335 - RNA, 2018 nt, Artificial Sequence
  mRNA product Design f-3 comprising derived and/or modified sequence from HRSV(Memphis-37)__AIY60640.1__F-del (opt11)
gggagagucccgcagucggcguccagcggcucugcuuguucgugugugugucguugcaggccuuauucaagcuuaccauggaacucccgauccucaaaaccaacgccaucaccacuauccucgccgccguaacccucugcuucgccucaucccaaaacaucaccgaagaauuuuaccaauccacaugcuccgccgucuccaaagguuaccucucagcccuccgcaccggcugguacaccuccguuaucaccaucgaacuuuccaacauaaaagagaacaagugcaacggcaccgacgcaaaaguaaaacuaaucaaacaagaacuagacaaauacaaaaacgccgucaccgaacuccagcuccucaugcaaucgacgcccgccgccaacaaccgagcaaggcgcgaacuuccacgcuucaugaacuacacccucaacaacacuaaaaacaacaacgugacccuauccaaaaagcguaaacgccgauuccuagguuuccuucucggugucggcuccgccauugccuccggcaucgcuguuuccaaaguccuccaccucgaaggcgaaguaaacaagauaaaaaacgcccuccucucuacaaacaaggccgugguaucgcucucuaacggcgucucuguacucaccuccaaaguccucgaccucaaaaacuacaucgacaagcaacuccucccuaucgucaauaaacaauccugcuccauuuccaacaucgaaacagugaucgaauuucaacaaaaaaacaaccgauuacuagaaaucacccgcgaauuuucagucaacgccggcgucacaacgccagucucaaccuacaugcucaccaacucagaacucuuaucacucaucaacgacaugcccaucacuaacgaccagaaaaaacugauguccaacaacgugcaaauaguccgccaacaguccuacuccaucauguccauaaucaaggaggaggugcucgccuacguaguccaacucccccucuacggagucauugacaccccuugcuggaaacuacacaccuccccucucugcaccaccaacaccaaagaaggcagcaacaucugccuaaccaggacggaccgaggaugguacugcgacaaugcaggcuccgucagcuucuucccacaagccgaaacaugcaaaguucaaucaaaccguguauucugcgacaccaugaacucacucacccuccccucagaaguaaaccuaugcaacauagauaucuucaaccccaaauacgacugcaaaauuaugaccuccaaaaccgaugucuccagcuccguuaucacgucacucggcgccaucgucuccugcuacggcaagaccaaaugcaccgccuccaacaaaaaccgcggaauaaucaaaacauucucuaacggcugcgacuacgucuccaauaaaggcgucgacaccgucuccgugggcaacacgcuguacuacgucaacaaacaagaaggcaaaucucuuuacgucaaaggugaaccaaucaucaacuucuacgacccccucguauuccccuccgacgaauuugacgcgagcaucucccaagucaacgaaaagaucaaccaaucccucgccuucauccgaaaaagcgacgaacuccuccacaacgucaacgucggcaaaaguaccacaaacauuaugaucaccaccaucaucauagucaucaucgucauccugcuccuacuaauagccgucggccucuucuuguacugcaaggcacgaugaggacuaguacuggcugcaucucccuuuccucuguccuccauccuucucccaggauggugaagggggaccugguacccagugauccccaccccaggauccuaaaucaugacuuaccugcuaauaaaaacucauuggaaaagugagaagaucuaaaaaaaaaaaaaaaaaaaaaaaaaaaaaaaaaaaaaaaaaaaaaaaaaaaaaaaaaaaaaaaaugcaucccccccccccccccccccccccccccccccaaaggcucuuuucagagccaccagaauu

SEQ ID NO: 12336 - RNA, 2234 nt, Artificial Sequence
  mRNA product Design f-4 comprising derived and/or modified sequence from HRSV(Memphis-37)__AIY60640.1__F-del (wt)
gggagagucccgcagucggcguccagcggcucugcuuguucgugugugugucguugcaggccuuauucaagcuuaccauggaguugccaauccucaaaacaaaugcaauuaccacaauccuugcugcagucacacucuguuucgcuuccagucaaaacaucacugaagaauuuuaucaaucaacaugcagugcaguuagcaaaggcuaucuuagugcuuuaagaacugguugguauacuaguguuauaacuauagaauuaaguaauaucaaggaaaauaaguguaauggaacagaugcuaagguaaaauugauaaaacaagaauuagauaaauauaaaaaugcuguaacagaauugcaguugcucaugcaaagcacaccagcagccaacaaucgagccagaagagaacuaccaagguuuaugaauuauacacucaacaauaccaaaaauaacaauguaacauuaagcaagaaaaggaaaagaagauuucuuggcuuuuuguuagguguuggaucugcaaucgccaguggcauugcuguaucuaaaguccugcaccuagaaggggaagugaacaaaaucaaaaaugcucuacuauccacaaacaaggcuguagucagcuuaucaaauggaguuagugucuuaaccagcaaaguguuagaccucaaaaacuauauagauaaacaguuguuacccauugugaacaagcaaagcugcagcauaucaaacauugaaacugugauagaauuccaacaaaagaacaacagacuacuagagauuaccagggaauuuaguguuaaugcagguguaacuacaccuguaagcacuuauauguuaacaaauagugaauuauuaucauuaaucaaugauaugccuauaacaaaugaucagaaaaaguuaauguccaacaauguucaaauaguuagacagcaaaguuacucuaucauguccauaauaaaggaggaagucuuagcauauguaguucaauuaccacuauaugguguaauagauacaccuuguuggaaacuacacacauccccucuaugcacaaccaacacaaaggaaggguccaacaucuguuuaacaagaaccgacagaggaugguacugugacaaugcaggaucagugucuuucuucccacaagcugaaacaugcaaaguucaaucgaaucgaguauuuugugacacaaugaacagucuaacauuaccaagugaaguaaaucucugcaacauugacauauucaacccuaaauaugauugcaaaauuaugacuucaaaaacagaugugagcagcuccguuaucacaucucuaggagccauugugucaugcuauggcaaaacuaaauguacagcauccaauaaaaaucguggaaucauaaagacauuuucuaacgggugugauuauguaucaaauaaggggguggacacuguaucuguagguaauacauuauauuauguaaauaagcaagaaggaaaaagccucuauguaaaaggugaaccaauaauaaauuucuaugacccauuaguguucccuucugaugaauuugaugcaucaauaucucaagucaaugagaagauuaaccagagccuagcauuuauucguaaauccgaugaauuauuacauaauguaaauguugguaaauccaccacaaauaucaugauaacuacuauaauuauagugauuauaguaauauuguuauuauuaauugcaguugggcuguuccuauacugcaaggccagaugaggacuagugaagggaacacccaaauuuaauucagccuuaagcacaauuaauuaagagugaaacguaauuguacaagcaguuggucacccaccauagggcaugaucaacaccgcaaccuuuccuuuuucccccagugauucugaaaaaccccucuucccuucagcuugcuuagauguuccaaauuuaguaagcuuaaggcggccuacagaagaaaaagaaaaaaaaggccacaaaaguucccucucacuuucaguaaauaaaauaaaagcagcaacagaaauaaagaaauaaaugaaauucaaaaugaaauaaauauuguguugugcagcauuaaaaaaucaauaaaaauuaaaaaugagcaagaucuaaaaaaaaaaaaaaaaaaaaaaaaaaaaaaaaaaaaaaaaaaaaaaaaaaaaaaaaaaaaaaaaugcaucccccccccccccccccccccccccccccccaaaggcucuuuucagagccaccagaauu

SEQ ID NO: 12337 - RNA, 2234 nt, Artificial Sequence
  mRNA product Design f-4 comprising derived and/or modified sequence from HRSV(Memphis-37)__AIY60640.1__F-del (opt1)
gggagagucccgcagucggcguccagcggcucugcuuguucgugugugugucguugcaggccuuauucaagcuuaccauggagcugcccauccucaagaccaacgccaucaccacgauccuggccgcggugacccugugcuucgccagcucccagaacaucaccgaggaguucuaccagagcacgugcuccgccgucagcaagggcuaccucuccgcccugcgcaccgggugguacaccagcgugaucaccaucgagcuguccaacaucaaggagaacaagugcaacggcaccgacgccaaggugaagcucaucaagcaggagcuggacaaguacaagaacgcggucacggagcugcagcuccugaugcagagcaccccggccgccaacaaccgggcccgccgggagcugccccgcuucaugaacuacacccucaacaacaccaagaacaacaacgugacgcuguccaagaagcggaagcgccgguuccugggguuccuccugggcguggggagcgcgaucgccuccggcaucgccgucagcaaggugcugcaccucgagggcgaggugaacaagaucaagaacgcccugcuguccaccaacaaggccgucgugagccucuccaacggggugagcguccugaccuccaaggugcuggaccucaagaacuacaucgacaagcagcugcugcccaucgugaacaagcagagcugcuccaucagcaacaucgagaccgucaucgaguuccagcagaagaacaaccgccuccuggagaucacgcgggaguucagcgugaacgcgggcgugaccacccccgucuccaccuacaugcugacgaacagcgagcuccugucccugaucaacgacaugccgaucaccaacgaccagaagaagcucaugagcaacaacgugcagaucgugcgccagcaguccuacagcaucauguccaucaucaaggaggagguccuggccuacguggugcagcugccccucuacggggucaucgacacccccugcuggaagcugcacaccagcccccugugcacgaccaacaccaaggagggcuccaacaucugccucacccggacggaccgcgggugguacugcgacaacgccggcagcguguccuucuucccgcaggccgagaccugcaagguccagagcaaccggguguucugcgacaccaugaacucccugacccugcccagcgaggugaaccucugcaacaucgacaucuucaaccccaaguacgacugcaagaucaugacguccaagaccgacgucagcuccagcgugaucaccucccugggcgccaucgugagcugcuacgggaagaccaagugcacggcgagcaacaagaaccgcggcaucaucaagaccuucuccaacgggugcgacuacgucagcaacaagggcguggacaccguguccgucggcaacacccuguacuacgugaacaagcaggagggcaagagccucuacgugaagggggagcccaucaucaacuucuacgacccgcuggucuuccccuccgacgaguucgacgccagcaucucccaggugaacgagaagaucaaccagagccuggccuucauccggaaguccgacgagcuccugcacaacgugaacgucggcaagagcaccacgaacaucaugaucaccaccaucaucaucgugaucaucgugauccugcugcuccugaucgccgucgggcuguuccucuacugcaaggcccgcugaggacuagugaagggaacacccaaauuuaauucagccuuaagcacaauuaauuaagagugaaacguaauuguacaagcaguuggucacccaccauagggcaugaucaacaccgcaaccuuuccuuuuucccccagugauucugaaaaaccccucuucccuucagcuugcuuagauguuccaaauuuaguaagcuuaaggcggccuacagaagaaaaagaaaaaaaaggccacaaaaguucccucucacuuucaguaaauaaaauaaaagcagcaacagaaauaaagaaauaaaugaaauucaaaaugaaauaaauauuguguugugcagcauuaaaaaaucaauaaaaauuaaaaaugagcaagaucuaaaaaaaaaaaaaaaaaaaaaaaaaaaaaaaaaaaaaaaaaaaaaaaaaaaaaaaaaaaaaaaaugcaucccccccccccccccccccccccccccccccaaaggcucuuuucagagccaccagaauu

SEQ ID NO: 12338 - RNA, 2234 nt, Artificial Sequence
  mRNA product Design f-4 comprising derived and/or modified sequence from HRSV(Memphis-37)__AIY60640.1__F-del (opt2)
gggagagucccgcagucggcguccagcggcucugcuuguucgugugugugucguugcaggccuuauucaagcuuaccauggagcuccccauccucaagaccaacgccaucaccaccauccucgccgccgucacccucugcuucgccuccucccagaacaucaccgaggaguucuaccaguccaccugcuccgccgucuccaagggcuaccucuccgcccuccgcaccggcugguacaccuccgucaucaccaucgagcucuccaacaucaaggagaacaagugcaacggcaccgacgccaaggucaagcucaucaagcaggagcucgacaaguacaagaacgccgucaccgagcuccagcuccucaugcaguccacccccgccgccaacaaccgcgcccgccgcgagcucccccgcuucaugaacuacacccucaacaacaccaagaacaacaacgucacccucuccaagaagcgcaagcgccgcuuccucggcuuccuccucggcgucggcuccgccaucgccuccggcaucgccgucuccaagguccuccaccucgagggcgaggucaacaagaucaagaacgcccuccucuccaccaacaaggccgucgucucccucuccaacggcgucuccguccucaccuccaagguccucgaccucaagaacuacaucgacaagcagcuccuccccaucgucaacaagcaguccugcuccaucuccaacaucgagaccgucaucgaguuccagcagaagaacaaccgccuccucgagaucacccgcgaguucuccgucaacgccggcgucaccacccccgucuccaccuacaugcucaccaacuccgagcuccucucccucaucaacgacaugcccaucaccaacgaccagaagaagcucauguccaacaacguccagaucguccgccagcaguccuacuccaucauguccaucaucaaggaggagguccucgccuacgucguccagcucccccucuacggcgucaucgacacccccugcuggaagcuccacaccuccccccucugcaccaccaacaccaaggagggcuccaacaucugccucacccgcaccgaccgcggcugguacugcgacaacgccggcuccgucuccuucuucccccaggccgagaccugcaagguccaguccaaccgcgucuucugcgacaccaugaacucccucacccuccccuccgaggucaaccucugcaacaucgacaucuucaaccccaaguacgacugcaagaucaugaccuccaagaccgacgucuccuccuccgucaucaccucccucggcgccaucgucuccugcuacggcaagaccaagugcaccgccuccaacaagaaccgcggcaucaucaagaccuucuccaacggcugcgacuacgucuccaacaagggcgucgacaccgucuccgucggcaacacccucuacuacgucaacaagcaggagggcaagucccucuacgucaagggcgagcccaucaucaacuucuacgacccccucgucuuccccuccgacgaguucgacgccuccaucucccaggucaacgagaagaucaaccagucccucgccuucauccgcaaguccgacgagcuccuccacaacgucaacgucggcaaguccaccaccaacaucaugaucaccaccaucaucaucgucaucaucgucauccuccuccuccucaucgccgucggccucuuccucuacugcaaggcccgcugaggacuagugaagggaacacccaaauuuaauucagccuuaagcacaauuaauuaagagugaaacguaauuguacaagcaguuggucacccaccauagggcaugaucaacaccgcaaccuuuccuuuuucccccagugauucugaaaaaccccucuucccuucagcuugcuuagauguuccaaauuuaguaagcuuaaggcggccuacagaagaaaaagaaaaaaaaggccacaaaaguucccucucacuuucaguaaauaaaauaaaagcagcaacagaaauaaagaaauaaaugaaauucaaaaugaaauaaauauuguguugugcagcauuaaaaaaucaauaaaaauuaaaaaugagcaagaucuaaaaaaaaaaaaaaaaaaaaaaaaaaaaaaaaaaaaaaaaaaaaaaaaaaaaaaaaaaaaaaaaugcaucccccccccccccccccccccccccccccccaaaggcucuuuucagagccaccagaauu

SEQ ID NO: 12339 - RNA, 2234 nt, Artificial Sequence
  mRNA product Design f-4 comprising derived and/or modified sequence from HRSV(Memphis-37)__AIY60640.1__F-del (opt3)
gggagagucccgcagucggcguccagcggcucugcuuguucgugugugugucguugcaggccuuauucaagcuuaccauggagcugcccauccucaagaccaacgccauuacaacuauacuugcugcagugacgcugugcuucgccagcucccagaauaucaccgaagaguuuuaccaaucuacauguucagcggucaguaaaggcuauuugagcgcuuuaagaacugggugguacaccuccguuauuacaaucgaacugucuaacauuaaggagaauaaaugcaacggaaccgacgccaaggugaaacuaaucaagcaggaacucgauaaguauaaaaaugcaguaacugagcugcagcuucugaugcagucgaccccugccgcuaacaauagggcacggcgcgaguugccacgauucaugaacuacacacucaauaacacgaagaauaacaaugugacucugagcaaaaagcguaaaagaagguuucuggguuuccucuuaggcgucgggucagccauagcuaguggaaucgccguguccaagguucugcaccuugaaggcgaggugaacaagauuaaaaaugcguugcugucuaccaacaaggcagucgugagccuauccaacgguguaucaguucucacaaguaaagugcuggaccuuaagaauuauaucgauaaacaacuguugccgauugucaacaagcagagcuguucuaucuccaauauagaaacugugauugaguuucagcagaaaaacaaucggcuccuggagaucacccgcgaguucucagugaacgccggggucacaacccccguuagcacguacauguuaacuaauagugaacugcucucucuuauuaacgacaugccuaucacaaaugaucaaaagaagcugauguccaacaaugugcagaucguaagacagcagagcuauucgauuaugucuauaaucaaagaagagguguuggcuuacgucgugcaacuaccacuguacggaguuauugacacccccugcuggaagcuccauacuuccccucuguguacaaccaacacgaaagaaggcucaaauaucugccuuaccaggacagaucggggcugguauugugacaacgccgggagugugagcuuuuucccacaggcagagacuugcaagguccaguccaaucgcguguuuugugauaccaugaacucucugacauugcccagcgagguaaaccucugcaauauagacauuuucaacccuaaauacgauuguaagaucaugacuucaaagaccgacguuaguuccagcgugaucacaucucugggagcuauugucucaugcuaugguaaaaccaagugcacugccaguaauaaaaaccgaggcaucauuaagacguuuagcaaugggugugauuacguguccaacaaaggagucgacacagugucuguuggcaauaccuuauauuacgugaacaagcaagaagguaagucgcuguauguaaaaggggagccaauaaucaauuucuacgacccgcuagucuuucccagcgaugaguucgacgcguccauuucacaggugaacgaaaagaucaaucagagucucgccuucaucagaaaaucugaugaacugcuucacaacguuaaugugggaaagagcacuaccaacauuaugauaacaaccaucauuaucgucauuaucgugauauugcugcuccugaucgcaguaggccuuuuucuguacugcaaagcuaggugaggacuagugaagggaacacccaaauuuaauucagccuuaagcacaauuaauuaagagugaaacguaauuguacaagcaguuggucacccaccauagggcaugaucaacaccgcaaccuuuccuuuuucccccagugauucugaaaaaccccucuucccuucagcuugcuuagauguuccaaauuuaguaagcuuaaggcggccuacagaagaaaaagaaaaaaaaggccacaaaaguucccucucacuuucaguaaauaaaauaaaagcagcaacagaaauaaagaaauaaaugaaauucaaaaugaaauaaauauuguguugugcagcauuaaaaaaucaauaaaaauuaaaaaugagcaagaucuaaaaaaaaaaaaaaaaaaaaaaaaaaaaaaaaaaaaaaaaaaaaaaaaaaaaaaaaaaaaaaaaugcaucccccccccccccccccccccccccccccccaaaggcucuuuucagagccaccagaauu

SEQ ID NO: 12340 - RNA, 2234 nt, Artificial Sequence
  mRNA product Design f-4 comprising derived and/or modified sequence from HRSV(Memphis-37)__AIY60640.1__F-del (opt4)
gggagagucccgcagucggcguccagcggcucugcuuguucgugugugugucguugcaggccuuauucaagcuuaccauggagcugcccauccugaagaccaacgccaucaccaccauccuggccgccgugacccugugcuucgccagcagccagaacaucaccgaggaguucuaccagagcaccugcagcgccgugagcaagggcuaccugagcgcccugagaaccggcugguacaccagcgugaucaccaucgagcugagcaacaucaaggagaacaagugcaacggcaccgacgccaaggugaagcugaucaagcaggagcuggacaaguacaagaacgccgugaccgagcugcagcugcugaugcagagcacccccgccgccaacaacagagccagaagagagcugcccagauucaugaacuacacccugaacaacaccaagaacaacaacgugacccugagcaagaagagaaagagaagauuccugggcuuccugcugggcgugggcagcgccaucgccagcggcaucgccgugagcaaggugcugcaccuggagggcgaggugaacaagaucaagaacgcccugcugagcaccaacaaggccguggugagccugagcaacggcgugagcgugcugaccagcaaggugcuggaccugaagaacuacaucgacaagcagcugcugcccaucgugaacaagcagagcugcagcaucagcaacaucgagaccgugaucgaguuccagcagaagaacaacagacugcuggagaucaccagagaguucagcgugaacgccggcgugaccacccccgugagcaccuacaugcugaccaacagcgagcugcugagccugaucaacgacaugcccaucaccaacgaccagaagaagcugaugagcaacaacgugcagaucgugagacagcagagcuacagcaucaugagcaucaucaaggaggaggugcuggccuacguggugcagcugccccuguacggcgugaucgacacccccugcuggaagcugcacaccagcccccugugcaccaccaacaccaaggagggcagcaacaucugccugaccagaaccgacagaggcugguacugcgacaacgccggcagcgugagcuucuucccccaggccgagaccugcaaggugcagagcaacagaguguucugcgacaccaugaacagccugacccugcccagcgaggugaaccugugcaacaucgacaucuucaaccccaaguacgacugcaagaucaugaccagcaagaccgacgugagcagcagcgugaucaccagccugggcgccaucgugagcugcuacggcaagaccaagugcaccgccagcaacaagaacagaggcaucaucaagaccuucagcaacggcugcgacuacgugagcaacaagggcguggacaccgugagcgugggcaacacccuguacuacgugaacaagcaggagggcaagagccuguacgugaagggcgagcccaucaucaacuucuacgacccccugguguuccccagcgacgaguucgacgccagcaucagccaggugaacgagaagaucaaccagagccuggccuucaucagaaagagcgacgagcugcugcacaacgugaacgugggcaagagcaccaccaacaucaugaucaccaccaucaucaucgugaucaucgugauccugcugcugcugaucgccgugggccuguuccuguacugcaaggccagaugaggacuagugaagggaacacccaaauuuaauucagccuuaagcacaauuaauuaagagugaaacguaauuguacaagcaguuggucacccaccauagggcaugaucaacaccgcaaccuuuccuuuuucccccagugauucugaaaaaccccucuucccuucagcuugcuuagauguuccaaauuuaguaagcuuaaggcggccuacagaagaaaaagaaaaaaaaggccacaaaaguucccucucacuuucaguaaauaaaauaaaagcagcaacagaaauaaagaaauaaaugaaauucaaaaugaaauaaauauuguguugugcagcauuaaaaaaucaauaaaaauuaaaaaugagcaagaucuaaaaaaaaaaaaaaaaaaaaaaaaaaaaaaaaaaaaaaaaaaaaaaaaaaaaaaaaaaaaaaaaugcaucccccccccccccccccccccccccccccccaaaggcucuuuucagagccaccagaauu

SEQ ID NO: 12341 - RNA, 2234 nt, Artificial Sequence
  mRNA product Design f-4 comprising derived and/or modified sequence from HRSV(Memphis-37)__AIY60640.1__F-del (opt5)
gggagagucccgcagucggcguccagcggcucugcuuguucgugugugugucguugcaggccuuauucaagcuuaccauggagcugcccauccucaagaccaacgccauuacaacgauccuggcugccgugacccuuugcuucgcgagcucccagaauauuacagaagaguuuuaccaaucuaccuguagcgcugucuccaaaggcuaucugucugcccucagaacagggugguacaccagcguuaucacaauugaacuguccaacaucaaggagaauaaaugcaacggaaccgacgccaaggugaaacuuaucaagcaggaacuggauaaguauaaaaaugcugugacggagcuccagcugcugaugcagucuaccccugccgcuaacaaucgggcccgcagagagcucccgcgguucaugaacuacacacugaauaacaccaagaauaacaaugucacacuuagcaaaaagcgcaaaagacgguuucugggcuuccuccugggggugggauccgcgauugccagcggcaucgcuguuucuaaggugcuucaccuggaaggggaggucaacaagauuaaaaaugcccuccuguccaccaacaaggcugugguuagccugucuaacggaguguccguccucacgagcaaagugcuggaccuuaagaauuauaucgauaaacaacugcuccccauugugaacaagcagucuuguuccaucagcaauauugaaacagucaucgaguuucagcagaaaaacaaucgccugcuugagaucaccagagaauuuuccguuaacgccggcgugacaaccccugugucuaccuacaugcugacaaauagcgagcuccugucccugauuaacgacaugcccaucacgaaugaucaaaagaagcucaugagcaacaauguccagauugugcggcagcagucuuauuccaucaugagcauuaucaaagaagagguucuggcguacgugguccaacuuccucuguacggcgugaucgacacccccugcuggaagcuccauacaucuccucuguguaccacaaacaccaaagaagggagcaauauuugccuuacgcgcacagauagaggaugguauugugacaacgccggcuccguuucuuucuucccgcaggcugagaccugcaaggugcagagcaaucgggucuuuugugauaccaugaacucccugacacuccccagcgaggugaaccugugcaauaucgacauuuucaacccuaaauacgauuguaagaucaugaccucuaagacagacgucuccagcucugugauuacgucccugggggccaucguuagcugcuauggaaaaaccaagugcacagcuuccaauaaaaaccgcggcaucauuaagaccuuuucuaaugggugugauuacgugagcaacaaaggagucgacacaguguccguuggcaauacccucuauuacgugaacaagcaagaaggcaagucucuguaugucaaaggggagcccaucauuaauuucuacgacccucuuguguuucccagcgaugaguucgacgccuccaucagccaggugaacgaaaagauuaaucagucucuggccuucaucagaaaauccgaugaacuccugcacaacguuaaugucggaaagagcacgaccaacauuaugaucacaaccaucauuaucgugauuaucgugauucugcuucuccugaucgcugucggccuguuucucuacugcaaagcgcggugaggacuagugaagggaacacccaaauuuaauucagccuuaagcacaauuaauuaagagugaaacguaauuguacaagcaguuggucacccaccauagggcaugaucaacaccgcaaccuuuccuuuuucccccagugauucugaaaaaccccucuucccuucagcuugcuuagauguuccaaauuuaguaagcuuaaggcggccuacagaagaaaaagaaaaaaaaggccacaaaaguucccucucacuuucaguaaauaaaauaaaagcagcaacagaaauaaagaaauaaaugaaauucaaaaugaaauaaauauuguguugugcagcauuaaaaaaucaauaaaaauuaaaaaugagcaagaucuaaaaaaaaaaaaaaaaaaaaaaaaaaaaaaaaaaaaaaaaaaaaaaaaaaaaaaaaaaaaaaaaugcaucccccccccccccccccccccccccccccccaaaggcucuuuucagagccaccagaauu

SEQ ID NO: 12342 - RNA, 2234 nt, Artificial Sequence
  mRNA product Design f-4 comprising derived and/or modified sequence from HRSV(Memphis-37)__AIY60640.1__F-del (opt6)
gggagagucccgcagucggcguccagcggcucugcuuguucgugugugugucguugcaggccuuauucaagcuuaccauggaacucccaauauuaaaaacuaacgcaaucacaaccauauuagcagccgucacucuaugcuuugccuccucacaaaauauaacagaagaauuuuaccaauccacaugcucagccguuagcaaaggauaucuaucagcccuaagaacaggcugguauacuucaguaauaacaauagaacuaucaaauauaaaagaaaacaaaugcaacggaaccgacgcuaaaguaaagcucauaaaacaagaauuagacaaauacaaaaaugcaguaacagaacuacaacuccuaaugcaaucaaccccagccgccaauaacagagcuagacgagaacuaccccgauucaugaauuacacacuaaacaacacaaaaaacaacaauguaacacucucaaaaaaaagaaaacgaagauucuuagguuuucuccugggaguaggaucagcaaucgcuuccggaaucgcagucaguaaaguccuucaccuugaaggcgaaguaaacaaaauaaaaaaugcacuacuaucuacaaauaaagcaguaguaucccuauccaauggcgucucaguauuaaccucaaaaguacucgaccuuaaaaauuauauagacaaacaauuacuacccauagucaauaaacaauccuguuccauaucaaacauagaaacaguaaucgaauuucaacaaaaaaacaacagauuacuagaaauaacacgcgaauuuucagucaacgccggaguaaccacacccgucucaacauacaugcuaaccaacuccgaacuacuaucacuuaucaacgacaugccaauaacaaaugaccaaaaaaaacucaugucaaacaacguacaaauaguccgccaacaaucauacucuauaaugucuauuaucaaagaagaaguucucgcauacguaguacaacuaccacuauauggugucauagacacaccauguuggaaacuccauacaucacccuuauguacaaccaauacaaaagaaggcucaaacaucugccuaacucgaacagaccgaggaugguacugcgacaaugcaggaucugucucauucuucccucaagcagaaacauguaaaguucaaucuaauagaguuuucugcgauacaaugaacucacuaacucuaccaucagaaguaaaucucuguaauauugacauauucaacccaaaauacgauugcaagaucaugacaucaaaaacugacguaucauccucagucaucaccucauuaggagcaaucguaagcuguuacgggaaaacaaaaugcaccgcuucuaacaaaaauagaggaauaauuaaaaccuucucaaacggaugcgauuacgucuccaauaaaggaguagauacaguaagcguaggaaauacucuauacuacgucaauaaacaagaaggaaaaucacuuuaugucaaaggagaacccauaauaaauuucuacgacccauuagucuucccaucagaugaauuugacgcauccauaucccaagucaacgaaaaaaucaaucaaucacuagcauucauacgaaaaucagacgaacuacuacacaacguuaacguaggaaaaucaacaaccaacaucaugauaaccacuauaauaaucgucauaauagucauccuauuauuacuaauagccguaggccuuuuccuauacuguaaagcuagauaaggacuagugaagggaacacccaaauuuaauucagccuuaagcacaauuaauuaagagugaaacguaauuguacaagcaguuggucacccaccauagggcaugaucaacaccgcaaccuuuccuuuuucccccagugauucugaaaaaccccucuucccuucagcuugcuuagauguuccaaauuuaguaagcuuaaggcggccuacagaagaaaaagaaaaaaaaggccacaaaaguucccucucacuuucaguaaauaaaauaaaagcagcaacagaaauaaagaaauaaaugaaauucaaaaugaaauaaauauuguguugugcagcauuaaaaaaucaauaaaaauuaaaaaugagcaagaucuaaaaaaaaaaaaaaaaaaaaaaaaaaaaaaaaaaaaaaaaaaaaaaaaaaaaaaaaaaaaaaaaugcaucccccccccccccccccccccccccccccccaaaggcucuuuucagagccaccagaauu

SEQ ID NO: 12343 - RNA, 2234 nt, Artificial Sequence
  mRNA product Design f-4 comprising derived and/or modified sequence from HRSV(Memphis-37)__AIY60640.1__F-del (opt11)
gggagagucccgcagucggcguccagcggcucugcuuguucgugugugugucguugcaggccuuauucaagcuuaccauggaacucccgauccucaaaaccaacgccaucaccacuauccucgccgccguaacccucugcuucgccucaucccaaaacaucaccgaagaauuuuaccaauccacaugcuccgccgucuccaaagguuaccucucagcccuccgcaccggcugguacaccuccguuaucaccaucgaacuuuccaacauaaaagagaacaagugcaacggcaccgacgcaaaaguaaaacuaaucaaacaagaacuagacaaauacaaaaacgccgucaccgaacuccagcuccucaugcaaucgacgcccgccgccaacaaccgagcaaggcgcgaacuuccacgcuucaugaacuacacccucaacaacacuaaaaacaacaacgugacccuauccaaaaagcguaaacgccgauuccuagguuuccuucucggugucggcuccgccauugccuccggcaucgcuguuuccaaaguccuccaccucgaaggcgaaguaaacaagauaaaaaacgcccuccucucuacaaacaaggccgugguaucgcucucuaacggcgucucuguacucaccuccaaaguccucgaccucaaaaacuacaucgacaagcaacuccucccuaucgucaauaaacaauccugcuccauuuccaacaucgaaacagugaucgaauuucaacaaaaaaacaaccgauuacuagaaaucacccgcgaauuuucagucaacgccggcgucacaacgccagucucaaccuacaugcucaccaacucagaacucuuaucacucaucaacgacaugcccaucacuaacgaccagaaaaaacugauguccaacaacgugcaaauaguccgccaacaguccuacuccaucauguccauaaucaaggaggaggugcucgccuacguaguccaacucccccucuacggagucauugacaccccuugcuggaaacuacacaccuccccucucugcaccaccaacaccaaagaaggcagcaacaucugccuaaccaggacggaccgaggaugguacugcgacaaugcaggcuccgucagcuucuucccacaagccgaaacaugcaaaguucaaucaaaccguguauucugcgacaccaugaacucacucacccuccccucagaaguaaaccuaugcaacauagauaucuucaaccccaaauacgacugcaaaauuaugaccuccaaaaccgaugucuccagcuccguuaucacgucacucggcgccaucgucuccugcuacggcaagaccaaaugcaccgccuccaacaaaaaccgcggaauaaucaaaacauucucuaacggcugcgacuacgucuccaauaaaggcgucgacaccgucuccgugggcaacacgcuguacuacgucaacaaacaagaaggcaaaucucuuuacgucaaaggugaaccaaucaucaacuucuacgacccccucguauuccccuccgacgaauuugacgcgagcaucucccaagucaacgaaaagaucaaccaaucccucgccuucauccgaaaaagcgacgaacuccuccacaacgucaacgucggcaaaaguaccacaaacauuaugaucaccaccaucaucauagucaucaucgucauccugcuccuacuaauagccgucggccucuucuuguacugcaaggcacgaugaggacuagugaagggaacacccaaauuuaauucagccuuaagcacaauuaauuaagagugaaacguaauuguacaagcaguuggucacccaccauagggcaugaucaacaccgcaaccuuuccuuuuucccccagugauucugaaaaaccccucuucccuucagcuugcuuagauguuccaaauuuaguaagcuuaaggcggccuacagaagaaaaagaaaaaaaaggccacaaaaguucccucucacuuucaguaaauaaaauaaaagcagcaacagaaauaaagaaauaaaugaaauucaaaaugaaauaaauauuguguugugcagcauuaaaaaaucaauaaaaauuaaaaaugagcaagaucuaaaaaaaaaaaaaaaaaaaaaaaaaaaaaaaaaaaaaaaaaaaaaaaaaaaaaaaaaaaaaaaaugcaucccccccccccccccccccccccccccccccaaaggcucuuuucagagccaccagaauu

SEQ ID NO: 12344 - RNA, 2010 nt, Artificial Sequence
  mRNA product Design f-5 comprising derived and/or modified sequence from HRSV(Memphis-37)__AIY60640.1__F-del (wt)
gggagacuuucccauucuguagcagaauuugguguugccuguggucuuggucccgcggagaagcuuaccauggaguugccaauccucaaaacaaaugcaauuaccacaauccuugcugcagucacacucuguuucgcuuccagucaaaacaucacugaagaauuuuaucaaucaacaugcagugcaguuagcaaaggcuaucuuagugcuuuaagaacugguugguauacuaguguuauaacuauagaauuaaguaauaucaaggaaaauaaguguaauggaacagaugcuaagguaaaauugauaaaacaagaauuagauaaauauaaaaaugcuguaacagaauugcaguugcucaugcaaagcacaccagcagccaacaaucgagccagaagagaacuaccaagguuuaugaauuauacacucaacaauaccaaaaauaacaauguaacauuaagcaagaaaaggaaaagaagauuucuuggcuuuuuguuagguguuggaucugcaaucgccaguggcauugcuguaucuaaaguccugcaccuagaaggggaagugaacaaaaucaaaaaugcucuacuauccacaaacaaggcuguagucagcuuaucaaauggaguuagugucuuaaccagcaaaguguuagaccucaaaaacuauauagauaaacaguuguuacccauugugaacaagcaaagcugcagcauaucaaacauugaaacugugauagaauuccaacaaaagaacaacagacuacuagagauuaccagggaauuuaguguuaaugcagguguaacuacaccuguaagcacuuauauguuaacaaauagugaauuauuaucauuaaucaaugauaugccuauaacaaaugaucagaaaaaguuaauguccaacaauguucaaauaguuagacagcaaaguuacucuaucauguccauaauaaaggaggaagucuuagcauauguaguucaauuaccacuauaugguguaauagauacaccuuguuggaaacuacacacauccccucuaugcacaaccaacacaaaggaaggguccaacaucuguuuaacaagaaccgacagaggaugguacugugacaaugcaggaucagugucuuucuucccacaagcugaaacaugcaaaguucaaucgaaucgaguauuuugugacacaaugaacagucuaacauuaccaagugaaguaaaucucugcaacauugacauauucaacccuaaauaugauugcaaaauuaugacuucaaaaacagaugugagcagcuccguuaucacaucucuaggagccauugugucaugcuauggcaaaacuaaauguacagcauccaauaaaaaucguggaaucauaaagacauuuucuaacgggugugauuauguaucaaauaaggggguggacacuguaucuguagguaauacauuauauuauguaaauaagcaagaaggaaaaagccucuauguaaaaggugaaccaauaauaaauuucuaugacccauuaguguucccuucugaugaauuugaugcaucaauaucucaagucaaugagaagauuaaccagagccuagcauuuauucguaaauccgaugaauuauuacauaauguaaauguugguaaauccaccacaaauaucaugauaacuacuauaauuauagugauuauaguaauauuguuauuauuaauugcaguugggcuguuccuauacugcaaggccagaugaggacuaguacuggcugcaucucccuuuccucuguccuccauccuucucccaggauggugaagggggaccugguacccagugauccccaccccaggauccuaaaucaugacuuaccugcuaauaaaaacucauuggaaaagugagaagaucuaaaaaaaaaaaaaaaaaaaaaaaaaaaaaaaaaaaaaaaaaaaaaaaaaaaaaaaaaaaaaaaaugcaucccccccccccccccccccccccccccccccaaaggcucuuuucagagccaccagaauu

SEQ ID NO: 12345 - RNA, 2010 nt, Artificial Sequence
  mRNA product Design f-5 comprising derived and/or modified sequence from HRSV(Memphis-37)__AIY60640.1__F-del (opt1)
gggagacuuucccauucuguagcagaauuugguguugccuguggucuuggucccgcggagaagcuuaccauggagcugcccauccucaagaccaacgccaucaccacgauccuggccgcggugacccugugcuucgccagcucccagaacaucaccgaggaguucuaccagagcacgugcuccgccgucagcaagggcuaccucuccgcccugcgcaccgggugguacaccagcgugaucaccaucgagcuguccaacaucaaggagaacaagugcaacggcaccgacgccaaggugaagcucaucaagcaggagcuggacaaguacaagaacgcggucacggagcugcagcuccugaugcagagcaccccggccgccaacaaccgggcccgccgggagcugccccgcuucaugaacuacacccucaacaacaccaagaacaacaacgugacgcuguccaagaagcggaagcgccgguuccugggguuccuccugggcguggggagcgcgaucgccuccggcaucgccgucagcaaggugcugcaccucgagggcgaggugaacaagaucaagaacgcccugcuguccaccaacaaggccgucgugagccucuccaacggggugagcguccugaccuccaaggugcuggaccucaagaacuacaucgacaagcagcugcugcccaucgugaacaagcagagcugcuccaucagcaacaucgagaccgucaucgaguuccagcagaagaacaaccgccuccuggagaucacgcgggaguucagcgugaacgcgggcgugaccacccccgucuccaccuacaugcugacgaacagcgagcuccugucccugaucaacgacaugccgaucaccaacgaccagaagaagcucaugagcaacaacgugcagaucgugcgccagcaguccuacagcaucauguccaucaucaaggaggagguccuggccuacguggugcagcugccccucuacggggucaucgacacccccugcuggaagcugcacaccagcccccugugcacgaccaacaccaaggagggcuccaacaucugccucacccggacggaccgcgggugguacugcgacaacgccggcagcguguccuucuucccgcaggccgagaccugcaagguccagagcaaccggguguucugcgacaccaugaacucccugacccugcccagcgaggugaaccucugcaacaucgacaucuucaaccccaaguacgacugcaagaucaugacguccaagaccgacgucagcuccagcgugaucaccucccugggcgccaucgugagcugcuacgggaagaccaagugcacggcgagcaacaagaaccgcggcaucaucaagaccuucuccaacgggugcgacuacgucagcaacaagggcguggacaccguguccgucggcaacacccuguacuacgugaacaagcaggagggcaagagccucuacgugaagggggagcccaucaucaacuucuacgacccgcuggucuuccccuccgacgaguucgacgccagcaucucccaggugaacgagaagaucaaccagagccuggccuucauccggaaguccgacgagcuccugcacaacgugaacgucggcaagagcaccacgaacaucaugaucaccaccaucaucaucgugaucaucgugauccugcugcuccugaucgccgucgggcuguuccucuacugcaaggcccgcugaggacuaguacuggcugcaucucccuuuccucuguccuccauccuucucccaggauggugaagggggaccugguacccagugauccccaccccaggauccuaaaucaugacuuaccugcuaauaaaaacucauuggaaaagugagaagaucuaaaaaaaaaaaaaaaaaaaaaaaaaaaaaaaaaaaaaaaaaaaaaaaaaaaaaaaaaaaaaaaaugcaucccccccccccccccccccccccccccccccaaaggcucuuuucagagccaccagaauu

SEQ ID NO: 12346 - RNA, 2010 nt, Artificial Sequence
  mRNA product Design f-5 comprising derived and/or modified sequence from HRSV(Memphis-37)__AIY60640.1__F-del (opt2)
gggagacuuucccauucuguagcagaauuugguguugccuguggucuuggucccgcggagaagcuuaccauggagcuccccauccucaagaccaacgccaucaccaccauccucgccgccgucacccucugcuucgccuccucccagaacaucaccgaggaguucuaccaguccaccugcuccgccgucuccaagggcuaccucuccgcccuccgcaccggcugguacaccuccgucaucaccaucgagcucuccaacaucaaggagaacaagugcaacggcaccgacgccaaggucaagcucaucaagcaggagcucgacaaguacaagaacgccgucaccgagcuccagcuccucaugcaguccacccccgccgccaacaaccgcgcccgccgcgagcucccccgcuucaugaacuacacccucaacaacaccaagaacaacaacgucacccucuccaagaagcgcaagcgccgcuuccucggcuuccuccucggcgucggcuccgccaucgccuccggcaucgccgucuccaagguccuccaccucgagggcgaggucaacaagaucaagaacgcccuccucuccaccaacaaggccgucgucucccucuccaacggcgucuccguccucaccuccaagguccucgaccucaagaacuacaucgacaagcagcuccuccccaucgucaacaagcaguccugcuccaucuccaacaucgagaccgucaucgaguuccagcagaagaacaaccgccuccucgagaucacccgcgaguucuccgucaacgccggcgucaccacccccgucuccaccuacaugcucaccaacuccgagcuccucucccucaucaacgacaugcccaucaccaacgaccagaagaagcucauguccaacaacguccagaucguccgccagcaguccuacuccaucauguccaucaucaaggaggagguccucgccuacgucguccagcucccccucuacggcgucaucgacacccccugcuggaagcuccacaccuccccccucugcaccaccaacaccaaggagggcuccaacaucugccucacccgcaccgaccgcggcugguacugcgacaacgccggcuccgucuccuucuucccccaggccgagaccugcaagguccaguccaaccgcgucuucugcgacaccaugaacucccucacccuccccuccgaggucaaccucugcaacaucgacaucuucaaccccaaguacgacugcaagaucaugaccuccaagaccgacgucuccuccuccgucaucaccucccucggcgccaucgucuccugcuacggcaagaccaagugcaccgccuccaacaagaaccgcggcaucaucaagaccuucuccaacggcugcgacuacgucuccaacaagggcgucgacaccgucuccgucggcaacacccucuacuacgucaacaagcaggagggcaagucccucuacgucaagggcgagcccaucaucaacuucuacgacccccucgucuuccccuccgacgaguucgacgccuccaucucccaggucaacgagaagaucaaccagucccucgccuucauccgcaaguccgacgagcuccuccacaacgucaacgucggcaaguccaccaccaacaucaugaucaccaccaucaucaucgucaucaucgucauccuccuccuccucaucgccgucggccucuuccucuacugcaaggcccgcugaggacuaguacuggcugcaucucccuuuccucuguccuccauccuucucccaggauggugaagggggaccugguacccagugauccccaccccaggauccuaaaucaugacuuaccugcuaauaaaaacucauuggaaaagugagaagaucuaaaaaaaaaaaaaaaaaaaaaaaaaaaaaaaaaaaaaaaaaaaaaaaaaaaaaaaaaaaaaaaaugcaucccccccccccccccccccccccccccccccaaaggcucuuuucagagccaccagaauu

SEQ ID NO: 12347 - RNA, 2010 nt, Artificial Sequence
  mRNA product Design f-5 comprising derived and/or modified sequence from HRSV(Memphis-37)__AIY60640.1__F-del (opt3)
gggagacuuucccauucuguagcagaauuugguguugccuguggucuuggucccgcggagaagcuuaccauggagcugcccauccucaagaccaacgccauuacaacuauacuugcugcagugacgcugugcuucgccagcucccagaauaucaccgaagaguuuuaccaaucuacauguucagcggucaguaaaggcuauuugagcgcuuuaagaacugggugguacaccuccguuauuacaaucgaacugucuaacauuaaggagaauaaaugcaacggaaccgacgccaaggugaaacuaaucaagcaggaacucgauaaguauaaaaaugcaguaacugagcugcagcuucugaugcagucgaccccugccgcuaacaauagggcacggcgcgaguugccacgauucaugaacuacacacucaauaacacgaagaauaacaaugugacucugagcaaaaagcguaaaagaagguuucuggguuuccucuuaggcgucgggucagccauagcuaguggaaucgccguguccaagguucugcaccuugaaggcgaggugaacaagauuaaaaaugcguugcugucuaccaacaaggcagucgugagccuauccaacgguguaucaguucucacaaguaaagugcuggaccuuaagaauuauaucgauaaacaacuguugccgauugucaacaagcagagcuguucuaucuccaauauagaaacugugauugaguuucagcagaaaaacaaucggcuccuggagaucacccgcgaguucucagugaacgccggggucacaacccccguuagcacguacauguuaacuaauagugaacugcucucucuuauuaacgacaugccuaucacaaaugaucaaaagaagcugauguccaacaaugugcagaucguaagacagcagagcuauucgauuaugucuauaaucaaagaagagguguuggcuuacgucgugcaacuaccacuguacggaguuauugacacccccugcuggaagcuccauacuuccccucuguguacaaccaacacgaaagaaggcucaaauaucugccuuaccaggacagaucggggcugguauugugacaacgccgggagugugagcuuuuucccacaggcagagacuugcaagguccaguccaaucgcguguuuugugauaccaugaacucucugacauugcccagcgagguaaaccucugcaauauagacauuuucaacccuaaauacgauuguaagaucaugacuucaaagaccgacguuaguuccagcgugaucacaucucugggagcuauugucucaugcuaugguaaaaccaagugcacugccaguaauaaaaaccgaggcaucauuaagacguuuagcaaugggugugauuacguguccaacaaaggagucgacacagugucuguuggcaauaccuuauauuacgugaacaagcaagaagguaagucgcuguauguaaaaggggagccaauaaucaauuucuacgacccgcuagucuuucccagcgaugaguucgacgcguccauuucacaggugaacgaaaagaucaaucagagucucgccuucaucagaaaaucugaugaacugcuucacaacguuaaugugggaaagagcacuaccaacauuaugauaacaaccaucauuaucgucauuaucgugauauugcugcuccugaucgcaguaggccuuuuucuguacugcaaagcuaggugaggacuaguacuggcugcaucucccuuuccucuguccuccauccuucucccaggauggugaagggggaccugguacccagugauccccaccccaggauccuaaaucaugacuuaccugcuaauaaaaacucauuggaaaagugagaagaucuaaaaaaaaaaaaaaaaaaaaaaaaaaaaaaaaaaaaaaaaaaaaaaaaaaaaaaaaaaaaaaaaugcaucccccccccccccccccccccccccccccccaaaggcucuuuucagagccaccagaauu

SEQ ID NO: 12348 - RNA, 2010 nt, Artificial Sequence
  mRNA product Design f-5 comprising derived and/or modified sequence from HRSV(Memphis-37)__AIY60640.1__F-del (opt4)
gggagacuuucccauucuguagcagaauuugguguugccuguggucuuggucccgcggagaagcuuaccauggagcugcccauccugaagaccaacgccaucaccaccauccuggccgccgugacccugugcuucgccagcagccagaacaucaccgaggaguucuaccagagcaccugcagcgccgugagcaagggcuaccugagcgcccugagaaccggcugguacaccagcgugaucaccaucgagcugagcaacaucaaggagaacaagugcaacggcaccgacgccaaggugaagcugaucaagcaggagcuggacaaguacaagaacgccgugaccgagcugcagcugcugaugcagagcacccccgccgccaacaacagagccagaagagagcugcccagauucaugaacuacacccugaacaacaccaagaacaacaacgugacccugagcaagaagagaaagagaagauuccugggcuuccugcugggcgugggcagcgccaucgccagcggcaucgccgugagcaaggugcugcaccuggagggcgaggugaacaagaucaagaacgcccugcugagcaccaacaaggccguggugagccugagcaacggcgugagcgugcugaccagcaaggugcuggaccugaagaacuacaucgacaagcagcugcugcccaucgugaacaagcagagcugcagcaucagcaacaucgagaccgugaucgaguuccagcagaagaacaacagacugcuggagaucaccagagaguucagcgugaacgccggcgugaccacccccgugagcaccuacaugcugaccaacagcgagcugcugagccugaucaacgacaugcccaucaccaacgaccagaagaagcugaugagcaacaacgugcagaucgugagacagcagagcuacagcaucaugagcaucaucaaggaggaggugcuggccuacguggugcagcugccccuguacggcgugaucgacacccccugcuggaagcugcacaccagcccccugugcaccaccaacaccaaggagggcagcaacaucugccugaccagaaccgacagaggcugguacugcgacaacgccggcagcgugagcuucuucccccaggccgagaccugcaaggugcagagcaacagaguguucugcgacaccaugaacagccugacccugcccagcgaggugaaccugugcaacaucgacaucuucaaccccaaguacgacugcaagaucaugaccagcaagaccgacgugagcagcagcgugaucaccagccugggcgccaucgugagcugcuacggcaagaccaagugcaccgccagcaacaagaacagaggcaucaucaagaccuucagcaacggcugcgacuacgugagcaacaagggcguggacaccgugagcgugggcaacacccuguacuacgugaacaagcaggagggcaagagccuguacgugaagggcgagcccaucaucaacuucuacgacccccugguguuccccagcgacgaguucgacgccagcaucagccaggugaacgagaagaucaaccagagccuggccuucaucagaaagagcgacgagcugcugcacaacgugaacgugggcaagagcaccaccaacaucaugaucaccaccaucaucaucgugaucaucgugauccugcugcugcugaucgccgugggccuguuccuguacugcaaggccagaugaggacuaguacuggcugcaucucccuuuccucuguccuccauccuucucccaggauggugaagggggaccugguacccagugauccccaccccaggauccuaaaucaugacuuaccugcuaauaaaaacucauuggaaaagugagaagaucuaaaaaaaaaaaaaaaaaaaaaaaaaaaaaaaaaaaaaaaaaaaaaaaaaaaaaaaaaaaaaaaaugcaucccccccccccccccccccccccccccccccaaaggcucuuuucagagccaccagaauu

SEQ ID NO: 12349 - RNA, 2010 nt, Artificial Sequence
  mRNA product Design f-5 comprising derived and/or modified sequence from HRSV(Memphis-37)__AIY60640.1__F-del (opt5)
gggagacuuucccauucuguagcagaauuugguguugccuguggucuuggucccgcggagaagcuuaccauggagcugcccauccucaagaccaacgccauuacaacgauccuggcugccgugacccuuugcuucgcgagcucccagaauauuacagaagaguuuuaccaaucuaccuguagcgcugucuccaaaggcuaucugucugcccucagaacagggugguacaccagcguuaucacaauugaacuguccaacaucaaggagaauaaaugcaacggaaccgacgccaaggugaaacuuaucaagcaggaacuggauaaguauaaaaaugcugugacggagcuccagcugcugaugcagucuaccccugccgcuaacaaucgggcccgcagagagcucccgcgguucaugaacuacacacugaauaacaccaagaauaacaaugucacacuuagcaaaaagcgcaaaagacgguuucugggcuuccuccugggggugggauccgcgauugccagcggcaucgcuguuucuaaggugcuucaccuggaaggggaggucaacaagauuaaaaaugcccuccuguccaccaacaaggcugugguuagccugucuaacggaguguccguccucacgagcaaagugcuggaccuuaagaauuauaucgauaaacaacugcuccccauugugaacaagcagucuuguuccaucagcaauauugaaacagucaucgaguuucagcagaaaaacaaucgccugcuugagaucaccagagaauuuuccguuaacgccggcgugacaaccccugugucuaccuacaugcugacaaauagcgagcuccugucccugauuaacgacaugcccaucacgaaugaucaaaagaagcucaugagcaacaauguccagauugugcggcagcagucuuauuccaucaugagcauuaucaaagaagagguucuggcguacgugguccaacuuccucuguacggcgugaucgacacccccugcuggaagcuccauacaucuccucuguguaccacaaacaccaaagaagggagcaauauuugccuuacgcgcacagauagaggaugguauugugacaacgccggcuccguuucuuucuucccgcaggcugagaccugcaaggugcagagcaaucgggucuuuugugauaccaugaacucccugacacuccccagcgaggugaaccugugcaauaucgacauuuucaacccuaaauacgauuguaagaucaugaccucuaagacagacgucuccagcucugugauuacgucccugggggccaucguuagcugcuauggaaaaaccaagugcacagcuuccaauaaaaaccgcggcaucauuaagaccuuuucuaaugggugugauuacgugagcaacaaaggagucgacacaguguccguuggcaauacccucuauuacgugaacaagcaagaaggcaagucucuguaugucaaaggggagcccaucauuaauuucuacgacccucuuguguuucccagcgaugaguucgacgccuccaucagccaggugaacgaaaagauuaaucagucucuggccuucaucagaaaauccgaugaacuccugcacaacguuaaugucggaaagagcacgaccaacauuaugaucacaaccaucauuaucgugauuaucgugauucugcuucuccugaucgcugucggccuguuucucuacugcaaagcgcggugaggacuaguacuggcugcaucucccuuuccucuguccuccauccuucucccaggauggugaagggggaccugguacccagugauccccaccccaggauccuaaaucaugacuuaccugcuaauaaaaacucauuggaaaagugagaagaucuaaaaaaaaaaaaaaaaaaaaaaaaaaaaaaaaaaaaaaaaaaaaaaaaaaaaaaaaaaaaaaaaugcaucccccccccccccccccccccccccccccccaaaggcucuuuucagagccaccagaauu

SEQ ID NO: 12350 - RNA, 2010 nt, Artificial Sequence
  mRNA product Design f-5 comprising derived and/or modified sequence from HRSV(Memphis-37)__AIY60640.1__F-del (opt6)
gggagacuuucccauucuguagcagaauuugguguugccuguggucuuggucccgcggagaagcuuaccauggaacucccaauauuaaaaacuaacgcaaucacaaccauauuagcagccgucacucuaugcuuugccuccucacaaaauauaacagaagaauuuuaccaauccacaugcucagccguuagcaaaggauaucuaucagcccuaagaacaggcugguauacuucaguaauaacaauagaacuaucaaauauaaaagaaaacaaaugcaacggaaccgacgcuaaaguaaagcucauaaaacaagaauuagacaaauacaaaaaugcaguaacagaacuacaacuccuaaugcaaucaaccccagccgccaauaacagagcuagacgagaacuaccccgauucaugaauuacacacuaaacaacacaaaaaacaacaauguaacacucucaaaaaaaagaaaacgaagauucuuagguuuucuccugggaguaggaucagcaaucgcuuccggaaucgcagucaguaaaguccuucaccuugaaggcgaaguaaacaaaauaaaaaaugcacuacuaucuacaaauaaagcaguaguaucccuauccaauggcgucucaguauuaaccucaaaaguacucgaccuuaaaaauuauauagacaaacaauuacuacccauagucaauaaacaauccuguuccauaucaaacauagaaacaguaaucgaauuucaacaaaaaaacaacagauuacuagaaauaacacgcgaauuuucagucaacgccggaguaaccacacccgucucaacauacaugcuaaccaacuccgaacuacuaucacuuaucaacgacaugccaauaacaaaugaccaaaaaaaacucaugucaaacaacguacaaauaguccgccaacaaucauacucuauaaugucuauuaucaaagaagaaguucucgcauacguaguacaacuaccacuauauggugucauagacacaccauguuggaaacuccauacaucacccuuauguacaaccaauacaaaagaaggcucaaacaucugccuaacucgaacagaccgaggaugguacugcgacaaugcaggaucugucucauucuucccucaagcagaaacauguaaaguucaaucuaauagaguuuucugcgauacaaugaacucacuaacucuaccaucagaaguaaaucucuguaauauugacauauucaacccaaaauacgauugcaagaucaugacaucaaaaacugacguaucauccucagucaucaccucauuaggagcaaucguaagcuguuacgggaaaacaaaaugcaccgcuucuaacaaaaauagaggaauaauuaaaaccuucucaaacggaugcgauuacgucuccaauaaaggaguagauacaguaagcguaggaaauacucuauacuacgucaauaaacaagaaggaaaaucacuuuaugucaaaggagaacccauaauaaauuucuacgacccauuagucuucccaucagaugaauuugacgcauccauaucccaagucaacgaaaaaaucaaucaaucacuagcauucauacgaaaaucagacgaacuacuacacaacguuaacguaggaaaaucaacaaccaacaucaugauaaccacuauaauaaucgucauaauagucauccuauuauuacuaauagccguaggccuuuuccuauacuguaaagcuagauaaggacuaguacuggcugcaucucccuuuccucuguccuccauccuucucccaggauggugaagggggaccugguacccagugauccccaccccaggauccuaaaucaugacuuaccugcuaauaaaaacucauuggaaaagugagaagaucuaaaaaaaaaaaaaaaaaaaaaaaaaaaaaaaaaaaaaaaaaaaaaaaaaaaaaaaaaaaaaaaaugcaucccccccccccccccccccccccccccccccaaaggcucuuuucagagccaccagaauu

SEQ ID NO: 12351 - RNA, 2010 nt, Artificial Sequence
  mRNA product Design f-5 comprising derived and/or modified sequence from HRSV(Memphis-37)__AIY60640.1__F-del (opt11)
gggagacuuucccauucuguagcagaauuugguguugccuguggucuuggucccgcggagaagcuuaccauggaacucccgauccucaaaaccaacgccaucaccacuauccucgccgccguaacccucugcuucgccucaucccaaaacaucaccgaagaauuuuaccaauccacaugcuccgccgucuccaaagguuaccucucagcccuccgcaccggcugguacaccuccguuaucaccaucgaacuuuccaacauaaaagagaacaagugcaacggcaccgacgcaaaaguaaaacuaaucaaacaagaacuagacaaauacaaaaacgccgucaccgaacuccagcuccucaugcaaucgacgcccgccgccaacaaccgagcaaggcgcgaacuuccacgcuucaugaacuacacccucaacaacacuaaaaacaacaacgugacccuauccaaaaagcguaaacgccgauuccuagguuuccuucucggugucggcuccgccauugccuccggcaucgcuguuuccaaaguccuccaccucgaaggcgaaguaaacaagauaaaaaacgcccuccucucuacaaacaaggccgugguaucgcucucuaacggcgucucuguacucaccuccaaaguccucgaccucaaaaacuacaucgacaagcaacuccucccuaucgucaauaaacaauccugcuccauuuccaacaucgaaacagugaucgaauuucaacaaaaaaacaaccgauuacuagaaaucacccgcgaauuuucagucaacgccggcgucacaacgccagucucaaccuacaugcucaccaacucagaacucuuaucacucaucaacgacaugcccaucacuaacgaccagaaaaaacugauguccaacaacgugcaaauaguccgccaacaguccuacuccaucauguccauaaucaaggaggaggugcucgccuacguaguccaacucccccucuacggagucauugacaccccuugcuggaaacuacacaccuccccucucugcaccaccaacaccaaagaaggcagcaacaucugccuaaccaggacggaccgaggaugguacugcgacaaugcaggcuccgucagcuucuucccacaagccgaaacaugcaaaguucaaucaaaccguguauucugcgacaccaugaacucacucacccuccccucagaaguaaaccuaugcaacauagauaucuucaaccccaaauacgacugcaaaauuaugaccuccaaaaccgaugucuccagcuccguuaucacgucacucggcgccaucgucuccugcuacggcaagaccaaaugcaccgccuccaacaaaaaccgcggaauaaucaaaacauucucuaacggcugcgacuacgucuccaauaaaggcgucgacaccgucuccgugggcaacacgcuguacuacgucaacaaacaagaaggcaaaucucuuuacgucaaaggugaaccaaucaucaacuucuacgacccccucguauuccccuccgacgaauuugacgcgagcaucucccaagucaacgaaaagaucaaccaaucccucgccuucauccgaaaaagcgacgaacuccuccacaacgucaacgucggcaaaaguaccacaaacauuaugaucaccaccaucaucauagucaucaucgucauccugcuccuacuaauagccgucggccucuucuuguacugcaaggcacgaugaggacuaguacuggcugcaucucccuuuccucuguccuccauccuucucccaggauggugaagggggaccugguacccagugauccccaccccaggauccuaaaucaugacuuaccugcuaauaaaaacucauuggaaaagugagaagaucuaaaaaaaaaaaaaaaaaaaaaaaaaaaaaaaaaaaaaaaaaaaaaaaaaaaaaaaaaaaaaaaaugcaucccccccccccccccccccccccccccccccaaaggcucuuuucagagccaccagaauu

SEQ ID NO: 12352 - RNA, 2006 nt, Artificial Sequence
  mRNA product Design g-1 comprising derived and/or modified sequence from HRSV(Memphis-37)__AIY60640.1__F-del (wt)
gggagacuuucccauucuguagcagaauuugguguugccuguggucuuggucccgcggagaagcuuaccauggaguugccaauccucaaaacaaaugcaauuaccacaauccuugcugcagucacacucuguuucgcuuccagucaaaacaucacugaagaauuuuaucaaucaacaugcagugcaguuagcaaaggcuaucuuagugcuuuaagaacugguugguauacuaguguuauaacuauagaauuaaguaauaucaaggaaaauaaguguaauggaacagaugcuaagguaaaauugauaaaacaagaauuagauaaauauaaaaaugcuguaacagaauugcaguugcucaugcaaagcacaccagcagccaacaaucgagccagaagagaacuaccaagguuuaugaauuauacacucaacaauaccaaaaauaacaauguaacauuaagcaagaaaaggaaaagaagauuucuuggcuuuuuguuagguguuggaucugcaaucgccaguggcauugcuguaucuaaaguccugcaccuagaaggggaagugaacaaaaucaaaaaugcucuacuauccacaaacaaggcuguagucagcuuaucaaauggaguuagugucuuaaccagcaaaguguuagaccucaaaaacuauauagauaaacaguuguuacccauugugaacaagcaaagcugcagcauaucaaacauugaaacugugauagaauuccaacaaaagaacaacagacuacuagagauuaccagggaauuuaguguuaaugcagguguaacuacaccuguaagcacuuauauguuaacaaauagugaauuauuaucauuaaucaaugauaugccuauaacaaaugaucagaaaaaguuaauguccaacaauguucaaauaguuagacagcaaaguuacucuaucauguccauaauaaaggaggaagucuuagcauauguaguucaauuaccacuauaugguguaauagauacaccuuguuggaaacuacacacauccccucuaugcacaaccaacacaaaggaaggguccaacaucuguuuaacaagaaccgacagaggaugguacugugacaaugcaggaucagugucuuucuucccacaagcugaaacaugcaaaguucaaucgaaucgaguauuuugugacacaaugaacagucuaacauuaccaagugaaguaaaucucugcaacauugacauauucaacccuaaauaugauugcaaaauuaugacuucaaaaacagaugugagcagcuccguuaucacaucucuaggagccauugugucaugcuauggcaaaacuaaauguacagcauccaauaaaaaucguggaaucauaaagacauuuucuaacgggugugauuauguaucaaauaaggggguggacacuguaucuguagguaauacauuauauuauguaaauaagcaagaaggaaaaagccucuauguaaaaggugaaccaauaauaaauuucuaugacccauuaguguucccuucugaugaauuugaugcaucaauaucucaagucaaugagaagauuaaccagagccuagcauuuauucguaaauccgaugaauuauuacauaauguaaauguugguaaauccaccacaaauaucaugauaacuacuauaauuauagugauuauaguaauauuguuauuauuaauugcaguugggcuguuccuauacugcaaggccagaugaggacuaguggaagcauuuuccuggcugauuaaaagaaauuacucagcuauggucaucuguuccuguuagaaggcuaugcagcauauuauauacuaugcgcauguuaugaaaugcauaauaaaaaauuuuaaaaaaucuaaaagaucuaaaaaaaaaaaaaaaaaaaaaaaaaaaaaaaaaaaaaaaaaaaaaaaaaaaaaaaaaaaaaaaaugcaucccccccccccccccccccccccccccccccaaaggcucuuuucagagccaccagaauu

SEQ ID NO: 12353 - RNA, 2006 nt, Artificial Sequence
  mRNA product Design g-1 comprising derived and/or modified sequence from HRSV(Memphis-37)__AIY60640.1__F-del (opt1)
gggagacuuucccauucuguagcagaauuugguguugccuguggucuuggucccgcggagaagcuuaccauggagcugcccauccucaagaccaacgccaucaccacgauccuggccgcggugacccugugcuucgccagcucccagaacaucaccgaggaguucuaccagagcacgugcuccgccgucagcaagggcuaccucuccgcccugcgcaccgggugguacaccagcgugaucaccaucgagcuguccaacaucaaggagaacaagugcaacggcaccgacgccaaggugaagcucaucaagcaggagcuggacaaguacaagaacgcggucacggagcugcagcuccugaugcagagcaccccggccgccaacaaccgggcccgccgggagcugccccgcuucaugaacuacacccucaacaacaccaagaacaacaacgugacgcuguccaagaagcggaagcgccgguuccugggguuccuccugggcguggggagcgcgaucgccuccggcaucgccgucagcaaggugcugcaccucgagggcgaggugaacaagaucaagaacgcccugcuguccaccaacaaggccgucgugagccucuccaacggggugagcguccugaccuccaaggugcuggaccucaagaacuacaucgacaagcagcugcugcccaucgugaacaagcagagcugcuccaucagcaacaucgagaccgucaucgaguuccagcagaagaacaaccgccuccuggagaucacgcgggaguucagcgugaacgcgggcgugaccacccccgucuccaccuacaugcugacgaacagcgagcuccugucccugaucaacgacaugccgaucaccaacgaccagaagaagcucaugagcaacaacgugcagaucgugcgccagcaguccuacagcaucauguccaucaucaaggaggagguccuggccuacguggugcagcugccccucuacggggucaucgacacccccugcuggaagcugcacaccagcccccugugcacgaccaacaccaaggagggcuccaacaucugccucacccggacggaccgcgggugguacugcgacaacgccggcagcguguccuucuucccgcaggccgagaccugcaagguccagagcaaccggguguucugcgacaccaugaacucccugacccugcccagcgaggugaaccucugcaacaucgacaucuucaaccccaaguacgacugcaagaucaugacguccaagaccgacgucagcuccagcgugaucaccucccugggcgccaucgugagcugcuacgggaagaccaagugcacggcgagcaacaagaaccgcggcaucaucaagaccuucuccaacgggugcgacuacgucagcaacaagggcguggacaccguguccgucggcaacacccuguacuacgugaacaagcaggagggcaagagccucuacgugaagggggagcccaucaucaacuucuacgacccgcuggucuuccccuccgacgaguucgacgccagcaucucccaggugaacgagaagaucaaccagagccuggccuucauccggaaguccgacgagcuccugcacaacgugaacgucggcaagagcaccacgaacaucaugaucaccaccaucaucaucgugaucaucgugauccugcugcuccugaucgccgucgggcuguuccucuacugcaaggcccgcugaggacuaguggaagcauuuuccuggcugauuaaaagaaauuacucagcuauggucaucuguuccuguuagaaggcuaugcagcauauuauauacuaugcgcauguuaugaaaugcauaauaaaaaauuuuaaaaaaucuaaaagaucuaaaaaaaaaaaaaaaaaaaaaaaaaaaaaaaaaaaaaaaaaaaaaaaaaaaaaaaaaaaaaaaaugcaucccccccccccccccccccccccccccccccaaaggcucuuuucagagccaccagaauu

SEQ ID NO: 12354 - RNA, 2006 nt, Artificial Sequence
  mRNA product Design g-1 comprising derived and/or modified sequence from HRSV(Memphis-37)__AIY60640.1__F-del (opt2)
gggagacuuucccauucuguagcagaauuugguguugccuguggucuuggucccgcggagaagcuuaccauggagcuccccauccucaagaccaacgccaucaccaccauccucgccgccgucacccucugcuucgccuccucccagaacaucaccgaggaguucuaccaguccaccugcuccgccgucuccaagggcuaccucuccgcccuccgcaccggcugguacaccuccgucaucaccaucgagcucuccaacaucaaggagaacaagugcaacggcaccgacgccaaggucaagcucaucaagcaggagcucgacaaguacaagaacgccgucaccgagcuccagcuccucaugcaguccacccccgccgccaacaaccgcgcccgccgcgagcucccccgcuucaugaacuacacccucaacaacaccaagaacaacaacgucacccucuccaagaagcgcaagcgccgcuuccucggcuuccuccucggcgucggcuccgccaucgccuccggcaucgccgucuccaagguccuccaccucgagggcgaggucaacaagaucaagaacgcccuccucuccaccaacaaggccgucgucucccucuccaacggcgucuccguccucaccuccaagguccucgaccucaagaacuacaucgacaagcagcuccuccccaucgucaacaagcaguccugcuccaucuccaacaucgagaccgucaucgaguuccagcagaagaacaaccgccuccucgagaucacccgcgaguucuccgucaacgccggcgucaccacccccgucuccaccuacaugcucaccaacuccgagcuccucucccucaucaacgacaugcccaucaccaacgaccagaagaagcucauguccaacaacguccagaucguccgccagcaguccuacuccaucauguccaucaucaaggaggagguccucgccuacgucguccagcucccccucuacggcgucaucgacacccccugcuggaagcuccacaccuccccccucugcaccaccaacaccaaggagggcuccaacaucugccucacccgcaccgaccgcggcugguacugcgacaacgccggcuccgucuccuucuucccccaggccgagaccugcaagguccaguccaaccgcgucuucugcgacaccaugaacucccucacccuccccuccgaggucaaccucugcaacaucgacaucuucaaccccaaguacgacugcaagaucaugaccuccaagaccgacgucuccuccuccgucaucaccucccucggcgccaucgucuccugcuacggcaagaccaagugcaccgccuccaacaagaaccgcggcaucaucaagaccuucuccaacggcugcgacuacgucuccaacaagggcgucgacaccgucuccgucggcaacacccucuacuacgucaacaagcaggagggcaagucccucuacgucaagggcgagcccaucaucaacuucuacgacccccucgucuuccccuccgacgaguucgacgccuccaucucccaggucaacgagaagaucaaccagucccucgccuucauccgcaaguccgacgagcuccuccacaacgucaacgucggcaaguccaccaccaacaucaugaucaccaccaucaucaucgucaucaucgucauccuccuccuccucaucgccgucggccucuuccucuacugcaaggcccgcugaggacuaguggaagcauuuuccuggcugauuaaaagaaauuacucagcuauggucaucuguuccuguuagaaggcuaugcagcauauuauauacuaugcgcauguuaugaaaugcauaauaaaaaauuuuaaaaaaucuaaaagaucuaaaaaaaaaaaaaaaaaaaaaaaaaaaaaaaaaaaaaaaaaaaaaaaaaaaaaaaaaaaaaaaaugcaucccccccccccccccccccccccccccccccaaaggcucuuuucagagccaccagaauu

SEQ ID NO: 12355 - RNA, 2006 nt, Artificial Sequence
  mRNA product Design g-1 comprising derived and/or modified sequence from HRSV(Memphis-37)__AIY60640.1__F-del (opt3)
gggagacuuucccauucuguagcagaauuugguguugccuguggucuuggucccgcggagaagcuuaccauggagcugcccauccucaagaccaacgccauuacaacuauacuugcugcagugacgcugugcuucgccagcucccagaauaucaccgaagaguuuuaccaaucuacauguucagcggucaguaaaggcuauuugagcgcuuuaagaacugggugguacaccuccguuauuacaaucgaacugucuaacauuaaggagaauaaaugcaacggaaccgacgccaaggugaaacuaaucaagcaggaacucgauaaguauaaaaaugcaguaacugagcugcagcuucugaugcagucgaccccugccgcuaacaauagggcacggcgcgaguugccacgauucaugaacuacacacucaauaacacgaagaauaacaaugugacucugagcaaaaagcguaaaagaagguuucuggguuuccucuuaggcgucgggucagccauagcuaguggaaucgccguguccaagguucugcaccuugaaggcgaggugaacaagauuaaaaaugcguugcugucuaccaacaaggcagucgugagccuauccaacgguguaucaguucucacaaguaaagugcuggaccuuaagaauuauaucgauaaacaacuguugccgauugucaacaagcagagcuguucuaucuccaauauagaaacugugauugaguuucagcagaaaaacaaucggcuccuggagaucacccgcgaguucucagugaacgccggggucacaacccccguuagcacguacauguuaacuaauagugaacugcucucucuuauuaacgacaugccuaucacaaaugaucaaaagaagcugauguccaacaaugugcagaucguaagacagcagagcuauucgauuaugucuauaaucaaagaagagguguuggcuuacgucgugcaacuaccacuguacggaguuauugacacccccugcuggaagcuccauacuuccccucuguguacaaccaacacgaaagaaggcucaaauaucugccuuaccaggacagaucggggcugguauugugacaacgccgggagugugagcuuuuucccacaggcagagacuugcaagguccaguccaaucgcguguuuugugauaccaugaacucucugacauugcccagcgagguaaaccucugcaauauagacauuuucaacccuaaauacgauuguaagaucaugacuucaaagaccgacguuaguuccagcgugaucacaucucugggagcuauugucucaugcuaugguaaaaccaagugcacugccaguaauaaaaaccgaggcaucauuaagacguuuagcaaugggugugauuacguguccaacaaaggagucgacacagugucuguuggcaauaccuuauauuacgugaacaagcaagaagguaagucgcuguauguaaaaggggagccaauaaucaauuucuacgacccgcuagucuuucccagcgaugaguucgacgcguccauuucacaggugaacgaaaagaucaaucagagucucgccuucaucagaaaaucugaugaacugcuucacaacguuaaugugggaaagagcacuaccaacauuaugauaacaaccaucauuaucgucauuaucgugauauugcugcuccugaucgcaguaggccuuuuucuguacugcaaagcuaggugaggacuaguggaagcauuuuccuggcugauuaaaagaaauuacucagcuauggucaucuguuccuguuagaaggcuaugcagcauauuauauacuaugcgcauguuaugaaaugcauaauaaaaaauuuuaaaaaaucuaaaagaucuaaaaaaaaaaaaaaaaaaaaaaaaaaaaaaaaaaaaaaaaaaaaaaaaaaaaaaaaaaaaaaaaugcaucccccccccccccccccccccccccccccccaaaggcucuuuucagagccaccagaauu

SEQ ID NO: 12356 - RNA, 2006 nt, Artificial Sequence
  mRNA product Design g-1 comprising derived and/or modified sequence from HRSV(Memphis-37)__AIY60640.1__F-del (opt4)
gggagacuuucccauucuguagcagaauuugguguugccuguggucuuggucccgcggagaagcuuaccauggagcugcccauccugaagaccaacgccaucaccaccauccuggccgccgugacccugugcuucgccagcagccagaacaucaccgaggaguucuaccagagcaccugcagcgccgugagcaagggcuaccugagcgcccugagaaccggcugguacaccagcgugaucaccaucgagcugagcaacaucaaggagaacaagugcaacggcaccgacgccaaggugaagcugaucaagcaggagcuggacaaguacaagaacgccgugaccgagcugcagcugcugaugcagagcacccccgccgccaacaacagagccagaagagagcugcccagauucaugaacuacacccugaacaacaccaagaacaacaacgugacccugagcaagaagagaaagagaagauuccugggcuuccugcugggcgugggcagcgccaucgccagcggcaucgccgugagcaaggugcugcaccuggagggcgaggugaacaagaucaagaacgcccugcugagcaccaacaaggccguggugagccugagcaacggcgugagcgugcugaccagcaaggugcuggaccugaagaacuacaucgacaagcagcugcugcccaucgugaacaagcagagcugcagcaucagcaacaucgagaccgugaucgaguuccagcagaagaacaacagacugcuggagaucaccagagaguucagcgugaacgccggcgugaccacccccgugagcaccuacaugcugaccaacagcgagcugcugagccugaucaacgacaugcccaucaccaacgaccagaagaagcugaugagcaacaacgugcagaucgugagacagcagagcuacagcaucaugagcaucaucaaggaggaggugcuggccuacguggugcagcugccccuguacggcgugaucgacacccccugcuggaagcugcacaccagcccccugugcaccaccaacaccaaggagggcagcaacaucugccugaccagaaccgacagaggcugguacugcgacaacgccggcagcgugagcuucuucccccaggccgagaccugcaaggugcagagcaacagaguguucugcgacaccaugaacagccugacccugcccagcgaggugaaccugugcaacaucgacaucuucaaccccaaguacgacugcaagaucaugaccagcaagaccgacgugagcagcagcgugaucaccagccugggcgccaucgugagcugcuacggcaagaccaagugcaccgccagcaacaagaacagaggcaucaucaagaccuucagcaacggcugcgacuacgugagcaacaagggcguggacaccgugagcgugggcaacacccuguacuacgugaacaagcaggagggcaagagccuguacgugaagggcgagcccaucaucaacuucuacgacccccugguguuccccagcgacgaguucgacgccagcaucagccaggugaacgagaagaucaaccagagccuggccuucaucagaaagagcgacgagcugcugcacaacgugaacgugggcaagagcaccaccaacaucaugaucaccaccaucaucaucgugaucaucgugauccugcugcugcugaucgccgugggccuguuccuguacugcaaggccagaugaggacuaguggaagcauuuuccuggcugauuaaaagaaauuacucagcuauggucaucuguuccuguuagaaggcuaugcagcauauuauauacuaugcgcauguuaugaaaugcauaauaaaaaauuuuaaaaaaucuaaaagaucuaaaaaaaaaaaaaaaaaaaaaaaaaaaaaaaaaaaaaaaaaaaaaaaaaaaaaaaaaaaaaaaaugcaucccccccccccccccccccccccccccccccaaaggcucuuuucagagccaccagaauu

SEQ ID NO: 12357 - RNA, 2006 nt, Artificial Sequence
  mRNA product Design g-1 comprising derived and/or modified sequence from HRSV(Memphis-37)__AIY60640.1__F-del (opt5)
gggagacuuucccauucuguagcagaauuugguguugccuguggucuuggucccgcggagaagcuuaccauggagcugcccauccucaagaccaacgccauuacaacgauccuggcugccgugacccuuugcuucgcgagcucccagaauauuacagaagaguuuuaccaaucuaccuguagcgcugucuccaaaggcuaucugucugcccucagaacagggugguacaccagcguuaucacaauugaacuguccaacaucaaggagaauaaaugcaacggaaccgacgccaaggugaaacuuaucaagcaggaacuggauaaguauaaaaaugcugugacggagcuccagcugcugaugcagucuaccccugccgcuaacaaucgggcccgcagagagcucccgcgguucaugaacuacacacugaauaacaccaagaauaacaaugucacacuuagcaaaaagcgcaaaagacgguuucugggcuuccuccugggggugggauccgcgauugccagcggcaucgcuguuucuaaggugcuucaccuggaaggggaggucaacaagauuaaaaaugcccuccuguccaccaacaaggcugugguuagccugucuaacggaguguccguccucacgagcaaagugcuggaccuuaagaauuauaucgauaaacaacugcuccccauugugaacaagcagucuuguuccaucagcaauauugaaacagucaucgaguuucagcagaaaaacaaucgccugcuugagaucaccagagaauuuuccguuaacgccggcgugacaaccccugugucuaccuacaugcugacaaauagcgagcuccugucccugauuaacgacaugcccaucacgaaugaucaaaagaagcucaugagcaacaauguccagauugugcggcagcagucuuauuccaucaugagcauuaucaaagaagagguucuggcguacgugguccaacuuccucuguacggcgugaucgacacccccugcuggaagcuccauacaucuccucuguguaccacaaacaccaaagaagggagcaauauuugccuuacgcgcacagauagaggaugguauugugacaacgccggcuccguuucuuucuucccgcaggcugagaccugcaaggugcagagcaaucgggucuuuugugauaccaugaacucccugacacuccccagcgaggugaaccugugcaauaucgacauuuucaacccuaaauacgauuguaagaucaugaccucuaagacagacgucuccagcucugugauuacgucccugggggccaucguuagcugcuauggaaaaaccaagugcacagcuuccaauaaaaaccgcggcaucauuaagaccuuuucuaaugggugugauuacgugagcaacaaaggagucgacacaguguccguuggcaauacccucuauuacgugaacaagcaagaaggcaagucucuguaugucaaaggggagcccaucauuaauuucuacgacccucuuguguuucccagcgaugaguucgacgccuccaucagccaggugaacgaaaagauuaaucagucucuggccuucaucagaaaauccgaugaacuccugcacaacguuaaugucggaaagagcacgaccaacauuaugaucacaaccaucauuaucgugauuaucgugauucugcuucuccugaucgcugucggccuguuucucuacugcaaagcgcggugaggacuaguggaagcauuuuccuggcugauuaaaagaaauuacucagcuauggucaucuguuccuguuagaaggcuaugcagcauauuauauacuaugcgcauguuaugaaaugcauaauaaaaaauuuuaaaaaaucuaaaagaucuaaaaaaaaaaaaaaaaaaaaaaaaaaaaaaaaaaaaaaaaaaaaaaaaaaaaaaaaaaaaaaaaugcaucccccccccccccccccccccccccccccccaaaggcucuuuucagagccaccagaauu

SEQ ID NO: 12358 - RNA, 2006 nt, Artificial Sequence
  mRNA product Design g-1 comprising derived and/or modified sequence from HRSV(Memphis-37)__AIY60640.1__F-del (opt6)
gggagacuuucccauucuguagcagaauuugguguugccuguggucuuggucccgcggagaagcuuaccauggaacucccaauauuaaaaacuaacgcaaucacaaccauauuagcagccgucacucuaugcuuugccuccucacaaaauauaacagaagaauuuuaccaauccacaugcucagccguuagcaaaggauaucuaucagcccuaagaacaggcugguauacuucaguaauaacaauagaacuaucaaauauaaaagaaaacaaaugcaacggaaccgacgcuaaaguaaagcucauaaaacaagaauuagacaaauacaaaaaugcaguaacagaacuacaacuccuaaugcaaucaaccccagccgccaauaacagagcuagacgagaacuaccccgauucaugaauuacacacuaaacaacacaaaaaacaacaauguaacacucucaaaaaaaagaaaacgaagauucuuagguuuucuccugggaguaggaucagcaaucgcuuccggaaucgcagucaguaaaguccuucaccuugaaggcgaaguaaacaaaauaaaaaaugcacuacuaucuacaaauaaagcaguaguaucccuauccaauggcgucucaguauuaaccucaaaaguacucgaccuuaaaaauuauauagacaaacaauuacuacccauagucaauaaacaauccuguuccauaucaaacauagaaacaguaaucgaauuucaacaaaaaaacaacagauuacuagaaauaacacgcgaauuuucagucaacgccggaguaaccacacccgucucaacauacaugcuaaccaacuccgaacuacuaucacuuaucaacgacaugccaauaacaaaugaccaaaaaaaacucaugucaaacaacguacaaauaguccgccaacaaucauacucuauaaugucuauuaucaaagaagaaguucucgcauacguaguacaacuaccacuauauggugucauagacacaccauguuggaaacuccauacaucacccuuauguacaaccaauacaaaagaaggcucaaacaucugccuaacucgaacagaccgaggaugguacugcgacaaugcaggaucugucucauucuucccucaagcagaaacauguaaaguucaaucuaauagaguuuucugcgauacaaugaacucacuaacucuaccaucagaaguaaaucucuguaauauugacauauucaacccaaaauacgauugcaagaucaugacaucaaaaacugacguaucauccucagucaucaccucauuaggagcaaucguaagcuguuacgggaaaacaaaaugcaccgcuucuaacaaaaauagaggaauaauuaaaaccuucucaaacggaugcgauuacgucuccaauaaaggaguagauacaguaagcguaggaaauacucuauacuacgucaauaaacaagaaggaaaaucacuuuaugucaaaggagaacccauaauaaauuucuacgacccauuagucuucccaucagaugaauuugacgcauccauaucccaagucaacgaaaaaaucaaucaaucacuagcauucauacgaaaaucagacgaacuacuacacaacguuaacguaggaaaaucaacaaccaacaucaugauaaccacuauaauaaucgucauaauagucauccuauuauuacuaauagccguaggccuuuuccuauacuguaaagcuagauaaggacuaguggaagcauuuuccuggcugauuaaaagaaauuacucagcuauggucaucuguuccuguuagaaggcuaugcagcauauuauauacuaugcgcauguuaugaaaugcauaauaaaaaauuuuaaaaaaucuaaaagaucuaaaaaaaaaaaaaaaaaaaaaaaaaaaaaaaaaaaaaaaaaaaaaaaaaaaaaaaaaaaaaaaaugcaucccccccccccccccccccccccccccccccaaaggcucuuuucagagccaccagaauu

SEQ ID NO: 12359 - RNA, 2006 nt, Artificial Sequence
  mRNA product Design g-1 comprising derived and/or modified sequence from HRSV(Memphis-37)__AIY60640.1__F-del (opt11)
gggagacuuucccauucuguagcagaauuugguguugccuguggucuuggucccgcggagaagcuuaccauggaacucccgauccucaaaaccaacgccaucaccacuauccucgccgccguaacccucugcuucgccucaucccaaaacaucaccgaagaauuuuaccaauccacaugcuccgccgucuccaaagguuaccucucagcccuccgcaccggcugguacaccuccguuaucaccaucgaacuuuccaacauaaaagagaacaagugcaacggcaccgacgcaaaaguaaaacuaaucaaacaagaacuagacaaauacaaaaacgccgucaccgaacuccagcuccucaugcaaucgacgcccgccgccaacaaccgagcaaggcgcgaacuuccacgcuucaugaacuacacccucaacaacacuaaaaacaacaacgugacccuauccaaaaagcguaaacgccgauuccuagguuuccuucucggugucggcuccgccauugccuccggcaucgcuguuuccaaaguccuccaccucgaaggcgaaguaaacaagauaaaaaacgcccuccucucuacaaacaaggccgugguaucgcucucuaacggcgucucuguacucaccuccaaaguccucgaccucaaaaacuacaucgacaagcaacuccucccuaucgucaauaaacaauccugcuccauuuccaacaucgaaacagugaucgaauuucaacaaaaaaacaaccgauuacuagaaaucacccgcgaauuuucagucaacgccggcgucacaacgccagucucaaccuacaugcucaccaacucagaacucuuaucacucaucaacgacaugcccaucacuaacgaccagaaaaaacugauguccaacaacgugcaaauaguccgccaacaguccuacuccaucauguccauaaucaaggaggaggugcucgccuacguaguccaacucccccucuacggagucauugacaccccuugcuggaaacuacacaccuccccucucugcaccaccaacaccaaagaaggcagcaacaucugccuaaccaggacggaccgaggaugguacugcgacaaugcaggcuccgucagcuucuucccacaagccgaaacaugcaaaguucaaucaaaccguguauucugcgacaccaugaacucacucacccuccccucagaaguaaaccuaugcaacauagauaucuucaaccccaaauacgacugcaaaauuaugaccuccaaaaccgaugucuccagcuccguuaucacgucacucggcgccaucgucuccugcuacggcaagaccaaaugcaccgccuccaacaaaaaccgcggaauaaucaaaacauucucuaacggcugcgacuacgucuccaauaaaggcgucgacaccgucuccgugggcaacacgcuguacuacgucaacaaacaagaaggcaaaucucuuuacgucaaaggugaaccaaucaucaacuucuacgacccccucguauuccccuccgacgaauuugacgcgagcaucucccaagucaacgaaaagaucaaccaaucccucgccuucauccgaaaaagcgacgaacuccuccacaacgucaacgucggcaaaaguaccacaaacauuaugaucaccaccaucaucauagucaucaucgucauccugcuccuacuaauagccgucggccucuucuuguacugcaaggcacgaugaggacuaguggaagcauuuuccuggcugauuaaaagaaauuacucagcuauggucaucuguuccuguuagaaggcuaugcagcauauuauauacuaugcgcauguuaugaaaugcauaauaaaaaauuuuaaaaaaucuaaaagaucuaaaaaaaaaaaaaaaaaaaaaaaaaaaaaaaaaaaaaaaaaaaaaaaaaaaaaaaaaaaaaaaaugcaucccccccccccccccccccccccccccccccaaaggcucuuuucagagccaccagaauu

SEQ ID NO: 12360 - RNA, 2021 nt, Artificial Sequence
  mRNA product Design g-2 comprising derived and/or modified sequence from HRSV(Memphis-37)__AIY60640.1__F-del (wt)
gggagaguccgcucagccagguugcagaagcggcuuagcguguguccuaaucuucucucugcguguagguaggccugugccgcaaacaagcuuaccauggaguugccaauccucaaaacaaaugcaauuaccacaauccuugcugcagucacacucuguuucgcuuccagucaaaacaucacugaagaauuuuaucaaucaacaugcagugcaguuagcaaaggcuaucuuagugcuuuaagaacugguugguauacuaguguuauaacuauagaauuaaguaauaucaaggaaaauaaguguaauggaacagaugcuaagguaaaauugauaaaacaagaauuagauaaauauaaaaaugcuguaacagaauugcaguugcucaugcaaagcacaccagcagccaacaaucgagccagaagagaacuaccaagguuuaugaauuauacacucaacaauaccaaaaauaacaauguaacauuaagcaagaaaaggaaaagaagauuucuuggcuuuuuguuagguguuggaucugcaaucgccaguggcauugcuguaucuaaaguccugcaccuagaaggggaagugaacaaaaucaaaaaugcucuacuauccacaaacaaggcuguagucagcuuaucaaauggaguuagugucuuaaccagcaaaguguuagaccucaaaaacuauauagauaaacaguuguuacccauugugaacaagcaaagcugcagcauaucaaacauugaaacugugauagaauuccaacaaaagaacaacagacuacuagagauuaccagggaauuuaguguuaaugcagguguaacuacaccuguaagcacuuauauguuaacaaauagugaauuauuaucauuaaucaaugauaugccuauaacaaaugaucagaaaaaguuaauguccaacaauguucaaauaguuagacagcaaaguuacucuaucauguccauaauaaaggaggaagucuuagcauauguaguucaauuaccacuauaugguguaauagauacaccuuguuggaaacuacacacauccccucuaugcacaaccaacacaaaggaaggguccaacaucuguuuaacaagaaccgacagaggaugguacugugacaaugcaggaucagugucuuucuucccacaagcugaaacaugcaaaguucaaucgaaucgaguauuuugugacacaaugaacagucuaacauuaccaagugaaguaaaucucugcaacauugacauauucaacccuaaauaugauugcaaaauuaugacuucaaaaacagaugugagcagcuccguuaucacaucucuaggagccauugugucaugcuauggcaaaacuaaauguacagcauccaauaaaaaucguggaaucauaaagacauuuucuaacgggugugauuauguaucaaauaaggggguggacacuguaucuguagguaauacauuauauuauguaaauaagcaagaaggaaaaagccucuauguaaaaggugaaccaauaauaaauuucuaugacccauuaguguucccuucugaugaauuugaugcaucaauaucucaagucaaugagaagauuaaccagagccuagcauuuauucguaaauccgaugaauuauuacauaauguaaauguugguaaauccaccacaaauaucaugauaacuacuauaauuauagugauuauaguaauauuguuauuauuaauugcaguugggcuguuccuauacugcaaggccagaugaggacuaguaauaaggaaacuguaugaaugucugugggcaggaagugaagagauccuucuguaaagguuuuuggaauuaugucugcugaauaauaaacuuuuuugaaauaauaaaucugguagaaaaaugagaucuaaaaaaaaaaaaaaaaaaaaaaaaaaaaaaaaaaaaaaaaaaaaaaaaaaaaaaaaaaaaaaaaugcaucccccccccccccccccccccccccccccccaaaggcucuuuucagagccaccagaauu

SEQ ID NO: 12361 - RNA, 2021 nt, Artificial Sequence
  mRNA product Design g-2 comprising derived and/or modified sequence from HRSV(Memphis-37)__AIY60640.1__F-del (opt1)
gggagaguccgcucagccagguugcagaagcggcuuagcguguguccuaaucuucucucugcguguagguaggccugugccgcaaacaagcuuaccauggagcugcccauccucaagaccaacgccaucaccacgauccuggccgcggugacccugugcuucgccagcucccagaacaucaccgaggaguucuaccagagcacgugcuccgccgucagcaagggcuaccucuccgcccugcgcaccgggugguacaccagcgugaucaccaucgagcuguccaacaucaaggagaacaagugcaacggcaccgacgccaaggugaagcucaucaagcaggagcuggacaaguacaagaacgcggucacggagcugcagcuccugaugcagagcaccccggccgccaacaaccgggcccgccgggagcugccccgcuucaugaacuacacccucaacaacaccaagaacaacaacgugacgcuguccaagaagcggaagcgccgguuccugggguuccuccugggcguggggagcgcgaucgccuccggcaucgccgucagcaaggugcugcaccucgagggcgaggugaacaagaucaagaacgcccugcuguccaccaacaaggccgucgugagccucuccaacggggugagcguccugaccuccaaggugcuggaccucaagaacuacaucgacaagcagcugcugcccaucgugaacaagcagagcugcuccaucagcaacaucgagaccgucaucgaguuccagcagaagaacaaccgccuccuggagaucacgcgggaguucagcgugaacgcgggcgugaccacccccgucuccaccuacaugcugacgaacagcgagcuccugucccugaucaacgacaugccgaucaccaacgaccagaagaagcucaugagcaacaacgugcagaucgugcgccagcaguccuacagcaucauguccaucaucaaggaggagguccuggccuacguggugcagcugccccucuacggggucaucgacacccccugcuggaagcugcacaccagcccccugugcacgaccaacaccaaggagggcuccaacaucugccucacccggacggaccgcgggugguacugcgacaacgccggcagcguguccuucuucccgcaggccgagaccugcaagguccagagcaaccggguguucugcgacaccaugaacucccugacccugcccagcgaggugaaccucugcaacaucgacaucuucaaccccaaguacgacugcaagaucaugacguccaagaccgacgucagcuccagcgugaucaccucccugggcgccaucgugagcugcuacgggaagaccaagugcacggcgagcaacaagaaccgcggcaucaucaagaccuucuccaacgggugcgacuacgucagcaacaagggcguggacaccguguccgucggcaacacccuguacuacgugaacaagcaggagggcaagagccucuacgugaagggggagcccaucaucaacuucuacgacccgcuggucuuccccuccgacgaguucgacgccagcaucucccaggugaacgagaagaucaaccagagccuggccuucauccggaaguccgacgagcuccugcacaacgugaacgucggcaagagcaccacgaacaucaugaucaccaccaucaucaucgugaucaucgugauccugcugcuccugaucgccgucgggcuguuccucuacugcaaggcccgcugaggacuaguaauaaggaaacuguaugaaugucugugggcaggaagugaagagauccuucuguaaagguuuuuggaauuaugucugcugaauaauaaacuuuuuugaaauaauaaaucugguagaaaaaugagaucuaaaaaaaaaaaaaaaaaaaaaaaaaaaaaaaaaaaaaaaaaaaaaaaaaaaaaaaaaaaaaaaaugcaucccccccccccccccccccccccccccccccaaaggcucuuuucagagccaccagaauu

SEQ ID NO: 12362 - RNA, 2021 nt, Artificial Sequence
  mRNA product Design g-2 comprising derived and/or modified sequence from HRSV(Memphis-37)__AIY60640.1__F-del (opt2)
gggagaguccgcucagccagguugcagaagcggcuuagcguguguccuaaucuucucucugcguguagguaggccugugccgcaaacaagcuuaccauggagcuccccauccucaagaccaacgccaucaccaccauccucgccgccgucacccucugcuucgccuccucccagaacaucaccgaggaguucuaccaguccaccugcuccgccgucuccaagggcuaccucuccgcccuccgcaccggcugguacaccuccgucaucaccaucgagcucuccaacaucaaggagaacaagugcaacggcaccgacgccaaggucaagcucaucaagcaggagcucgacaaguacaagaacgccgucaccgagcuccagcuccucaugcaguccacccccgccgccaacaaccgcgcccgccgcgagcucccccgcuucaugaacuacacccucaacaacaccaagaacaacaacgucacccucuccaagaagcgcaagcgccgcuuccucggcuuccuccucggcgucggcuccgccaucgccuccggcaucgccgucuccaagguccuccaccucgagggcgaggucaacaagaucaagaacgcccuccucuccaccaacaaggccgucgucucccucuccaacggcgucuccguccucaccuccaagguccucgaccucaagaacuacaucgacaagcagcuccuccccaucgucaacaagcaguccugcuccaucuccaacaucgagaccgucaucgaguuccagcagaagaacaaccgccuccucgagaucacccgcgaguucuccgucaacgccggcgucaccacccccgucuccaccuacaugcucaccaacuccgagcuccucucccucaucaacgacaugcccaucaccaacgaccagaagaagcucauguccaacaacguccagaucguccgccagcaguccuacuccaucauguccaucaucaaggaggagguccucgccuacgucguccagcucccccucuacggcgucaucgacacccccugcuggaagcuccacaccuccccccucugcaccaccaacaccaaggagggcuccaacaucugccucacccgcaccgaccgcggcugguacugcgacaacgccggcuccgucuccuucuucccccaggccgagaccugcaagguccaguccaaccgcgucuucugcgacaccaugaacucccucacccuccccuccgaggucaaccucugcaacaucgacaucuucaaccccaaguacgacugcaagaucaugaccuccaagaccgacgucuccuccuccgucaucaccucccucggcgccaucgucuccugcuacggcaagaccaagugcaccgccuccaacaagaaccgcggcaucaucaagaccuucuccaacggcugcgacuacgucuccaacaagggcgucgacaccgucuccgucggcaacacccucuacuacgucaacaagcaggagggcaagucccucuacgucaagggcgagcccaucaucaacuucuacgacccccucgucuuccccuccgacgaguucgacgccuccaucucccaggucaacgagaagaucaaccagucccucgccuucauccgcaaguccgacgagcuccuccacaacgucaacgucggcaaguccaccaccaacaucaugaucaccaccaucaucaucgucaucaucgucauccuccuccuccucaucgccgucggccucuuccucuacugcaaggcccgcugaggacuaguaauaaggaaacuguaugaaugucugugggcaggaagugaagagauccuucuguaaagguuuuuggaauuaugucugcugaauaauaaacuuuuuugaaauaauaaaucugguagaaaaaugagaucuaaaaaaaaaaaaaaaaaaaaaaaaaaaaaaaaaaaaaaaaaaaaaaaaaaaaaaaaaaaaaaaaugcaucccccccccccccccccccccccccccccccaaaggcucuuuucagagccaccagaauu

SEQ ID NO: 12363 - RNA, 2021 nt, Artificial Sequence
  mRNA product Design g-2 comprising derived and/or modified sequence from HRSV(Memphis-37)__AIY60640.1__F-del (opt3)
gggagaguccgcucagccagguugcagaagcggcuuagcguguguccuaaucuucucucugcguguagguaggccugugccgcaaacaagcuuaccauggagcugcccauccucaagaccaacgccauuacaacuauacuugcugcagugacgcugugcuucgccagcucccagaauaucaccgaagaguuuuaccaaucuacauguucagcggucaguaaaggcuauuugagcgcuuuaagaacugggugguacaccuccguuauuacaaucgaacugucuaacauuaaggagaauaaaugcaacggaaccgacgccaaggugaaacuaaucaagcaggaacucgauaaguauaaaaaugcaguaacugagcugcagcuucugaugcagucgaccccugccgcuaacaauagggcacggcgcgaguugccacgauucaugaacuacacacucaauaacacgaagaauaacaaugugacucugagcaaaaagcguaaaagaagguuucuggguuuccucuuaggcgucgggucagccauagcuaguggaaucgccguguccaagguucugcaccuugaaggcgaggugaacaagauuaaaaaugcguugcugucuaccaacaaggcagucgugagccuauccaacgguguaucaguucucacaaguaaagugcuggaccuuaagaauuauaucgauaaacaacuguugccgauugucaacaagcagagcuguucuaucuccaauauagaaacugugauugaguuucagcagaaaaacaaucggcuccuggagaucacccgcgaguucucagugaacgccggggucacaacccccguuagcacguacauguuaacuaauagugaacugcucucucuuauuaacgacaugccuaucacaaaugaucaaaagaagcugauguccaacaaugugcagaucguaagacagcagagcuauucgauuaugucuauaaucaaagaagagguguuggcuuacgucgugcaacuaccacuguacggaguuauugacacccccugcuggaagcuccauacuuccccucuguguacaaccaacacgaaagaaggcucaaauaucugccuuaccaggacagaucggggcugguauugugacaacgccgggagugugagcuuuuucccacaggcagagacuugcaagguccaguccaaucgcguguuuugugauaccaugaacucucugacauugcccagcgagguaaaccucugcaauauagacauuuucaacccuaaauacgauuguaagaucaugacuucaaagaccgacguuaguuccagcgugaucacaucucugggagcuauugucucaugcuaugguaaaaccaagugcacugccaguaauaaaaaccgaggcaucauuaagacguuuagcaaugggugugauuacguguccaacaaaggagucgacacagugucuguuggcaauaccuuauauuacgugaacaagcaagaagguaagucgcuguauguaaaaggggagccaauaaucaauuucuacgacccgcuagucuuucccagcgaugaguucgacgcguccauuucacaggugaacgaaaagaucaaucagagucucgccuucaucagaaaaucugaugaacugcuucacaacguuaaugugggaaagagcacuaccaacauuaugauaacaaccaucauuaucgucauuaucgugauauugcugcuccugaucgcaguaggccuuuuucuguacugcaaagcuaggugaggacuaguaauaaggaaacuguaugaaugucugugggcaggaagugaagagauccuucuguaaagguuuuuggaauuaugucugcugaauaauaaacuuuuuugaaauaauaaaucugguagaaaaaugagaucuaaaaaaaaaaaaaaaaaaaaaaaaaaaaaaaaaaaaaaaaaaaaaaaaaaaaaaaaaaaaaaaaugcaucccccccccccccccccccccccccccccccaaaggcucuuuucagagccaccagaauu

SEQ ID NO: 12364 - RNA, 2021 nt, Artificial Sequence
  mRNA product Design g-2 comprising derived and/or modified sequence from HRSV(Memphis-37)__AIY60640.1__F-del (opt4)
gggagaguccgcucagccagguugcagaagcggcuuagcguguguccuaaucuucucucugcguguagguaggccugugccgcaaacaagcuuaccauggagcugcccauccugaagaccaacgccaucaccaccauccuggccgccgugacccugugcuucgccagcagccagaacaucaccgaggaguucuaccagagcaccugcagcgccgugagcaagggcuaccugagcgcccugagaaccggcugguacaccagcgugaucaccaucgagcugagcaacaucaaggagaacaagugcaacggcaccgacgccaaggugaagcugaucaagcaggagcuggacaaguacaagaacgccgugaccgagcugcagcugcugaugcagagcacccccgccgccaacaacagagccagaagagagcugcccagauucaugaacuacacccugaacaacaccaagaacaacaacgugacccugagcaagaagagaaagagaagauuccugggcuuccugcugggcgugggcagcgccaucgccagcggcaucgccgugagcaaggugcugcaccuggagggcgaggugaacaagaucaagaacgcccugcugagcaccaacaaggccguggugagccugagcaacggcgugagcgugcugaccagcaaggugcuggaccugaagaacuacaucgacaagcagcugcugcccaucgugaacaagcagagcugcagcaucagcaacaucgagaccgugaucgaguuccagcagaagaacaacagacugcuggagaucaccagagaguucagcgugaacgccggcgugaccacccccgugagcaccuacaugcugaccaacagcgagcugcugagccugaucaacgacaugcccaucaccaacgaccagaagaagcugaugagcaacaacgugcagaucgugagacagcagagcuacagcaucaugagcaucaucaaggaggaggugcuggccuacguggugcagcugccccuguacggcgugaucgacacccccugcuggaagcugcacaccagcccccugugcaccaccaacaccaaggagggcagcaacaucugccugaccagaaccgacagaggcugguacugcgacaacgccggcagcgugagcuucuucccccaggccgagaccugcaaggugcagagcaacagaguguucugcgacaccaugaacagccugacccugcccagcgaggugaaccugugcaacaucgacaucuucaaccccaaguacgacugcaagaucaugaccagcaagaccgacgugagcagcagcgugaucaccagccugggcgccaucgugagcugcuacggcaagaccaagugcaccgccagcaacaagaacagaggcaucaucaagaccuucagcaacggcugcgacuacgugagcaacaagggcguggacaccgugagcgugggcaacacccuguacuacgugaacaagcaggagggcaagagccuguacgugaagggcgagcccaucaucaacuucuacgacccccugguguuccccagcgacgaguucgacgccagcaucagccaggugaacgagaagaucaaccagagccuggccuucaucagaaagagcgacgagcugcugcacaacgugaacgugggcaagagcaccaccaacaucaugaucaccaccaucaucaucgugaucaucgugauccugcugcugcugaucgccgugggccuguuccuguacugcaaggccagaugaggacuaguaauaaggaaacuguaugaaugucugugggcaggaagugaagagauccuucuguaaagguuuuuggaauuaugucugcugaauaauaaacuuuuuugaaauaauaaaucugguagaaaaaugagaucuaaaaaaaaaaaaaaaaaaaaaaaaaaaaaaaaaaaaaaaaaaaaaaaaaaaaaaaaaaaaaaaaugcaucccccccccccccccccccccccccccccccaaaggcucuuuucagagccaccagaauu

SEQ ID NO: 12365 - RNA, 2021 nt, Artificial Sequence
  mRNA product Design g-2 comprising derived and/or modified sequence from HRSV(Memphis-37)__AIY60640.1__F-del (opt5)
gggagaguccgcucagccagguugcagaagcggcuuagcguguguccuaaucuucucucugcguguagguaggccugugccgcaaacaagcuuaccauggagcugcccauccucaagaccaacgccauuacaacgauccuggcugccgugacccuuugcuucgcgagcucccagaauauuacagaagaguuuuaccaaucuaccuguagcgcugucuccaaaggcuaucugucugcccucagaacagggugguacaccagcguuaucacaauugaacuguccaacaucaaggagaauaaaugcaacggaaccgacgccaaggugaaacuuaucaagcaggaacuggauaaguauaaaaaugcugugacggagcuccagcugcugaugcagucuaccccugccgcuaacaaucgggcccgcagagagcucccgcgguucaugaacuacacacugaauaacaccaagaauaacaaugucacacuuagcaaaaagcgcaaaagacgguuucugggcuuccuccugggggugggauccgcgauugccagcggcaucgcuguuucuaaggugcuucaccuggaaggggaggucaacaagauuaaaaaugcccuccuguccaccaacaaggcugugguuagccugucuaacggaguguccguccucacgagcaaagugcuggaccuuaagaauuauaucgauaaacaacugcuccccauugugaacaagcagucuuguuccaucagcaauauugaaacagucaucgaguuucagcagaaaaacaaucgccugcuugagaucaccagagaauuuuccguuaacgccggcgugacaaccccugugucuaccuacaugcugacaaauagcgagcuccugucccugauuaacgacaugcccaucacgaaugaucaaaagaagcucaugagcaacaauguccagauugugcggcagcagucuuauuccaucaugagcauuaucaaagaagagguucuggcguacgugguccaacuuccucuguacggcgugaucgacacccccugcuggaagcuccauacaucuccucuguguaccacaaacaccaaagaagggagcaauauuugccuuacgcgcacagauagaggaugguauugugacaacgccggcuccguuucuuucuucccgcaggcugagaccugcaaggugcagagcaaucgggucuuuugugauaccaugaacucccugacacuccccagcgaggugaaccugugcaauaucgacauuuucaacccuaaauacgauuguaagaucaugaccucuaagacagacgucuccagcucugugauuacgucccugggggccaucguuagcugcuauggaaaaaccaagugcacagcuuccaauaaaaaccgcggcaucauuaagaccuuuucuaaugggugugauuacgugagcaacaaaggagucgacacaguguccguuggcaauacccucuauuacgugaacaagcaagaaggcaagucucuguaugucaaaggggagcccaucauuaauuucuacgacccucuuguguuucccagcgaugaguucgacgccuccaucagccaggugaacgaaaagauuaaucagucucuggccuucaucagaaaauccgaugaacuccugcacaacguuaaugucggaaagagcacgaccaacauuaugaucacaaccaucauuaucgugauuaucgugauucugcuucuccugaucgcugucggccuguuucucuacugcaaagcgcggugaggacuaguaauaaggaaacuguaugaaugucugugggcaggaagugaagagauccuucuguaaagguuuuuggaauuaugucugcugaauaauaaacuuuuuugaaauaauaaaucugguagaaaaaugagaucuaaaaaaaaaaaaaaaaaaaaaaaaaaaaaaaaaaaaaaaaaaaaaaaaaaaaaaaaaaaaaaaaugcaucccccccccccccccccccccccccccccccaaaggcucuuuucagagccaccagaauu

SEQ ID NO: 12366 - RNA, 2021 nt, Artificial Sequence
  mRNA product Design g-2 comprising derived and/or modified sequence from HRSV(Memphis-37)__AIY60640.1__F-del (opt6)
gggagaguccgcucagccagguugcagaagcggcuuagcguguguccuaaucuucucucugcguguagguaggccugugccgcaaacaagcuuaccauggaacucccaauauuaaaaacuaacgcaaucacaaccauauuagcagccgucacucuaugcuuugccuccucacaaaauauaacagaagaauuuuaccaauccacaugcucagccguuagcaaaggauaucuaucagcccuaagaacaggcugguauacuucaguaauaacaauagaacuaucaaauauaaaagaaaacaaaugcaacggaaccgacgcuaaaguaaagcucauaaaacaagaauuagacaaauacaaaaaugcaguaacagaacuacaacuccuaaugcaaucaaccccagccgccaauaacagagcuagacgagaacuaccccgauucaugaauuacacacuaaacaacacaaaaaacaacaauguaacacucucaaaaaaaagaaaacgaagauucuuagguuuucuccugggaguaggaucagcaaucgcuuccggaaucgcagucaguaaaguccuucaccuugaaggcgaaguaaacaaaauaaaaaaugcacuacuaucuacaaauaaagcaguaguaucccuauccaauggcgucucaguauuaaccucaaaaguacucgaccuuaaaaauuauauagacaaacaauuacuacccauagucaauaaacaauccuguuccauaucaaacauagaaacaguaaucgaauuucaacaaaaaaacaacagauuacuagaaauaacacgcgaauuuucagucaacgccggaguaaccacacccgucucaacauacaugcuaaccaacuccgaacuacuaucacuuaucaacgacaugccaauaacaaaugaccaaaaaaaacucaugucaaacaacguacaaauaguccgccaacaaucauacucuauaaugucuauuaucaaagaagaaguucucgcauacguaguacaacuaccacuauauggugucauagacacaccauguuggaaacuccauacaucacccuuauguacaaccaauacaaaagaaggcucaaacaucugccuaacucgaacagaccgaggaugguacugcgacaaugcaggaucugucucauucuucccucaagcagaaacauguaaaguucaaucuaauagaguuuucugcgauacaaugaacucacuaacucuaccaucagaaguaaaucucuguaauauugacauauucaacccaaaauacgauugcaagaucaugacaucaaaaacugacguaucauccucagucaucaccucauuaggagcaaucguaagcuguuacgggaaaacaaaaugcaccgcuucuaacaaaaauagaggaauaauuaaaaccuucucaaacggaugcgauuacgucuccaauaaaggaguagauacaguaagcguaggaaauacucuauacuacgucaauaaacaagaaggaaaaucacuuuaugucaaaggagaacccauaauaaauuucuacgacccauuagucuucccaucagaugaauuugacgcauccauaucccaagucaacgaaaaaaucaaucaaucacuagcauucauacgaaaaucagacgaacuacuacacaacguuaacguaggaaaaucaacaaccaacaucaugauaaccacuauaauaaucgucauaauagucauccuauuauuacuaauagccguaggccuuuuccuauacuguaaagcuagauaaggacuaguaauaaggaaacuguaugaaugucugugggcaggaagugaagagauccuucuguaaagguuuuuggaauuaugucugcugaauaauaaacuuuuuugaaauaauaaaucugguagaaaaaugagaucuaaaaaaaaaaaaaaaaaaaaaaaaaaaaaaaaaaaaaaaaaaaaaaaaaaaaaaaaaaaaaaaaugcaucccccccccccccccccccccccccccccccaaaggcucuuuucagagccaccagaauu

SEQ ID NO: 12367 - RNA, 2021 nt, Artificial Sequence
  mRNA product Design g-2 comprising derived and/or modified sequence from HRSV(Memphis-37)__AIY60640.1__F-del (opt11)
gggagaguccgcucagccagguugcagaagcggcuuagcguguguccuaaucuucucucugcguguagguaggccugugccgcaaacaagcuuaccauggaacucccgauccucaaaaccaacgccaucaccacuauccucgccgccguaacccucugcuucgccucaucccaaaacaucaccgaagaauuuuaccaauccacaugcuccgccgucuccaaagguuaccucucagcccuccgcaccggcugguacaccuccguuaucaccaucgaacuuuccaacauaaaagagaacaagugcaacggcaccgacgcaaaaguaaaacuaaucaaacaagaacuagacaaauacaaaaacgccgucaccgaacuccagcuccucaugcaaucgacgcccgccgccaacaaccgagcaaggcgcgaacuuccacgcuucaugaacuacacccucaacaacacuaaaaacaacaacgugacccuauccaaaaagcguaaacgccgauuccuagguuuccuucucggugucggcuccgccauugccuccggcaucgcuguuuccaaaguccuccaccucgaaggcgaaguaaacaagauaaaaaacgcccuccucucuacaaacaaggccgugguaucgcucucuaacggcgucucuguacucaccuccaaaguccucgaccucaaaaacuacaucgacaagcaacuccucccuaucgucaauaaacaauccugcuccauuuccaacaucgaaacagugaucgaauuucaacaaaaaaacaaccgauuacuagaaaucacccgcgaauuuucagucaacgccggcgucacaacgccagucucaaccuacaugcucaccaacucagaacucuuaucacucaucaacgacaugcccaucacuaacgaccagaaaaaacugauguccaacaacgugcaaauaguccgccaacaguccuacuccaucauguccauaaucaaggaggaggugcucgccuacguaguccaacucccccucuacggagucauugacaccccuugcuggaaacuacacaccuccccucucugcaccaccaacaccaaagaaggcagcaacaucugccuaaccaggacggaccgaggaugguacugcgacaaugcaggcuccgucagcuucuucccacaagccgaaacaugcaaaguucaaucaaaccguguauucugcgacaccaugaacucacucacccuccccucagaaguaaaccuaugcaacauagauaucuucaaccccaaauacgacugcaaaauuaugaccuccaaaaccgaugucuccagcuccguuaucacgucacucggcgccaucgucuccugcuacggcaagaccaaaugcaccgccuccaacaaaaaccgcggaauaaucaaaacauucucuaacggcugcgacuacgucuccaauaaaggcgucgacaccgucuccgugggcaacacgcuguacuacgucaacaaacaagaaggcaaaucucuuuacgucaaaggugaaccaaucaucaacuucuacgacccccucguauuccccuccgacgaauuugacgcgagcaucucccaagucaacgaaaagaucaaccaaucccucgccuucauccgaaaaagcgacgaacuccuccacaacgucaacgucggcaaaaguaccacaaacauuaugaucaccaccaucaucauagucaucaucgucauccugcuccuacuaauagccgucggccucuucuuguacugcaaggcacgaugaggacuaguaauaaggaaacuguaugaaugucugugggcaggaagugaagagauccuucuguaaagguuuuuggaauuaugucugcugaauaauaaacuuuuuugaaauaauaaaucugguagaaaaaugagaucuaaaaaaaaaaaaaaaaaaaaaaaaaaaaaaaaaaaaaaaaaaaaaaaaaaaaaaaaaaaaaaaaugcaucccccccccccccccccccccccccccccccaaaggcucuuuucagagccaccagaauu

SEQ ID NO: 12368 - RNA, 2253 nt, Artificial Sequence
  mRNA product Design g-3 comprising derived and/or modified sequence from HRSV(Memphis-37)__AIY60640.1__F-del (wt)
gggagaguccgcucagccagguugcagaagcggcuuagcguguguccuaaucuucucucugcguguagguaggccugugccgcaaacaagcuuaccauggaguugccaauccucaaaacaaaugcaauuaccacaauccuugcugcagucacacucuguuucgcuuccagucaaaacaucacugaagaauuuuaucaaucaacaugcagugcaguuagcaaaggcuaucuuagugcuuuaagaacugguugguauacuaguguuauaacuauagaauuaaguaauaucaaggaaaauaaguguaauggaacagaugcuaagguaaaauugauaaaacaagaauuagauaaauauaaaaaugcuguaacagaauugcaguugcucaugcaaagcacaccagcagccaacaaucgagccagaagagaacuaccaagguuuaugaauuauacacucaacaauaccaaaaauaacaauguaacauuaagcaagaaaaggaaaagaagauuucuuggcuuuuuguuagguguuggaucugcaaucgccaguggcauugcuguaucuaaaguccugcaccuagaaggggaagugaacaaaaucaaaaaugcucuacuauccacaaacaaggcuguagucagcuuaucaaauggaguuagugucuuaaccagcaaaguguuagaccucaaaaacuauauagauaaacaguuguuacccauugugaacaagcaaagcugcagcauaucaaacauugaaacugugauagaauuccaacaaaagaacaacagacuacuagagauuaccagggaauuuaguguuaaugcagguguaacuacaccuguaagcacuuauauguuaacaaauagugaauuauuaucauuaaucaaugauaugccuauaacaaaugaucagaaaaaguuaauguccaacaauguucaaauaguuagacagcaaaguuacucuaucauguccauaauaaaggaggaagucuuagcauauguaguucaauuaccacuauaugguguaauagauacaccuuguuggaaacuacacacauccccucuaugcacaaccaacacaaaggaaggguccaacaucuguuuaacaagaaccgacagaggaugguacugugacaaugcaggaucagugucuuucuucccacaagcugaaacaugcaaaguucaaucgaaucgaguauuuugugacacaaugaacagucuaacauuaccaagugaaguaaaucucugcaacauugacauauucaacccuaaauaugauugcaaaauuaugacuucaaaaacagaugugagcagcuccguuaucacaucucuaggagccauugugucaugcuauggcaaaacuaaauguacagcauccaauaaaaaucguggaaucauaaagacauuuucuaacgggugugauuauguaucaaauaaggggguggacacuguaucuguagguaauacauuauauuauguaaauaagcaagaaggaaaaagccucuauguaaaaggugaaccaauaauaaauuucuaugacccauuaguguucccuucugaugaauuugaugcaucaauaucucaagucaaugagaagauuaaccagagccuagcauuuauucguaaauccgaugaauuauuacauaauguaaauguugguaaauccaccacaaauaucaugauaacuacuauaauuauagugauuauaguaauauuguuauuauuaauugcaguugggcuguuccuauacugcaaggccagaugaggacuagugaagggaacacccaaauuuaauucagccuuaagcacaauuaauuaagagugaaacguaauuguacaagcaguuggucacccaccauagggcaugaucaacaccgcaaccuuuccuuuuucccccagugauucugaaaaaccccucuucccuucagcuugcuuagauguuccaaauuuaguaagcuuaaggcggccuacagaagaaaaagaaaaaaaaggccacaaaaguucccucucacuuucaguaaauaaaauaaaagcagcaacagaaauaaagaaauaaaugaaauucaaaaugaaauaaauauuguguugugcagcauuaaaaaaucaauaaaaauuaaaaaugagcaagaucuaaaaaaaaaaaaaaaaaaaaaaaaaaaaaaaaaaaaaaaaaaaaaaaaaaaaaaaaaaaaaaaaugcaucccccccccccccccccccccccccccccccaaaggcucuuuucagagccaccagaauu

SEQ ID NO: 12369 - RNA, 2253 nt, Artificial Sequence
  mRNA product Design g-3 comprising derived and/or modified sequence from HRSV(Memphis-37)__AIY60640.1__F-del (opt1)
gggagaguccgcucagccagguugcagaagcggcuuagcguguguccuaaucuucucucugcguguagguaggccugugccgcaaacaagcuuaccauggagcugcccauccucaagaccaacgccaucaccacgauccuggccgcggugacccugugcuucgccagcucccagaacaucaccgaggaguucuaccagagcacgugcuccgccgucagcaagggcuaccucuccgcccugcgcaccgggugguacaccagcgugaucaccaucgagcuguccaacaucaaggagaacaagugcaacggcaccgacgccaaggugaagcucaucaagcaggagcuggacaaguacaagaacgcggucacggagcugcagcuccugaugcagagcaccccggccgccaacaaccgggcccgccgggagcugccccgcuucaugaacuacacccucaacaacaccaagaacaacaacgugacgcuguccaagaagcggaagcgccgguuccugggguuccuccugggcguggggagcgcgaucgccuccggcaucgccgucagcaaggugcugcaccucgagggcgaggugaacaagaucaagaacgcccugcuguccaccaacaaggccgucgugagccucuccaacggggugagcguccugaccuccaaggugcuggaccucaagaacuacaucgacaagcagcugcugcccaucgugaacaagcagagcugcuccaucagcaacaucgagaccgucaucgaguuccagcagaagaacaaccgccuccuggagaucacgcgggaguucagcgugaacgcgggcgugaccacccccgucuccaccuacaugcugacgaacagcgagcuccugucccugaucaacgacaugccgaucaccaacgaccagaagaagcucaugagcaacaacgugcagaucgugcgccagcaguccuacagcaucauguccaucaucaaggaggagguccuggccuacguggugcagcugccccucuacggggucaucgacacccccugcuggaagcugcacaccagcccccugugcacgaccaacaccaaggagggcuccaacaucugccucacccggacggaccgcgggugguacugcgacaacgccggcagcguguccuucuucccgcaggccgagaccugcaagguccagagcaaccggguguucugcgacaccaugaacucccugacccugcccagcgaggugaaccucugcaacaucgacaucuucaaccccaaguacgacugcaagaucaugacguccaagaccgacgucagcuccagcgugaucaccucccugggcgccaucgugagcugcuacgggaagaccaagugcacggcgagcaacaagaaccgcggcaucaucaagaccuucuccaacgggugcgacuacgucagcaacaagggcguggacaccguguccgucggcaacacccuguacuacgugaacaagcaggagggcaagagccucuacgugaagggggagcccaucaucaacuucuacgacccgcuggucuuccccuccgacgaguucgacgccagcaucucccaggugaacgagaagaucaaccagagccuggccuucauccggaaguccgacgagcuccugcacaacgugaacgucggcaagagcaccacgaacaucaugaucaccaccaucaucaucgugaucaucgugauccugcugcuccugaucgccgucgggcuguuccucuacugcaaggcccgcugaggacuagugaagggaacacccaaauuuaauucagccuuaagcacaauuaauuaagagugaaacguaauuguacaagcaguuggucacccaccauagggcaugaucaacaccgcaaccuuuccuuuuucccccagugauucugaaaaaccccucuucccuucagcuugcuuagauguuccaaauuuaguaagcuuaaggcggccuacagaagaaaaagaaaaaaaaggccacaaaaguucccucucacuuucaguaaauaaaauaaaagcagcaacagaaauaaagaaauaaaugaaauucaaaaugaaauaaauauuguguugugcagcauuaaaaaaucaauaaaaauuaaaaaugagcaagaucuaaaaaaaaaaaaaaaaaaaaaaaaaaaaaaaaaaaaaaaaaaaaaaaaaaaaaaaaaaaaaaaaugcaucccccccccccccccccccccccccccccccaaaggcucuuuucagagccaccagaauu

SEQ ID NO: 12370 - RNA, 2253 nt, Artificial Sequence
  mRNA product Design g-3 comprising derived and/or modified sequence from HRSV(Memphis-37)__AIY60640.1__F-del (opt2)
gggagaguccgcucagccagguugcagaagcggcuuagcguguguccuaaucuucucucugcguguagguaggccugugccgcaaacaagcuuaccauggagcuccccauccucaagaccaacgccaucaccaccauccucgccgccgucacccucugcuucgccuccucccagaacaucaccgaggaguucuaccaguccaccugcuccgccgucuccaagggcuaccucuccgcccuccgcaccggcugguacaccuccgucaucaccaucgagcucuccaacaucaaggagaacaagugcaacggcaccgacgccaaggucaagcucaucaagcaggagcucgacaaguacaagaacgccgucaccgagcuccagcuccucaugcaguccacccccgccgccaacaaccgcgcccgccgcgagcucccccgcuucaugaacuacacccucaacaacaccaagaacaacaacgucacccucuccaagaagcgcaagcgccgcuuccucggcuuccuccucggcgucggcuccgccaucgccuccggcaucgccgucuccaagguccuccaccucgagggcgaggucaacaagaucaagaacgcccuccucuccaccaacaaggccgucgucucccucuccaacggcgucuccguccucaccuccaagguccucgaccucaagaacuacaucgacaagcagcuccuccccaucgucaacaagcaguccugcuccaucuccaacaucgagaccgucaucgaguuccagcagaagaacaaccgccuccucgagaucacccgcgaguucuccgucaacgccggcgucaccacccccgucuccaccuacaugcucaccaacuccgagcuccucucccucaucaacgacaugcccaucaccaacgaccagaagaagcucauguccaacaacguccagaucguccgccagcaguccuacuccaucauguccaucaucaaggaggagguccucgccuacgucguccagcucccccucuacggcgucaucgacacccccugcuggaagcuccacaccuccccccucugcaccaccaacaccaaggagggcuccaacaucugccucacccgcaccgaccgcggcugguacugcgacaacgccggcuccgucuccuucuucccccaggccgagaccugcaagguccaguccaaccgcgucuucugcgacaccaugaacucccucacccuccccuccgaggucaaccucugcaacaucgacaucuucaaccccaaguacgacugcaagaucaugaccuccaagaccgacgucuccuccuccgucaucaccucccucggcgccaucgucuccugcuacggcaagaccaagugcaccgccuccaacaagaaccgcggcaucaucaagaccuucuccaacggcugcgacuacgucuccaacaagggcgucgacaccgucuccgucggcaacacccucuacuacgucaacaagcaggagggcaagucccucuacgucaagggcgagcccaucaucaacuucuacgacccccucgucuuccccuccgacgaguucgacgccuccaucucccaggucaacgagaagaucaaccagucccucgccuucauccgcaaguccgacgagcuccuccacaacgucaacgucggcaaguccaccaccaacaucaugaucaccaccaucaucaucgucaucaucgucauccuccuccuccucaucgccgucggccucuuccucuacugcaaggcccgcugaggacuagugaagggaacacccaaauuuaauucagccuuaagcacaauuaauuaagagugaaacguaauuguacaagcaguuggucacccaccauagggcaugaucaacaccgcaaccuuuccuuuuucccccagugauucugaaaaaccccucuucccuucagcuugcuuagauguuccaaauuuaguaagcuuaaggcggccuacagaagaaaaagaaaaaaaaggccacaaaaguucccucucacuuucaguaaauaaaauaaaagcagcaacagaaauaaagaaauaaaugaaauucaaaaugaaauaaauauuguguugugcagcauuaaaaaaucaauaaaaauuaaaaaugagcaagaucuaaaaaaaaaaaaaaaaaaaaaaaaaaaaaaaaaaaaaaaaaaaaaaaaaaaaaaaaaaaaaaaaugcaucccccccccccccccccccccccccccccccaaaggcucuuuucagagccaccagaauu

SEQ ID NO: 12371 - RNA, 2253 nt, Artificial Sequence
  mRNA product Design g-3 comprising derived and/or modified sequence from HRSV(Memphis-37)__AIY60640.1__F-del (opt3)
gggagaguccgcucagccagguugcagaagcggcuuagcguguguccuaaucuucucucugcguguagguaggccugugccgcaaacaagcuuaccauggagcugcccauccucaagaccaacgccauuacaacuauacuugcugcagugacgcugugcuucgccagcucccagaauaucaccgaagaguuuuaccaaucuacauguucagcggucaguaaaggcuauuugagcgcuuuaagaacugggugguacaccuccguuauuacaaucgaacugucuaacauuaaggagaauaaaugcaacggaaccgacgccaaggugaaacuaaucaagcaggaacucgauaaguauaaaaaugcaguaacugagcugcagcuucugaugcagucgaccccugccgcuaacaauagggcacggcgcgaguugccacgauucaugaacuacacacucaauaacacgaagaauaacaaugugacucugagcaaaaagcguaaaagaagguuucuggguuuccucuuaggcgucgggucagccauagcuaguggaaucgccguguccaagguucugcaccuugaaggcgaggugaacaagauuaaaaaugcguugcugucuaccaacaaggcagucgugagccuauccaacgguguaucaguucucacaaguaaagugcuggaccuuaagaauuauaucgauaaacaacuguugccgauugucaacaagcagagcuguucuaucuccaauauagaaacugugauugaguuucagcagaaaaacaaucggcuccuggagaucacccgcgaguucucagugaacgccggggucacaacccccguuagcacguacauguuaacuaauagugaacugcucucucuuauuaacgacaugccuaucacaaaugaucaaaagaagcugauguccaacaaugugcagaucguaagacagcagagcuauucgauuaugucuauaaucaaagaagagguguuggcuuacgucgugcaacuaccacuguacggaguuauugacacccccugcuggaagcuccauacuuccccucuguguacaaccaacacgaaagaaggcucaaauaucugccuuaccaggacagaucggggcugguauugugacaacgccgggagugugagcuuuuucccacaggcagagacuugcaagguccaguccaaucgcguguuuugugauaccaugaacucucugacauugcccagcgagguaaaccucugcaauauagacauuuucaacccuaaauacgauuguaagaucaugacuucaaagaccgacguuaguuccagcgugaucacaucucugggagcuauugucucaugcuaugguaaaaccaagugcacugccaguaauaaaaaccgaggcaucauuaagacguuuagcaaugggugugauuacguguccaacaaaggagucgacacagugucuguuggcaauaccuuauauuacgugaacaagcaagaagguaagucgcuguauguaaaaggggagccaauaaucaauuucuacgacccgcuagucuuucccagcgaugaguucgacgcguccauuucacaggugaacgaaaagaucaaucagagucucgccuucaucagaaaaucugaugaacugcuucacaacguuaaugugggaaagagcacuaccaacauuaugauaacaaccaucauuaucgucauuaucgugauauugcugcuccugaucgcaguaggccuuuuucuguacugcaaagcuaggugaggacuagugaagggaacacccaaauuuaauucagccuuaagcacaauuaauuaagagugaaacguaauuguacaagcaguuggucacccaccauagggcaugaucaacaccgcaaccuuuccuuuuucccccagugauucugaaaaaccccucuucccuucagcuugcuuagauguuccaaauuuaguaagcuuaaggcggccuacagaagaaaaagaaaaaaaaggccacaaaaguucccucucacuuucaguaaauaaaauaaaagcagcaacagaaauaaagaaauaaaugaaauucaaaaugaaauaaauauuguguugugcagcauuaaaaaaucaauaaaaauuaaaaaugagcaagaucuaaaaaaaaaaaaaaaaaaaaaaaaaaaaaaaaaaaaaaaaaaaaaaaaaaaaaaaaaaaaaaaaugcaucccccccccccccccccccccccccccccccaaaggcucuuuucagagccaccagaauu

SEQ ID NO: 12372 - RNA, 2253 nt, Artificial Sequence
  mRNA product Design g-3 comprising derived and/or modified sequence from HRSV(Memphis-37)__AIY60640.1__F-del (opt4)
gggagaguccgcucagccagguugcagaagcggcuuagcguguguccuaaucuucucucugcguguagguaggccugugccgcaaacaagcuuaccauggagcugcccauccugaagaccaacgccaucaccaccauccuggccgccgugacccugugcuucgccagcagccagaacaucaccgaggaguucuaccagagcaccugcagcgccgugagcaagggcuaccugagcgcccugagaaccggcugguacaccagcgugaucaccaucgagcugagcaacaucaaggagaacaagugcaacggcaccgacgccaaggugaagcugaucaagcaggagcuggacaaguacaagaacgccgugaccgagcugcagcugcugaugcagagcacccccgccgccaacaacagagccagaagagagcugcccagauucaugaacuacacccugaacaacaccaagaacaacaacgugacccugagcaagaagagaaagagaagauuccugggcuuccugcugggcgugggcagcgccaucgccagcggcaucgccgugagcaaggugcugcaccuggagggcgaggugaacaagaucaagaacgcccugcugagcaccaacaaggccguggugagccugagcaacggcgugagcgugcugaccagcaaggugcuggaccugaagaacuacaucgacaagcagcugcugcccaucgugaacaagcagagcugcagcaucagcaacaucgagaccgugaucgaguuccagcagaagaacaacagacugcuggagaucaccagagaguucagcgugaacgccggcgugaccacccccgugagcaccuacaugcugaccaacagcgagcugcugagccugaucaacgacaugcccaucaccaacgaccagaagaagcugaugagcaacaacgugcagaucgugagacagcagagcuacagcaucaugagcaucaucaaggaggaggugcuggccuacguggugcagcugccccuguacggcgugaucgacacccccugcuggaagcugcacaccagcccccugugcaccaccaacaccaaggagggcagcaacaucugccugaccagaaccgacagaggcugguacugcgacaacgccggcagcgugagcuucuucccccaggccgagaccugcaaggugcagagcaacagaguguucugcgacaccaugaacagccugacccugcccagcgaggugaaccugugcaacaucgacaucuucaaccccaaguacgacugcaagaucaugaccagcaagaccgacgugagcagcagcgugaucaccagccugggcgccaucgugagcugcuacggcaagaccaagugcaccgccagcaacaagaacagaggcaucaucaagaccuucagcaacggcugcgacuacgugagcaacaagggcguggacaccgugagcgugggcaacacccuguacuacgugaacaagcaggagggcaagagccuguacgugaagggcgagcccaucaucaacuucuacgacccccugguguuccccagcgacgaguucgacgccagcaucagccaggugaacgagaagaucaaccagagccuggccuucaucagaaagagcgacgagcugcugcacaacgugaacgugggcaagagcaccaccaacaucaugaucaccaccaucaucaucgugaucaucgugauccugcugcugcugaucgccgugggccuguuccuguacugcaaggccagaugaggacuagugaagggaacacccaaauuuaauucagccuuaagcacaauuaauuaagagugaaacguaauuguacaagcaguuggucacccaccauagggcaugaucaacaccgcaaccuuuccuuuuucccccagugauucugaaaaaccccucuucccuucagcuugcuuagauguuccaaauuuaguaagcuuaaggcggccuacagaagaaaaagaaaaaaaaggccacaaaaguucccucucacuuucaguaaauaaaauaaaagcagcaacagaaauaaagaaauaaaugaaauucaaaaugaaauaaauauuguguugugcagcauuaaaaaaucaauaaaaauuaaaaaugagcaagaucuaaaaaaaaaaaaaaaaaaaaaaaaaaaaaaaaaaaaaaaaaaaaaaaaaaaaaaaaaaaaaaaaugcaucccccccccccccccccccccccccccccccaaaggcucuuuucagagccaccagaauu

SEQ ID NO: 12373 - RNA, 2253 nt, Artificial Sequence
  mRNA product Design g-3 comprising derived and/or modified sequence from HRSV(Memphis-37)__AIY60640.1__F-del (opt5)
gggagaguccgcucagccagguugcagaagcggcuuagcguguguccuaaucuucucucugcguguagguaggccugugccgcaaacaagcuuaccauggagcugcccauccucaagaccaacgccauuacaacgauccuggcugccgugacccuuugcuucgcgagcucccagaauauuacagaagaguuuuaccaaucuaccuguagcgcugucuccaaaggcuaucugucugcccucagaacagggugguacaccagcguuaucacaauugaacuguccaacaucaaggagaauaaaugcaacggaaccgacgccaaggugaaacuuaucaagcaggaacuggauaaguauaaaaaugcugugacggagcuccagcugcugaugcagucuaccccugccgcuaacaaucgggcccgcagagagcucccgcgguucaugaacuacacacugaauaacaccaagaauaacaaugucacacuuagcaaaaagcgcaaaagacgguuucugggcuuccuccugggggugggauccgcgauugccagcggcaucgcuguuucuaaggugcuucaccuggaaggggaggucaacaagauuaaaaaugcccuccuguccaccaacaaggcugugguuagccugucuaacggaguguccguccucacgagcaaagugcuggaccuuaagaauuauaucgauaaacaacugcuccccauugugaacaagcagucuuguuccaucagcaauauugaaacagucaucgaguuucagcagaaaaacaaucgccugcuugagaucaccagagaauuuuccguuaacgccggcgugacaaccccugugucuaccuacaugcugacaaauagcgagcuccugucccugauuaacgacaugcccaucacgaaugaucaaaagaagcucaugagcaacaauguccagauugugcggcagcagucuuauuccaucaugagcauuaucaaagaagagguucuggcguacgugguccaacuuccucuguacggcgugaucgacacccccugcuggaagcuccauacaucuccucuguguaccacaaacaccaaagaagggagcaauauuugccuuacgcgcacagauagaggaugguauugugacaacgccggcuccguuucuuucuucccgcaggcugagaccugcaaggugcagagcaaucgggucuuuugugauaccaugaacucccugacacuccccagcgaggugaaccugugcaauaucgacauuuucaacccuaaauacgauuguaagaucaugaccucuaagacagacgucuccagcucugugauuacgucccugggggccaucguuagcugcuauggaaaaaccaagugcacagcuuccaauaaaaaccgcggcaucauuaagaccuuuucuaaugggugugauuacgugagcaacaaaggagucgacacaguguccguuggcaauacccucuauuacgugaacaagcaagaaggcaagucucuguaugucaaaggggagcccaucauuaauuucuacgacccucuuguguuucccagcgaugaguucgacgccuccaucagccaggugaacgaaaagauuaaucagucucuggccuucaucagaaaauccgaugaacuccugcacaacguuaaugucggaaagagcacgaccaacauuaugaucacaaccaucauuaucgugauuaucgugauucugcuucuccugaucgcugucggccuguuucucuacugcaaagcgcggugaggacuagugaagggaacacccaaauuuaauucagccuuaagcacaauuaauuaagagugaaacguaauuguacaagcaguuggucacccaccauagggcaugaucaacaccgcaaccuuuccuuuuucccccagugauucugaaaaaccccucuucccuucagcuugcuuagauguuccaaauuuaguaagcuuaaggcggccuacagaagaaaaagaaaaaaaaggccacaaaaguucccucucacuuucaguaaauaaaauaaaagcagcaacagaaauaaagaaauaaaugaaauucaaaaugaaauaaauauuguguugugcagcauuaaaaaaucaauaaaaauuaaaaaugagcaagaucuaaaaaaaaaaaaaaaaaaaaaaaaaaaaaaaaaaaaaaaaaaaaaaaaaaaaaaaaaaaaaaaaugcaucccccccccccccccccccccccccccccccaaaggcucuuuucagagccaccagaauu

SEQ ID NO: 12374 - RNA, 2253 nt, Artificial Sequence
  mRNA product Design g-3 comprising derived and/or modified sequence from HRSV(Memphis-37)__AIY60640.1__F-del (opt6)
gggagaguccgcucagccagguugcagaagcggcuuagcguguguccuaaucuucucucugcguguagguaggccugugccgcaaacaagcuuaccauggaacucccaauauuaaaaacuaacgcaaucacaaccauauuagcagccgucacucuaugcuuugccuccucacaaaauauaacagaagaauuuuaccaauccacaugcucagccguuagcaaaggauaucuaucagcccuaagaacaggcugguauacuucaguaauaacaauagaacuaucaaauauaaaagaaaacaaaugcaacggaaccgacgcuaaaguaaagcucauaaaacaagaauuagacaaauacaaaaaugcaguaacagaacuacaacuccuaaugcaaucaaccccagccgccaauaacagagcuagacgagaacuaccccgauucaugaauuacacacuaaacaacacaaaaaacaacaauguaacacucucaaaaaaaagaaaacgaagauucuuagguuuucuccugggaguaggaucagcaaucgcuuccggaaucgcagucaguaaaguccuucaccuugaaggcgaaguaaacaaaauaaaaaaugcacuacuaucuacaaauaaagcaguaguaucccuauccaauggcgucucaguauuaaccucaaaaguacucgaccuuaaaaauuauauagacaaacaauuacuacccauagucaauaaacaauccuguuccauaucaaacauagaaacaguaaucgaauuucaacaaaaaaacaacagauuacuagaaauaacacgcgaauuuucagucaacgccggaguaaccacacccgucucaacauacaugcuaaccaacuccgaacuacuaucacuuaucaacgacaugccaauaacaaaugaccaaaaaaaacucaugucaaacaacguacaaauaguccgccaacaaucauacucuauaaugucuauuaucaaagaagaaguucucgcauacguaguacaacuaccacuauauggugucauagacacaccauguuggaaacuccauacaucacccuuauguacaaccaauacaaaagaaggcucaaacaucugccuaacucgaacagaccgaggaugguacugcgacaaugcaggaucugucucauucuucccucaagcagaaacauguaaaguucaaucuaauagaguuuucugcgauacaaugaacucacuaacucuaccaucagaaguaaaucucuguaauauugacauauucaacccaaaauacgauugcaagaucaugacaucaaaaacugacguaucauccucagucaucaccucauuaggagcaaucguaagcuguuacgggaaaacaaaaugcaccgcuucuaacaaaaauagaggaauaauuaaaaccuucucaaacggaugcgauuacgucuccaauaaaggaguagauacaguaagcguaggaaauacucuauacuacgucaauaaacaagaaggaaaaucacuuuaugucaaaggagaacccauaauaaauuucuacgacccauuagucuucccaucagaugaauuugacgcauccauaucccaagucaacgaaaaaaucaaucaaucacuagcauucauacgaaaaucagacgaacuacuacacaacguuaacguaggaaaaucaacaaccaacaucaugauaaccacuauaauaaucgucauaauagucauccuauuauuacuaauagccguaggccuuuuccuauacuguaaagcuagauaaggacuagugaagggaacacccaaauuuaauucagccuuaagcacaauuaauuaagagugaaacguaauuguacaagcaguuggucacccaccauagggcaugaucaacaccgcaaccuuuccuuuuucccccagugauucugaaaaaccccucuucccuucagcuugcuuagauguuccaaauuuaguaagcuuaaggcggccuacagaagaaaaagaaaaaaaaggccacaaaaguucccucucacuuucaguaaauaaaauaaaagcagcaacagaaauaaagaaauaaaugaaauucaaaaugaaauaaauauuguguugugcagcauuaaaaaaucaauaaaaauuaaaaaugagcaagaucuaaaaaaaaaaaaaaaaaaaaaaaaaaaaaaaaaaaaaaaaaaaaaaaaaaaaaaaaaaaaaaaaugcaucccccccccccccccccccccccccccccccaaaggcucuuuucagagccaccagaauu

SEQ ID NO: 12375 - RNA, 2253 nt, Artificial Sequence
  mRNA product Design g-3 comprising derived and/or modified sequence from HRSV(Memphis-37)__AIY60640.1__F-del (opt11)
gggagaguccgcucagccagguugcagaagcggcuuagcguguguccuaaucuucucucugcguguagguaggccugugccgcaaacaagcuuaccauggaacucccgauccucaaaaccaacgccaucaccacuauccucgccgccguaacccucugcuucgccucaucccaaaacaucaccgaagaauuuuaccaauccacaugcuccgccgucuccaaagguuaccucucagcccuccgcaccggcugguacaccuccguuaucaccaucgaacuuuccaacauaaaagagaacaagugcaacggcaccgacgcaaaaguaaaacuaaucaaacaagaacuagacaaauacaaaaacgccgucaccgaacuccagcuccucaugcaaucgacgcccgccgccaacaaccgagcaaggcgcgaacuuccacgcuucaugaacuacacccucaacaacacuaaaaacaacaacgugacccuauccaaaaagcguaaacgccgauuccuagguuuccuucucggugucggcuccgccauugccuccggcaucgcuguuuccaaaguccuccaccucgaaggcgaaguaaacaagauaaaaaacgcccuccucucuacaaacaaggccgugguaucgcucucuaacggcgucucuguacucaccuccaaaguccucgaccucaaaaacuacaucgacaagcaacuccucccuaucgucaauaaacaauccugcuccauuuccaacaucgaaacagugaucgaauuucaacaaaaaaacaaccgauuacuagaaaucacccgcgaauuuucagucaacgccggcgucacaacgccagucucaaccuacaugcucaccaacucagaacucuuaucacucaucaacgacaugcccaucacuaacgaccagaaaaaacugauguccaacaacgugcaaauaguccgccaacaguccuacuccaucauguccauaaucaaggaggaggugcucgccuacguaguccaacucccccucuacggagucauugacaccccuugcuggaaacuacacaccuccccucucugcaccaccaacaccaaagaaggcagcaacaucugccuaaccaggacggaccgaggaugguacugcgacaaugcaggcuccgucagcuucuucccacaagccgaaacaugcaaaguucaaucaaaccguguauucugcgacaccaugaacucacucacccuccccucagaaguaaaccuaugcaacauagauaucuucaaccccaaauacgacugcaaaauuaugaccuccaaaaccgaugucuccagcuccguuaucacgucacucggcgccaucgucuccugcuacggcaagaccaaaugcaccgccuccaacaaaaaccgcggaauaaucaaaacauucucuaacggcugcgacuacgucuccaauaaaggcgucgacaccgucuccgugggcaacacgcuguacuacgucaacaaacaagaaggcaaaucucuuuacgucaaaggugaaccaaucaucaacuucuacgacccccucguauuccccuccgacgaauuugacgcgagcaucucccaagucaacgaaaagaucaaccaaucccucgccuucauccgaaaaagcgacgaacuccuccacaacgucaacgucggcaaaaguaccacaaacauuaugaucaccaccaucaucauagucaucaucgucauccugcuccuacuaauagccgucggccucuucuuguacugcaaggcacgaugaggacuagugaagggaacacccaaauuuaauucagccuuaagcacaauuaauuaagagugaaacguaauuguacaagcaguuggucacccaccauagggcaugaucaacaccgcaaccuuuccuuuuucccccagugauucugaaaaaccccucuucccuucagcuugcuuagauguuccaaauuuaguaagcuuaaggcggccuacagaagaaaaagaaaaaaaaggccacaaaaguucccucucacuuucaguaaauaaaauaaaagcagcaacagaaauaaagaaauaaaugaaauucaaaaugaaauaaauauuguguugugcagcauuaaaaaaucaauaaaaauuaaaaaugagcaagaucuaaaaaaaaaaaaaaaaaaaaaaaaaaaaaaaaaaaaaaaaaaaaaaaaaaaaaaaaaaaaaaaaugcaucccccccccccccccccccccccccccccccaaaggcucuuuucagagccaccagaauu

SEQ ID NO: 12376 - RNA, 2048 nt, Artificial Sequence
  mRNA product Design g-4 comprising derived and/or modified sequence from HRSV(Memphis-37)__AIY60640.1__F-del (wt)
gggagacuccugucgggcggaaguaggaggaguagaguuuaaaaacaguacucuuuuuccgguucgggacguaguugaagcaacgacaagccggauaaccgcucuugagacaggaagcuuaccauggaguugccaauccucaaaacaaaugcaauuaccacaauccuugcugcagucacacucuguuucgcuuccagucaaaacaucacugaagaauuuuaucaaucaacaugcagugcaguuagcaaaggcuaucuuagugcuuuaagaacugguugguauacuaguguuauaacuauagaauuaaguaauaucaaggaaaauaaguguaauggaacagaugcuaagguaaaauugauaaaacaagaauuagauaaauauaaaaaugcuguaacagaauugcaguugcucaugcaaagcacaccagcagccaacaaucgagccagaagagaacuaccaagguuuaugaauuauacacucaacaauaccaaaaauaacaauguaacauuaagcaagaaaaggaaaagaagauuucuuggcuuuuuguuagguguuggaucugcaaucgccaguggcauugcuguaucuaaaguccugcaccuagaaggggaagugaacaaaaucaaaaaugcucuacuauccacaaacaaggcuguagucagcuuaucaaauggaguuagugucuuaaccagcaaaguguuagaccucaaaaacuauauagauaaacaguuguuacccauugugaacaagcaaagcugcagcauaucaaacauugaaacugugauagaauuccaacaaaagaacaacagacuacuagagauuaccagggaauuuaguguuaaugcagguguaacuacaccuguaagcacuuauauguuaacaaauagugaauuauuaucauuaaucaaugauaugccuauaacaaaugaucagaaaaaguuaauguccaacaauguucaaauaguuagacagcaaaguuacucuaucauguccauaauaaaggaggaagucuuagcauauguaguucaauuaccacuauaugguguaauagauacaccuuguuggaaacuacacacauccccucuaugcacaaccaacacaaaggaaggguccaacaucuguuuaacaagaaccgacagaggaugguacugugacaaugcaggaucagugucuuucuucccacaagcugaaacaugcaaaguucaaucgaaucgaguauuuugugacacaaugaacagucuaacauuaccaagugaaguaaaucucugcaacauugacauauucaacccuaaauaugauugcaaaauuaugacuucaaaaacagaugugagcagcuccguuaucacaucucuaggagccauugugucaugcuauggcaaaacuaaauguacagcauccaauaaaaaucguggaaucauaaagacauuuucuaacgggugugauuauguaucaaauaaggggguggacacuguaucuguagguaauacauuauauuauguaaauaagcaagaaggaaaaagccucuauguaaaaggugaaccaauaauaaauuucuaugacccauuaguguucccuucugaugaauuugaugcaucaauaucucaagucaaugagaagauuaaccagagccuagcauuuauucguaaauccgaugaauuauuacauaauguaaauguugguaaauccaccacaaauaucaugauaacuacuauaauuauagugauuauaguaauauuguuauuauuaauugcaguugggcuguuccuauacugcaaggccagaugaggacuaguaauaaggaaacuguaugaaugucugugggcaggaagugaagagauccuucuguaaagguuuuuggaauuaugucugcugaauaauaaacuuuuuugaaauaauaaaucugguagaaaaaugagaucuaaaaaaaaaaaaaaaaaaaaaaaaaaaaaaaaaaaaaaaaaaaaaaaaaaaaaaaaaaaaaaaaugcaucccccccccccccccccccccccccccccccaaaggcucuuuucagagccaccagaauu

SEQ ID NO: 12377 - RNA, 2048 nt, Artificial Sequence
  mRNA product Design g-4 comprising derived and/or modified sequence from HRSV(Memphis-37)__AIY60640.1__F-del (opt1)
gggagacuccugucgggcggaaguaggaggaguagaguuuaaaaacaguacucuuuuuccgguucgggacguaguugaagcaacgacaagccggauaaccgcucuugagacaggaagcuuaccauggagcugcccauccucaagaccaacgccaucaccacgauccuggccgcggugacccugugcuucgccagcucccagaacaucaccgaggaguucuaccagagcacgugcuccgccgucagcaagggcuaccucuccgcccugcgcaccgggugguacaccagcgugaucaccaucgagcuguccaacaucaaggagaacaagugcaacggcaccgacgccaaggugaagcucaucaagcaggagcuggacaaguacaagaacgcggucacggagcugcagcuccugaugcagagcaccccggccgccaacaaccgggcccgccgggagcugccccgcuucaugaacuacacccucaacaacaccaagaacaacaacgugacgcuguccaagaagcggaagcgccgguuccugggguuccuccugggcguggggagcgcgaucgccuccggcaucgccgucagcaaggugcugcaccucgagggcgaggugaacaagaucaagaacgcccugcuguccaccaacaaggccgucgugagccucuccaacggggugagcguccugaccuccaaggugcuggaccucaagaacuacaucgacaagcagcugcugcccaucgugaacaagcagagcugcuccaucagcaacaucgagaccgucaucgaguuccagcagaagaacaaccgccuccuggagaucacgcgggaguucagcgugaacgcgggcgugaccacccccgucuccaccuacaugcugacgaacagcgagcuccugucccugaucaacgacaugccgaucaccaacgaccagaagaagcucaugagcaacaacgugcagaucgugcgccagcaguccuacagcaucauguccaucaucaaggaggagguccuggccuacguggugcagcugccccucuacggggucaucgacacccccugcuggaagcugcacaccagcccccugugcacgaccaacaccaaggagggcuccaacaucugccucacccggacggaccgcgggugguacugcgacaacgccggcagcguguccuucuucccgcaggccgagaccugcaagguccagagcaaccggguguucugcgacaccaugaacucccugacccugcccagcgaggugaaccucugcaacaucgacaucuucaaccccaaguacgacugcaagaucaugacguccaagaccgacgucagcuccagcgugaucaccucccugggcgccaucgugagcugcuacgggaagaccaagugcacggcgagcaacaagaaccgcggcaucaucaagaccuucuccaacgggugcgacuacgucagcaacaagggcguggacaccguguccgucggcaacacccuguacuacgugaacaagcaggagggcaagagccucuacgugaagggggagcccaucaucaacuucuacgacccgcuggucuuccccuccgacgaguucgacgccagcaucucccaggugaacgagaagaucaaccagagccuggccuucauccggaaguccgacgagcuccugcacaacgugaacgucggcaagagcaccacgaacaucaugaucaccaccaucaucaucgugaucaucgugauccugcugcuccugaucgccgucgggcuguuccucuacugcaaggcccgcugaggacuaguaauaaggaaacuguaugaaugucugugggcaggaagugaagagauccuucuguaaagguuuuuggaauuaugucugcugaauaauaaacuuuuuugaaauaauaaaucugguagaaaaaugagaucuaaaaaaaaaaaaaaaaaaaaaaaaaaaaaaaaaaaaaaaaaaaaaaaaaaaaaaaaaaaaaaaaugcaucccccccccccccccccccccccccccccccaaaggcucuuuucagagccaccagaauu

SEQ ID NO: 12378 - RNA, 2048 nt, Artificial Sequence
  mRNA product Design g-4 comprising derived and/or modified sequence from HRSV(Memphis-37)__AIY60640.1__F-del (opt2)
gggagacuccugucgggcggaaguaggaggaguagaguuuaaaaacaguacucuuuuuccgguucgggacguaguugaagcaacgacaagccggauaaccgcucuugagacaggaagcuuaccauggagcuccccauccucaagaccaacgccaucaccaccauccucgccgccgucacccucugcuucgccuccucccagaacaucaccgaggaguucuaccaguccaccugcuccgccgucuccaagggcuaccucuccgcccuccgcaccggcugguacaccuccgucaucaccaucgagcucuccaacaucaaggagaacaagugcaacggcaccgacgccaaggucaagcucaucaagcaggagcucgacaaguacaagaacgccgucaccgagcuccagcuccucaugcaguccacccccgccgccaacaaccgcgcccgccgcgagcucccccgcuucaugaacuacacccucaacaacaccaagaacaacaacgucacccucuccaagaagcgcaagcgccgcuuccucggcuuccuccucggcgucggcuccgccaucgccuccggcaucgccgucuccaagguccuccaccucgagggcgaggucaacaagaucaagaacgcccuccucuccaccaacaaggccgucgucucccucuccaacggcgucuccguccucaccuccaagguccucgaccucaagaacuacaucgacaagcagcuccuccccaucgucaacaagcaguccugcuccaucuccaacaucgagaccgucaucgaguuccagcagaagaacaaccgccuccucgagaucacccgcgaguucuccgucaacgccggcgucaccacccccgucuccaccuacaugcucaccaacuccgagcuccucucccucaucaacgacaugcccaucaccaacgaccagaagaagcucauguccaacaacguccagaucguccgccagcaguccuacuccaucauguccaucaucaaggaggagguccucgccuacgucguccagcucccccucuacggcgucaucgacacccccugcuggaagcuccacaccuccccccucugcaccaccaacaccaaggagggcuccaacaucugccucacccgcaccgaccgcggcugguacugcgacaacgccggcuccgucuccuucuucccccaggccgagaccugcaagguccaguccaaccgcgucuucugcgacaccaugaacucccucacccuccccuccgaggucaaccucugcaacaucgacaucuucaaccccaaguacgacugcaagaucaugaccuccaagaccgacgucuccuccuccgucaucaccucccucggcgccaucgucuccugcuacggcaagaccaagugcaccgccuccaacaagaaccgcggcaucaucaagaccuucuccaacggcugcgacuacgucuccaacaagggcgucgacaccgucuccgucggcaacacccucuacuacgucaacaagcaggagggcaagucccucuacgucaagggcgagcccaucaucaacuucuacgacccccucgucuuccccuccgacgaguucgacgccuccaucucccaggucaacgagaagaucaaccagucccucgccuucauccgcaaguccgacgagcuccuccacaacgucaacgucggcaaguccaccaccaacaucaugaucaccaccaucaucaucgucaucaucgucauccuccuccuccucaucgccgucggccucuuccucuacugcaaggcccgcugaggacuaguaauaaggaaacuguaugaaugucugugggcaggaagugaagagauccuucuguaaagguuuuuggaauuaugucugcugaauaauaaacuuuuuugaaauaauaaaucugguagaaaaaugagaucuaaaaaaaaaaaaaaaaaaaaaaaaaaaaaaaaaaaaaaaaaaaaaaaaaaaaaaaaaaaaaaaaugcaucccccccccccccccccccccccccccccccaaaggcucuuuucagagccaccagaauu

SEQ ID NO: 12379 - RNA, 2048 nt, Artificial Sequence
  mRNA product Design g-4 comprising derived and/or modified sequence from HRSV(Memphis-37)__AIY60640.1__F-del (opt3)
gggagacuccugucgggcggaaguaggaggaguagaguuuaaaaacaguacucuuuuuccgguucgggacguaguugaagcaacgacaagccggauaaccgcucuugagacaggaagcuuaccauggagcugcccauccucaagaccaacgccauuacaacuauacuugcugcagugacgcugugcuucgccagcucccagaauaucaccgaagaguuuuaccaaucuacauguucagcggucaguaaaggcuauuugagcgcuuuaagaacugggugguacaccuccguuauuacaaucgaacugucuaacauuaaggagaauaaaugcaacggaaccgacgccaaggugaaacuaaucaagcaggaacucgauaaguauaaaaaugcaguaacugagcugcagcuucugaugcagucgaccccugccgcuaacaauagggcacggcgcgaguugccacgauucaugaacuacacacucaauaacacgaagaauaacaaugugacucugagcaaaaagcguaaaagaagguuucuggguuuccucuuaggcgucgggucagccauagcuaguggaaucgccguguccaagguucugcaccuugaaggcgaggugaacaagauuaaaaaugcguugcugucuaccaacaaggcagucgugagccuauccaacgguguaucaguucucacaaguaaagugcuggaccuuaagaauuauaucgauaaacaacuguugccgauugucaacaagcagagcuguucuaucuccaauauagaaacugugauugaguuucagcagaaaaacaaucggcuccuggagaucacccgcgaguucucagugaacgccggggucacaacccccguuagcacguacauguuaacuaauagugaacugcucucucuuauuaacgacaugccuaucacaaaugaucaaaagaagcugauguccaacaaugugcagaucguaagacagcagagcuauucgauuaugucuauaaucaaagaagagguguuggcuuacgucgugcaacuaccacuguacggaguuauugacacccccugcuggaagcuccauacuuccccucuguguacaaccaacacgaaagaaggcucaaauaucugccuuaccaggacagaucggggcugguauugugacaacgccgggagugugagcuuuuucccacaggcagagacuugcaagguccaguccaaucgcguguuuugugauaccaugaacucucugacauugcccagcgagguaaaccucugcaauauagacauuuucaacccuaaauacgauuguaagaucaugacuucaaagaccgacguuaguuccagcgugaucacaucucugggagcuauugucucaugcuaugguaaaaccaagugcacugccaguaauaaaaaccgaggcaucauuaagacguuuagcaaugggugugauuacguguccaacaaaggagucgacacagugucuguuggcaauaccuuauauuacgugaacaagcaagaagguaagucgcuguauguaaaaggggagccaauaaucaauuucuacgacccgcuagucuuucccagcgaugaguucgacgcguccauuucacaggugaacgaaaagaucaaucagagucucgccuucaucagaaaaucugaugaacugcuucacaacguuaaugugggaaagagcacuaccaacauuaugauaacaaccaucauuaucgucauuaucgugauauugcugcuccugaucgcaguaggccuuuuucuguacugcaaagcuaggugaggacuaguaauaaggaaacuguaugaaugucugugggcaggaagugaagagauccuucuguaaagguuuuuggaauuaugucugcugaauaauaaacuuuuuugaaauaauaaaucugguagaaaaaugagaucuaaaaaaaaaaaaaaaaaaaaaaaaaaaaaaaaaaaaaaaaaaaaaaaaaaaaaaaaaaaaaaaaugcaucccccccccccccccccccccccccccccccaaaggcucuuuucagagccaccagaauu

SEQ ID NO: 12380 - RNA, 2048 nt, Artificial Sequence
  mRNA product Design g-4 comprising derived and/or modified sequence from HRSV(Memphis-37)__AIY60640.1__F-del (opt4)
gggagacuccugucgggcggaaguaggaggaguagaguuuaaaaacaguacucuuuuuccgguucgggacguaguugaagcaacgacaagccggauaaccgcucuugagacaggaagcuuaccauggagcugcccauccugaagaccaacgccaucaccaccauccuggccgccgugacccugugcuucgccagcagccagaacaucaccgaggaguucuaccagagcaccugcagcgccgugagcaagggcuaccugagcgcccugagaaccggcugguacaccagcgugaucaccaucgagcugagcaacaucaaggagaacaagugcaacggcaccgacgccaaggugaagcugaucaagcaggagcuggacaaguacaagaacgccgugaccgagcugcagcugcugaugcagagcacccccgccgccaacaacagagccagaagagagcugcccagauucaugaacuacacccugaacaacaccaagaacaacaacgugacccugagcaagaagagaaagagaagauuccugggcuuccugcugggcgugggcagcgccaucgccagcggcaucgccgugagcaaggugcugcaccuggagggcgaggugaacaagaucaagaacgcccugcugagcaccaacaaggccguggugagccugagcaacggcgugagcgugcugaccagcaaggugcuggaccugaagaacuacaucgacaagcagcugcugcccaucgugaacaagcagagcugcagcaucagcaacaucgagaccgugaucgaguuccagcagaagaacaacagacugcuggagaucaccagagaguucagcgugaacgccggcgugaccacccccgugagcaccuacaugcugaccaacagcgagcugcugagccugaucaacgacaugcccaucaccaacgaccagaagaagcugaugagcaacaacgugcagaucgugagacagcagagcuacagcaucaugagcaucaucaaggaggaggugcuggccuacguggugcagcugccccuguacggcgugaucgacacccccugcuggaagcugcacaccagcccccugugcaccaccaacaccaaggagggcagcaacaucugccugaccagaaccgacagaggcugguacugcgacaacgccggcagcgugagcuucuucccccaggccgagaccugcaaggugcagagcaacagaguguucugcgacaccaugaacagccugacccugcccagcgaggugaaccugugcaacaucgacaucuucaaccccaaguacgacugcaagaucaugaccagcaagaccgacgugagcagcagcgugaucaccagccugggcgccaucgugagcugcuacggcaagaccaagugcaccgccagcaacaagaacagaggcaucaucaagaccuucagcaacggcugcgacuacgugagcaacaagggcguggacaccgugagcgugggcaacacccuguacuacgugaacaagcaggagggcaagagccuguacgugaagggcgagcccaucaucaacuucuacgacccccugguguuccccagcgacgaguucgacgccagcaucagccaggugaacgagaagaucaaccagagccuggccuucaucagaaagagcgacgagcugcugcacaacgugaacgugggcaagagcaccaccaacaucaugaucaccaccaucaucaucgugaucaucgugauccugcugcugcugaucgccgugggccuguuccuguacugcaaggccagaugaggacuaguaauaaggaaacuguaugaaugucugugggcaggaagugaagagauccuucuguaaagguuuuuggaauuaugucugcugaauaauaaacuuuuuugaaauaauaaaucugguagaaaaaugagaucuaaaaaaaaaaaaaaaaaaaaaaaaaaaaaaaaaaaaaaaaaaaaaaaaaaaaaaaaaaaaaaaaugcaucccccccccccccccccccccccccccccccaaaggcucuuuucagagccaccagaauu

SEQ ID NO: 12381 - RNA, 2048 nt, Artificial Sequence
  mRNA product Design g-4 comprising derived and/or modified sequence from HRSV(Memphis-37)__AIY60640.1__F-del (opt5)
gggagacuccugucgggcggaaguaggaggaguagaguuuaaaaacaguacucuuuuuccgguucgggacguaguugaagcaacgacaagccggauaaccgcucuugagacaggaagcuuaccauggagcugcccauccucaagaccaacgccauuacaacgauccuggcugccgugacccuuugcuucgcgagcucccagaauauuacagaagaguuuuaccaaucuaccuguagcgcugucuccaaaggcuaucugucugcccucagaacagggugguacaccagcguuaucacaauugaacuguccaacaucaaggagaauaaaugcaacggaaccgacgccaaggugaaacuuaucaagcaggaacuggauaaguauaaaaaugcugugacggagcuccagcugcugaugcagucuaccccugccgcuaacaaucgggcccgcagagagcucccgcgguucaugaacuacacacugaauaacaccaagaauaacaaugucacacuuagcaaaaagcgcaaaagacgguuucugggcuuccuccugggggugggauccgcgauugccagcggcaucgcuguuucuaaggugcuucaccuggaaggggaggucaacaagauuaaaaaugcccuccuguccaccaacaaggcugugguuagccugucuaacggaguguccguccucacgagcaaagugcuggaccuuaagaauuauaucgauaaacaacugcuccccauugugaacaagcagucuuguuccaucagcaauauugaaacagucaucgaguuucagcagaaaaacaaucgccugcuugagaucaccagagaauuuuccguuaacgccggcgugacaaccccugugucuaccuacaugcugacaaauagcgagcuccugucccugauuaacgacaugcccaucacgaaugaucaaaagaagcucaugagcaacaauguccagauugugcggcagcagucuuauuccaucaugagcauuaucaaagaagagguucuggcguacgugguccaacuuccucuguacggcgugaucgacacccccugcuggaagcuccauacaucuccucuguguaccacaaacaccaaagaagggagcaauauuugccuuacgcgcacagauagaggaugguauugugacaacgccggcuccguuucuuucuucccgcaggcugagaccugcaaggugcagagcaaucgggucuuuugugauaccaugaacucccugacacuccccagcgaggugaaccugugcaauaucgacauuuucaacccuaaauacgauuguaagaucaugaccucuaagacagacgucuccagcucugugauuacgucccugggggccaucguuagcugcuauggaaaaaccaagugcacagcuuccaauaaaaaccgcggcaucauuaagaccuuuucuaaugggugugauuacgugagcaacaaaggagucgacacaguguccguuggcaauacccucuauuacgugaacaagcaagaaggcaagucucuguaugucaaaggggagcccaucauuaauuucuacgacccucuuguguuucccagcgaugaguucgacgccuccaucagccaggugaacgaaaagauuaaucagucucuggccuucaucagaaaauccgaugaacuccugcacaacguuaaugucggaaagagcacgaccaacauuaugaucacaaccaucauuaucgugauuaucgugauucugcuucuccugaucgcugucggccuguuucucuacugcaaagcgcggugaggacuaguaauaaggaaacuguaugaaugucugugggcaggaagugaagagauccuucuguaaagguuuuuggaauuaugucugcugaauaauaaacuuuuuugaaauaauaaaucugguagaaaaaugagaucuaaaaaaaaaaaaaaaaaaaaaaaaaaaaaaaaaaaaaaaaaaaaaaaaaaaaaaaaaaaaaaaaugcaucccccccccccccccccccccccccccccccaaaggcucuuuucagagccaccagaauu

SEQ ID NO: 12382 - RNA, 2048 nt, Artificial Sequence
  mRNA product Design g-4 comprising derived and/or modified sequence from HRSV(Memphis-37)__AIY60640.1__F-del (opt6)
gggagacuccugucgggcggaaguaggaggaguagaguuuaaaaacaguacucuuuuuccgguucgggacguaguugaagcaacgacaagccggauaaccgcucuugagacaggaagcuuaccauggaacucccaauauuaaaaacuaacgcaaucacaaccauauuagcagccgucacucuaugcuuugccuccucacaaaauauaacagaagaauuuuaccaauccacaugcucagccguuagcaaaggauaucuaucagcccuaagaacaggcugguauacuucaguaauaacaauagaacuaucaaauauaaaagaaaacaaaugcaacggaaccgacgcuaaaguaaagcucauaaaacaagaauuagacaaauacaaaaaugcaguaacagaacuacaacuccuaaugcaaucaaccccagccgccaauaacagagcuagacgagaacuaccccgauucaugaauuacacacuaaacaacacaaaaaacaacaauguaacacucucaaaaaaaagaaaacgaagauucuuagguuuucuccugggaguaggaucagcaaucgcuuccggaaucgcagucaguaaaguccuucaccuugaaggcgaaguaaacaaaauaaaaaaugcacuacuaucuacaaauaaagcaguaguaucccuauccaauggcgucucaguauuaaccucaaaaguacucgaccuuaaaaauuauauagacaaacaauuacuacccauagucaauaaacaauccuguuccauaucaaacauagaaacaguaaucgaauuucaacaaaaaaacaacagauuacuagaaauaacacgcgaauuuucagucaacgccggaguaaccacacccgucucaacauacaugcuaaccaacuccgaacuacuaucacuuaucaacgacaugccaauaacaaaugaccaaaaaaaacucaugucaaacaacguacaaauaguccgccaacaaucauacucuauaaugucuauuaucaaagaagaaguucucgcauacguaguacaacuaccacuauauggugucauagacacaccauguuggaaacuccauacaucacccuuauguacaaccaauacaaaagaaggcucaaacaucugccuaacucgaacagaccgaggaugguacugcgacaaugcaggaucugucucauucuucccucaagcagaaacauguaaaguucaaucuaauagaguuuucugcgauacaaugaacucacuaacucuaccaucagaaguaaaucucuguaauauugacauauucaacccaaaauacgauugcaagaucaugacaucaaaaacugacguaucauccucagucaucaccucauuaggagcaaucguaagcuguuacgggaaaacaaaaugcaccgcuucuaacaaaaauagaggaauaauuaaaaccuucucaaacggaugcgauuacgucuccaauaaaggaguagauacaguaagcguaggaaauacucuauacuacgucaauaaacaagaaggaaaaucacuuuaugucaaaggagaacccauaauaaauuucuacgacccauuagucuucccaucagaugaauuugacgcauccauaucccaagucaacgaaaaaaucaaucaaucacuagcauucauacgaaaaucagacgaacuacuacacaacguuaacguaggaaaaucaacaaccaacaucaugauaaccacuauaauaaucgucauaauagucauccuauuauuacuaauagccguaggccuuuuccuauacuguaaagcuagauaaggacuaguaauaaggaaacuguaugaaugucugugggcaggaagugaagagauccuucuguaaagguuuuuggaauuaugucugcugaauaauaaacuuuuuugaaauaauaaaucugguagaaaaaugagaucuaaaaaaaaaaaaaaaaaaaaaaaaaaaaaaaaaaaaaaaaaaaaaaaaaaaaaaaaaaaaaaaaugcaucccccccccccccccccccccccccccccccaaaggcucuuuucagagccaccagaauu

SEQ ID NO: 12383 - RNA, 2048 nt, Artificial Sequence
  mRNA product Design g-4 comprising derived and/or modified sequence from HRSV(Memphis-37)__AIY60640.1__F-del (opt11)
gggagacuccugucgggcggaaguaggaggaguagaguuuaaaaacaguacucuuuuuccgguucgggacguaguugaagcaacgacaagccggauaaccgcucuugagacaggaagcuuaccauggaacucccgauccucaaaaccaacgccaucaccacuauccucgccgccguaacccucugcuucgccucaucccaaaacaucaccgaagaauuuuaccaauccacaugcuccgccgucuccaaagguuaccucucagcccuccgcaccggcugguacaccuccguuaucaccaucgaacuuuccaacauaaaagagaacaagugcaacggcaccgacgcaaaaguaaaacuaaucaaacaagaacuagacaaauacaaaaacgccgucaccgaacuccagcuccucaugcaaucgacgcccgccgccaacaaccgagcaaggcgcgaacuuccacgcuucaugaacuacacccucaacaacacuaaaaacaacaacgugacccuauccaaaaagcguaaacgccgauuccuagguuuccuucucggugucggcuccgccauugccuccggcaucgcuguuuccaaaguccuccaccucgaaggcgaaguaaacaagauaaaaaacgcccuccucucuacaaacaaggccgugguaucgcucucuaacggcgucucuguacucaccuccaaaguccucgaccucaaaaacuacaucgacaagcaacuccucccuaucgucaauaaacaauccugcuccauuuccaacaucgaaacagugaucgaauuucaacaaaaaaacaaccgauuacuagaaaucacccgcgaauuuucagucaacgccggcgucacaacgccagucucaaccuacaugcucaccaacucagaacucuuaucacucaucaacgacaugcccaucacuaacgaccagaaaaaacugauguccaacaacgugcaaauaguccgccaacaguccuacuccaucauguccauaaucaaggaggaggugcucgccuacguaguccaacucccccucuacggagucauugacaccccuugcuggaaacuacacaccuccccucucugcaccaccaacaccaaagaaggcagcaacaucugccuaaccaggacggaccgaggaugguacugcgacaaugcaggcuccgucagcuucuucccacaagccgaaacaugcaaaguucaaucaaaccguguauucugcgacaccaugaacucacucacccuccccucagaaguaaaccuaugcaacauagauaucuucaaccccaaauacgacugcaaaauuaugaccuccaaaaccgaugucuccagcuccguuaucacgucacucggcgccaucgucuccugcuacggcaagaccaaaugcaccgccuccaacaaaaaccgcggaauaaucaaaacauucucuaacggcugcgacuacgucuccaauaaaggcgucgacaccgucuccgugggcaacacgcuguacuacgucaacaaacaagaaggcaaaucucuuuacgucaaaggugaaccaaucaucaacuucuacgacccccucguauuccccuccgacgaauuugacgcgagcaucucccaagucaacgaaaagaucaaccaaucccucgccuucauccgaaaaagcgacgaacuccuccacaacgucaacgucggcaaaaguaccacaaacauuaugaucaccaccaucaucauagucaucaucgucauccugcuccuacuaauagccgucggccucuucuuguacugcaaggcacgaugaggacuaguaauaaggaaacuguaugaaugucugugggcaggaagugaagagauccuucuguaaagguuuuuggaauuaugucugcugaauaauaaacuuuuuugaaauaauaaaucugguagaaaaaugagaucuaaaaaaaaaaaaaaaaaaaaaaaaaaaaaaaaaaaaaaaaaaaaaaaaaaaaaaaaaaaaaaaaugcaucccccccccccccccccccccccccccccccaaaggcucuuuucagagccaccagaauu

SEQ ID NO: 12384 - RNA, 2024 nt, Artificial Sequence
  mRNA product Design g-5 comprising derived and/or modified sequence from HRSV(Memphis-37)__AIY60640.1__F-del (wt)
gggagacccgugacccggaaguuguacggcuacgcgacuuucccucccacaaacccucgcgcccuuccuuuccuacuugggcccggcagaaagcuuaccauggaguugccaauccucaaaacaaaugcaauuaccacaauccuugcugcagucacacucuguuucgcuuccagucaaaacaucacugaagaauuuuaucaaucaacaugcagugcaguuagcaaaggcuaucuuagugcuuuaagaacugguugguauacuaguguuauaacuauagaauuaaguaauaucaaggaaaauaaguguaauggaacagaugcuaagguaaaauugauaaaacaagaauuagauaaauauaaaaaugcuguaacagaauugcaguugcucaugcaaagcacaccagcagccaacaaucgagccagaagagaacuaccaagguuuaugaauuauacacucaacaauaccaaaaauaacaauguaacauuaagcaagaaaaggaaaagaagauuucuuggcuuuuuguuagguguuggaucugcaaucgccaguggcauugcuguaucuaaaguccugcaccuagaaggggaagugaacaaaaucaaaaaugcucuacuauccacaaacaaggcuguagucagcuuaucaaauggaguuagugucuuaaccagcaaaguguuagaccucaaaaacuauauagauaaacaguuguuacccauugugaacaagcaaagcugcagcauaucaaacauugaaacugugauagaauuccaacaaaagaacaacagacuacuagagauuaccagggaauuuaguguuaaugcagguguaacuacaccuguaagcacuuauauguuaacaaauagugaauuauuaucauuaaucaaugauaugccuauaacaaaugaucagaaaaaguuaauguccaacaauguucaaauaguuagacagcaaaguuacucuaucauguccauaauaaaggaggaagucuuagcauauguaguucaauuaccacuauaugguguaauagauacaccuuguuggaaacuacacacauccccucuaugcacaaccaacacaaaggaaggguccaacaucuguuuaacaagaaccgacagaggaugguacugugacaaugcaggaucagugucuuucuucccacaagcugaaacaugcaaaguucaaucgaaucgaguauuuugugacacaaugaacagucuaacauuaccaagugaaguaaaucucugcaacauugacauauucaacccuaaauaugauugcaaaauuaugacuucaaaaacagaugugagcagcuccguuaucacaucucuaggagccauugugucaugcuauggcaaaacuaaauguacagcauccaauaaaaaucguggaaucauaaagacauuuucuaacgggugugauuauguaucaaauaaggggguggacacuguaucuguagguaauacauuauauuauguaaauaagcaagaaggaaaaagccucuauguaaaaggugaaccaauaauaaauuucuaugacccauuaguguucccuucugaugaauuugaugcaucaauaucucaagucaaugagaagauuaaccagagccuagcauuuauucguaaauccgaugaauuauuacauaauguaaauguugguaaauccaccacaaauaucaugauaacuacuauaauuauagugauuauaguaauauuguuauuauuaauugcaguugggcuguuccuauacugcaaggccagaugaggacuaguaauaaggaaacuguaugaaugucugugggcaggaagugaagagauccuucuguaaagguuuuuggaauuaugucugcugaauaauaaacuuuuuugaaauaauaaaucugguagaaaaaugagaucuaaaaaaaaaaaaaaaaaaaaaaaaaaaaaaaaaaaaaaaaaaaaaaaaaaaaaaaaaaaaaaaaugcaucccccccccccccccccccccccccccccccaaaggcucuuuucagagccaccagaauu

SEQ ID NO: 12385 - RNA, 2024 nt, Artificial Sequence
  mRNA product Design g-5 comprising derived and/or modified sequence from HRSV(Memphis-37)__AIY60640.1__F-del (opt1)
gggagacccgugacccggaaguuguacggcuacgcgacuuucccucccacaaacccucgcgcccuuccuuuccuacuugggcccggcagaaagcuuaccauggagcugcccauccucaagaccaacgccaucaccacgauccuggccgcggugacccugugcuucgccagcucccagaacaucaccgaggaguucuaccagagcacgugcuccgccgucagcaagggcuaccucuccgcccugcgcaccgggugguacaccagcgugaucaccaucgagcuguccaacaucaaggagaacaagugcaacggcaccgacgccaaggugaagcucaucaagcaggagcuggacaaguacaagaacgcggucacggagcugcagcuccugaugcagagcaccccggccgccaacaaccgggcccgccgggagcugccccgcuucaugaacuacacccucaacaacaccaagaacaacaacgugacgcuguccaagaagcggaagcgccgguuccugggguuccuccugggcguggggagcgcgaucgccuccggcaucgccgucagcaaggugcugcaccucgagggcgaggugaacaagaucaagaacgcccugcuguccaccaacaaggccgucgugagccucuccaacggggugagcguccugaccuccaaggugcuggaccucaagaacuacaucgacaagcagcugcugcccaucgugaacaagcagagcugcuccaucagcaacaucgagaccgucaucgaguuccagcagaagaacaaccgccuccuggagaucacgcgggaguucagcgugaacgcgggcgugaccacccccgucuccaccuacaugcugacgaacagcgagcuccugucccugaucaacgacaugccgaucaccaacgaccagaagaagcucaugagcaacaacgugcagaucgugcgccagcaguccuacagcaucauguccaucaucaaggaggagguccuggccuacguggugcagcugccccucuacggggucaucgacacccccugcuggaagcugcacaccagcccccugugcacgaccaacaccaaggagggcuccaacaucugccucacccggacggaccgcgggugguacugcgacaacgccggcagcguguccuucuucccgcaggccgagaccugcaagguccagagcaaccggguguucugcgacaccaugaacucccugacccugcccagcgaggugaaccucugcaacaucgacaucuucaaccccaaguacgacugcaagaucaugacguccaagaccgacgucagcuccagcgugaucaccucccugggcgccaucgugagcugcuacgggaagaccaagugcacggcgagcaacaagaaccgcggcaucaucaagaccuucuccaacgggugcgacuacgucagcaacaagggcguggacaccguguccgucggcaacacccuguacuacgugaacaagcaggagggcaagagccucuacgugaagggggagcccaucaucaacuucuacgacccgcuggucuuccccuccgacgaguucgacgccagcaucucccaggugaacgagaagaucaaccagagccuggccuucauccggaaguccgacgagcuccugcacaacgugaacgucggcaagagcaccacgaacaucaugaucaccaccaucaucaucgugaucaucgugauccugcugcuccugaucgccgucgggcuguuccucuacugcaaggcccgcugaggacuaguaauaaggaaacuguaugaaugucugugggcaggaagugaagagauccuucuguaaagguuuuuggaauuaugucugcugaauaauaaacuuuuuugaaauaauaaaucugguagaaaaaugagaucuaaaaaaaaaaaaaaaaaaaaaaaaaaaaaaaaaaaaaaaaaaaaaaaaaaaaaaaaaaaaaaaaugcaucccccccccccccccccccccccccccccccaaaggcucuuuucagagccaccagaauu

SEQ ID NO: 12386 - RNA, 2024 nt, Artificial Sequence
  mRNA product Design g-5 comprising derived and/or modified sequence from HRSV(Memphis-37)__AIY60640.1__F-del (opt2)
gggagacccgugacccggaaguuguacggcuacgcgacuuucccucccacaaacccucgcgcccuuccuuuccuacuugggcccggcagaaagcuuaccauggagcuccccauccucaagaccaacgccaucaccaccauccucgccgccgucacccucugcuucgccuccucccagaacaucaccgaggaguucuaccaguccaccugcuccgccgucuccaagggcuaccucuccgcccuccgcaccggcugguacaccuccgucaucaccaucgagcucuccaacaucaaggagaacaagugcaacggcaccgacgccaaggucaagcucaucaagcaggagcucgacaaguacaagaacgccgucaccgagcuccagcuccucaugcaguccacccccgccgccaacaaccgcgcccgccgcgagcucccccgcuucaugaacuacacccucaacaacaccaagaacaacaacgucacccucuccaagaagcgcaagcgccgcuuccucggcuuccuccucggcgucggcuccgccaucgccuccggcaucgccgucuccaagguccuccaccucgagggcgaggucaacaagaucaagaacgcccuccucuccaccaacaaggccgucgucucccucuccaacggcgucuccguccucaccuccaagguccucgaccucaagaacuacaucgacaagcagcuccuccccaucgucaacaagcaguccugcuccaucuccaacaucgagaccgucaucgaguuccagcagaagaacaaccgccuccucgagaucacccgcgaguucuccgucaacgccggcgucaccacccccgucuccaccuacaugcucaccaacuccgagcuccucucccucaucaacgacaugcccaucaccaacgaccagaagaagcucauguccaacaacguccagaucguccgccagcaguccuacuccaucauguccaucaucaaggaggagguccucgccuacgucguccagcucccccucuacggcgucaucgacacccccugcuggaagcuccacaccuccccccucugcaccaccaacaccaaggagggcuccaacaucugccucacccgcaccgaccgcggcugguacugcgacaacgccggcuccgucuccuucuucccccaggccgagaccugcaagguccaguccaaccgcgucuucugcgacaccaugaacucccucacccuccccuccgaggucaaccucugcaacaucgacaucuucaaccccaaguacgacugcaagaucaugaccuccaagaccgacgucuccuccuccgucaucaccucccucggcgccaucgucuccugcuacggcaagaccaagugcaccgccuccaacaagaaccgcggcaucaucaagaccuucuccaacggcugcgacuacgucuccaacaagggcgucgacaccgucuccgucggcaacacccucuacuacgucaacaagcaggagggcaagucccucuacgucaagggcgagcccaucaucaacuucuacgacccccucgucuuccccuccgacgaguucgacgccuccaucucccaggucaacgagaagaucaaccagucccucgccuucauccgcaaguccgacgagcuccuccacaacgucaacgucggcaaguccaccaccaacaucaugaucaccaccaucaucaucgucaucaucgucauccuccuccuccucaucgccgucggccucuuccucuacugcaaggcccgcugaggacuaguaauaaggaaacuguaugaaugucugugggcaggaagugaagagauccuucuguaaagguuuuuggaauuaugucugcugaauaauaaacuuuuuugaaauaauaaaucugguagaaaaaugagaucuaaaaaaaaaaaaaaaaaaaaaaaaaaaaaaaaaaaaaaaaaaaaaaaaaaaaaaaaaaaaaaaaugcaucccccccccccccccccccccccccccccccaaaggcucuuuucagagccaccagaauu

SEQ ID NO: 12387 - RNA, 2024 nt, Artificial Sequence
  mRNA product Design g-5 comprising derived and/or modified sequence from HRSV(Memphis-37)__AIY60640.1__F-del (opt3)
gggagacccgugacccggaaguuguacggcuacgcgacuuucccucccacaaacccucgcgcccuuccuuuccuacuugggcccggcagaaagcuuaccauggagcugcccauccucaagaccaacgccauuacaacuauacuugcugcagugacgcugugcuucgccagcucccagaauaucaccgaagaguuuuaccaaucuacauguucagcggucaguaaaggcuauuugagcgcuuuaagaacugggugguacaccuccguuauuacaaucgaacugucuaacauuaaggagaauaaaugcaacggaaccgacgccaaggugaaacuaaucaagcaggaacucgauaaguauaaaaaugcaguaacugagcugcagcuucugaugcagucgaccccugccgcuaacaauagggcacggcgcgaguugccacgauucaugaacuacacacucaauaacacgaagaauaacaaugugacucugagcaaaaagcguaaaagaagguuucuggguuuccucuuaggcgucgggucagccauagcuaguggaaucgccguguccaagguucugcaccuugaaggcgaggugaacaagauuaaaaaugcguugcugucuaccaacaaggcagucgugagccuauccaacgguguaucaguucucacaaguaaagugcuggaccuuaagaauuauaucgauaaacaacuguugccgauugucaacaagcagagcuguucuaucuccaauauagaaacugugauugaguuucagcagaaaaacaaucggcuccuggagaucacccgcgaguucucagugaacgccggggucacaacccccguuagcacguacauguuaacuaauagugaacugcucucucuuauuaacgacaugccuaucacaaaugaucaaaagaagcugauguccaacaaugugcagaucguaagacagcagagcuauucgauuaugucuauaaucaaagaagagguguuggcuuacgucgugcaacuaccacuguacggaguuauugacacccccugcuggaagcuccauacuuccccucuguguacaaccaacacgaaagaaggcucaaauaucugccuuaccaggacagaucggggcugguauugugacaacgccgggagugugagcuuuuucccacaggcagagacuugcaagguccaguccaaucgcguguuuugugauaccaugaacucucugacauugcccagcgagguaaaccucugcaauauagacauuuucaacccuaaauacgauuguaagaucaugacuucaaagaccgacguuaguuccagcgugaucacaucucugggagcuauugucucaugcuaugguaaaaccaagugcacugccaguaauaaaaaccgaggcaucauuaagacguuuagcaaugggugugauuacguguccaacaaaggagucgacacagugucuguuggcaauaccuuauauuacgugaacaagcaagaagguaagucgcuguauguaaaaggggagccaauaaucaauuucuacgacccgcuagucuuucccagcgaugaguucgacgcguccauuucacaggugaacgaaaagaucaaucagagucucgccuucaucagaaaaucugaugaacugcuucacaacguuaaugugggaaagagcacuaccaacauuaugauaacaaccaucauuaucgucauuaucgugauauugcugcuccugaucgcaguaggccuuuuucuguacugcaaagcuaggugaggacuaguaauaaggaaacuguaugaaugucugugggcaggaagugaagagauccuucuguaaagguuuuuggaauuaugucugcugaauaauaaacuuuuuugaaauaauaaaucugguagaaaaaugagaucuaaaaaaaaaaaaaaaaaaaaaaaaaaaaaaaaaaaaaaaaaaaaaaaaaaaaaaaaaaaaaaaaugcaucccccccccccccccccccccccccccccccaaaggcucuuuucagagccaccagaauu

SEQ ID NO: 12388 - RNA, 2024 nt, Artificial Sequence
  mRNA product Design g-5 comprising derived and/or modified sequence from HRSV(Memphis-37)__AIY60640.1__F-del (opt4)
gggagacccgugacccggaaguuguacggcuacgcgacuuucccucccacaaacccucgcgcccuuccuuuccuacuugggcccggcagaaagcuuaccauggagcugcccauccugaagaccaacgccaucaccaccauccuggccgccgugacccugugcuucgccagcagccagaacaucaccgaggaguucuaccagagcaccugcagcgccgugagcaagggcuaccugagcgcccugagaaccggcugguacaccagcgugaucaccaucgagcugagcaacaucaaggagaacaagugcaacggcaccgacgccaaggugaagcugaucaagcaggagcuggacaaguacaagaacgccgugaccgagcugcagcugcugaugcagagcacccccgccgccaacaacagagccagaagagagcugcccagauucaugaacuacacccugaacaacaccaagaacaacaacgugacccugagcaagaagagaaagagaagauuccugggcuuccugcugggcgugggcagcgccaucgccagcggcaucgccgugagcaaggugcugcaccuggagggcgaggugaacaagaucaagaacgcccugcugagcaccaacaaggccguggugagccugagcaacggcgugagcgugcugaccagcaaggugcuggaccugaagaacuacaucgacaagcagcugcugcccaucgugaacaagcagagcugcagcaucagcaacaucgagaccgugaucgaguuccagcagaagaacaacagacugcuggagaucaccagagaguucagcgugaacgccggcgugaccacccccgugagcaccuacaugcugaccaacagcgagcugcugagccugaucaacgacaugcccaucaccaacgaccagaagaagcugaugagcaacaacgugcagaucgugagacagcagagcuacagcaucaugagcaucaucaaggaggaggugcuggccuacguggugcagcugccccuguacggcgugaucgacacccccugcuggaagcugcacaccagcccccugugcaccaccaacaccaaggagggcagcaacaucugccugaccagaaccgacagaggcugguacugcgacaacgccggcagcgugagcuucuucccccaggccgagaccugcaaggugcagagcaacagaguguucugcgacaccaugaacagccugacccugcccagcgaggugaaccugugcaacaucgacaucuucaaccccaaguacgacugcaagaucaugaccagcaagaccgacgugagcagcagcgugaucaccagccugggcgccaucgugagcugcuacggcaagaccaagugcaccgccagcaacaagaacagaggcaucaucaagaccuucagcaacggcugcgacuacgugagcaacaagggcguggacaccgugagcgugggcaacacccuguacuacgugaacaagcaggagggcaagagccuguacgugaagggcgagcccaucaucaacuucuacgacccccugguguuccccagcgacgaguucgacgccagcaucagccaggugaacgagaagaucaaccagagccuggccuucaucagaaagagcgacgagcugcugcacaacgugaacgugggcaagagcaccaccaacaucaugaucaccaccaucaucaucgugaucaucgugauccugcugcugcugaucgccgugggccuguuccuguacugcaaggccagaugaggacuaguaauaaggaaacuguaugaaugucugugggcaggaagugaagagauccuucuguaaagguuuuuggaauuaugucugcugaauaauaaacuuuuuugaaauaauaaaucugguagaaaaaugagaucuaaaaaaaaaaaaaaaaaaaaaaaaaaaaaaaaaaaaaaaaaaaaaaaaaaaaaaaaaaaaaaaaugcaucccccccccccccccccccccccccccccccaaaggcucuuuucagagccaccagaauu

SEQ ID NO: 12389 - RNA, 2024 nt, Artificial Sequence
  mRNA product Design g-5 comprising derived and/or modified sequence from HRSV(Memphis-37)__AIY60640.1__F-del (opt5)
gggagacccgugacccggaaguuguacggcuacgcgacuuucccucccacaaacccucgcgcccuuccuuuccuacuugggcccggcagaaagcuuaccauggagcugcccauccucaagaccaacgccauuacaacgauccuggcugccgugacccuuugcuucgcgagcucccagaauauuacagaagaguuuuaccaaucuaccuguagcgcugucuccaaaggcuaucugucugcccucagaacagggugguacaccagcguuaucacaauugaacuguccaacaucaaggagaauaaaugcaacggaaccgacgccaaggugaaacuuaucaagcaggaacuggauaaguauaaaaaugcugugacggagcuccagcugcugaugcagucuaccccugccgcuaacaaucgggcccgcagagagcucccgcgguucaugaacuacacacugaauaacaccaagaauaacaaugucacacuuagcaaaaagcgcaaaagacgguuucugggcuuccuccugggggugggauccgcgauugccagcggcaucgcuguuucuaaggugcuucaccuggaaggggaggucaacaagauuaaaaaugcccuccuguccaccaacaaggcugugguuagccugucuaacggaguguccguccucacgagcaaagugcuggaccuuaagaauuauaucgauaaacaacugcuccccauugugaacaagcagucuuguuccaucagcaauauugaaacagucaucgaguuucagcagaaaaacaaucgccugcuugagaucaccagagaauuuuccguuaacgccggcgugacaaccccugugucuaccuacaugcugacaaauagcgagcuccugucccugauuaacgacaugcccaucacgaaugaucaaaagaagcucaugagcaacaauguccagauugugcggcagcagucuuauuccaucaugagcauuaucaaagaagagguucuggcguacgugguccaacuuccucuguacggcgugaucgacacccccugcuggaagcuccauacaucuccucuguguaccacaaacaccaaagaagggagcaauauuugccuuacgcgcacagauagaggaugguauugugacaacgccggcuccguuucuuucuucccgcaggcugagaccugcaaggugcagagcaaucgggucuuuugugauaccaugaacucccugacacuccccagcgaggugaaccugugcaauaucgacauuuucaacccuaaauacgauuguaagaucaugaccucuaagacagacgucuccagcucugugauuacgucccugggggccaucguuagcugcuauggaaaaaccaagugcacagcuuccaauaaaaaccgcggcaucauuaagaccuuuucuaaugggugugauuacgugagcaacaaaggagucgacacaguguccguuggcaauacccucuauuacgugaacaagcaagaaggcaagucucuguaugucaaaggggagcccaucauuaauuucuacgacccucuuguguuucccagcgaugaguucgacgccuccaucagccaggugaacgaaaagauuaaucagucucuggccuucaucagaaaauccgaugaacuccugcacaacguuaaugucggaaagagcacgaccaacauuaugaucacaaccaucauuaucgugauuaucgugauucugcuucuccugaucgcugucggccuguuucucuacugcaaagcgcggugaggacuaguaauaaggaaacuguaugaaugucugugggcaggaagugaagagauccuucuguaaagguuuuuggaauuaugucugcugaauaauaaacuuuuuugaaauaauaaaucugguagaaaaaugagaucuaaaaaaaaaaaaaaaaaaaaaaaaaaaaaaaaaaaaaaaaaaaaaaaaaaaaaaaaaaaaaaaaugcaucccccccccccccccccccccccccccccccaaaggcucuuuucagagccaccagaauu

SEQ ID NO: 12390 - RNA, 2024 nt, Artificial Sequence
  mRNA product Design g-5 comprising derived and/or modified sequence from HRSV(Memphis-37)__AIY60640.1__F-del (opt6)
gggagacccgugacccggaaguuguacggcuacgcgacuuucccucccacaaacccucgcgcccuuccuuuccuacuugggcccggcagaaagcuuaccauggaacucccaauauuaaaaacuaacgcaaucacaaccauauuagcagccgucacucuaugcuuugccuccucacaaaauauaacagaagaauuuuaccaauccacaugcucagccguuagcaaaggauaucuaucagcccuaagaacaggcugguauacuucaguaauaacaauagaacuaucaaauauaaaagaaaacaaaugcaacggaaccgacgcuaaaguaaagcucauaaaacaagaauuagacaaauacaaaaaugcaguaacagaacuacaacuccuaaugcaaucaaccccagccgccaauaacagagcuagacgagaacuaccccgauucaugaauuacacacuaaacaacacaaaaaacaacaauguaacacucucaaaaaaaagaaaacgaagauucuuagguuuucuccugggaguaggaucagcaaucgcuuccggaaucgcagucaguaaaguccuucaccuugaaggcgaaguaaacaaaauaaaaaaugcacuacuaucuacaaauaaagcaguaguaucccuauccaauggcgucucaguauuaaccucaaaaguacucgaccuuaaaaauuauauagacaaacaauuacuacccauagucaauaaacaauccuguuccauaucaaacauagaaacaguaaucgaauuucaacaaaaaaacaacagauuacuagaaauaacacgcgaauuuucagucaacgccggaguaaccacacccgucucaacauacaugcuaaccaacuccgaacuacuaucacuuaucaacgacaugccaauaacaaaugaccaaaaaaaacucaugucaaacaacguacaaauaguccgccaacaaucauacucuauaaugucuauuaucaaagaagaaguucucgcauacguaguacaacuaccacuauauggugucauagacacaccauguuggaaacuccauacaucacccuuauguacaaccaauacaaaagaaggcucaaacaucugccuaacucgaacagaccgaggaugguacugcgacaaugcaggaucugucucauucuucccucaagcagaaacauguaaaguucaaucuaauagaguuuucugcgauacaaugaacucacuaacucuaccaucagaaguaaaucucuguaauauugacauauucaacccaaaauacgauugcaagaucaugacaucaaaaacugacguaucauccucagucaucaccucauuaggagcaaucguaagcuguuacgggaaaacaaaaugcaccgcuucuaacaaaaauagaggaauaauuaaaaccuucucaaacggaugcgauuacgucuccaauaaaggaguagauacaguaagcguaggaaauacucuauacuacgucaauaaacaagaaggaaaaucacuuuaugucaaaggagaacccauaauaaauuucuacgacccauuagucuucccaucagaugaauuugacgcauccauaucccaagucaacgaaaaaaucaaucaaucacuagcauucauacgaaaaucagacgaacuacuacacaacguuaacguaggaaaaucaacaaccaacaucaugauaaccacuauaauaaucgucauaauagucauccuauuauuacuaauagccguaggccuuuuccuauacuguaaagcuagauaaggacuaguaauaaggaaacuguaugaaugucugugggcaggaagugaagagauccuucuguaaagguuuuuggaauuaugucugcugaauaauaaacuuuuuugaaauaauaaaucugguagaaaaaugagaucuaaaaaaaaaaaaaaaaaaaaaaaaaaaaaaaaaaaaaaaaaaaaaaaaaaaaaaaaaaaaaaaaugcaucccccccccccccccccccccccccccccccaaaggcucuuuucagagccaccagaauu

SEQ ID NO: 12391 - RNA, 2024 nt, Artificial Sequence
  mRNA product Design g-5 comprising derived and/or modified sequence from HRSV(Memphis-37)__AIY60640.1__F-del (opt11)
gggagacccgugacccggaaguuguacggcuacgcgacuuucccucccacaaacccucgcgcccuuccuuuccuacuugggcccggcagaaagcuuaccauggaacucccgauccucaaaaccaacgccaucaccacuauccucgccgccguaacccucugcuucgccucaucccaaaacaucaccgaagaauuuuaccaauccacaugcuccgccgucuccaaagguuaccucucagcccuccgcaccggcugguacaccuccguuaucaccaucgaacuuuccaacauaaaagagaacaagugcaacggcaccgacgcaaaaguaaaacuaaucaaacaagaacuagacaaauacaaaaacgccgucaccgaacuccagcuccucaugcaaucgacgcccgccgccaacaaccgagcaaggcgcgaacuuccacgcuucaugaacuacacccucaacaacacuaaaaacaacaacgugacccuauccaaaaagcguaaacgccgauuccuagguuuccuucucggugucggcuccgccauugccuccggcaucgcuguuuccaaaguccuccaccucgaaggcgaaguaaacaagauaaaaaacgcccuccucucuacaaacaaggccgugguaucgcucucuaacggcgucucuguacucaccuccaaaguccucgaccucaaaaacuacaucgacaagcaacuccucccuaucgucaauaaacaauccugcuccauuuccaacaucgaaacagugaucgaauuucaacaaaaaaacaaccgauuacuagaaaucacccgcgaauuuucagucaacgccggcgucacaacgccagucucaaccuacaugcucaccaacucagaacucuuaucacucaucaacgacaugcccaucacuaacgaccagaaaaaacugauguccaacaacgugcaaauaguccgccaacaguccuacuccaucauguccauaaucaaggaggaggugcucgccuacguaguccaacucccccucuacggagucauugacaccccuugcuggaaacuacacaccuccccucucugcaccaccaacaccaaagaaggcagcaacaucugccuaaccaggacggaccgaggaugguacugcgacaaugcaggcuccgucagcuucuucccacaagccgaaacaugcaaaguucaaucaaaccguguauucugcgacaccaugaacucacucacccuccccucagaaguaaaccuaugcaacauagauaucuucaaccccaaauacgacugcaaaauuaugaccuccaaaaccgaugucuccagcuccguuaucacgucacucggcgccaucgucuccugcuacggcaagaccaaaugcaccgccuccaacaaaaaccgcggaauaaucaaaacauucucuaacggcugcgacuacgucuccaauaaaggcgucgacaccgucuccgugggcaacacgcuguacuacgucaacaaacaagaaggcaaaucucuuuacgucaaaggugaaccaaucaucaacuucuacgacccccucguauuccccuccgacgaauuugacgcgagcaucucccaagucaacgaaaagaucaaccaaucccucgccuucauccgaaaaagcgacgaacuccuccacaacgucaacgucggcaaaaguaccacaaacauuaugaucaccaccaucaucauagucaucaucgucauccugcuccuacuaauagccgucggccucuucuuguacugcaaggcacgaugaggacuaguaauaaggaaacuguaugaaugucugugggcaggaagugaagagauccuucuguaaagguuuuuggaauuaugucugcugaauaauaaacuuuuuugaaauaauaaaucugguagaaaaaugagaucuaaaaaaaaaaaaaaaaaaaaaaaaaaaaaaaaaaaaaaaaaaaaaaaaaaaaaaaaaaaaaaaaugcaucccccccccccccccccccccccccccccccaaaggcucuuuucagagccaccagaauu

SEQ ID NO: 12392 - RNA, 2040 nt, Artificial Sequence
  mRNA product Design h-1 comprising derived and/or modified sequence from HRSV(Memphis-37)__AIY60640.1__F-del (wt)
gggagacccgugacccggaaguuguacggcuacgcgacuuucccucccacaaacccucgcgcccuuccuuuccuacuugggcccggcagaaagcuuaccauggaguugccaauccucaaaacaaaugcaauuaccacaauccuugcugcagucacacucuguuucgcuuccagucaaaacaucacugaagaauuuuaucaaucaacaugcagugcaguuagcaaaggcuaucuuagugcuuuaagaacugguugguauacuaguguuauaacuauagaauuaaguaauaucaaggaaaauaaguguaauggaacagaugcuaagguaaaauugauaaaacaagaauuagauaaauauaaaaaugcuguaacagaauugcaguugcucaugcaaagcacaccagcagccaacaaucgagccagaagagaacuaccaagguuuaugaauuauacacucaacaauaccaaaaauaacaauguaacauuaagcaagaaaaggaaaagaagauuucuuggcuuuuuguuagguguuggaucugcaaucgccaguggcauugcuguaucuaaaguccugcaccuagaaggggaagugaacaaaaucaaaaaugcucuacuauccacaaacaaggcuguagucagcuuaucaaauggaguuagugucuuaaccagcaaaguguuagaccucaaaaacuauauagauaaacaguuguuacccauugugaacaagcaaagcugcagcauaucaaacauugaaacugugauagaauuccaacaaaagaacaacagacuacuagagauuaccagggaauuuaguguuaaugcagguguaacuacaccuguaagcacuuauauguuaacaaauagugaauuauuaucauuaaucaaugauaugccuauaacaaaugaucagaaaaaguuaauguccaacaauguucaaauaguuagacagcaaaguuacucuaucauguccauaauaaaggaggaagucuuagcauauguaguucaauuaccacuauaugguguaauagauacaccuuguuggaaacuacacacauccccucuaugcacaaccaacacaaaggaaggguccaacaucuguuuaacaagaaccgacagaggaugguacugugacaaugcaggaucagugucuuucuucccacaagcugaaacaugcaaaguucaaucgaaucgaguauuuugugacacaaugaacagucuaacauuaccaagugaaguaaaucucugcaacauugacauauucaacccuaaauaugauugcaaaauuaugacuucaaaaacagaugugagcagcuccguuaucacaucucuaggagccauugugucaugcuauggcaaaacuaaauguacagcauccaauaaaaaucguggaaucauaaagacauuuucuaacgggugugauuauguaucaaauaaggggguggacacuguaucuguagguaauacauuauauuauguaaauaagcaagaaggaaaaagccucuauguaaaaggugaaccaauaauaaauuucuaugacccauuaguguucccuucugaugaauuugaugcaucaauaucucaagucaaugagaagauuaaccagagccuagcauuuauucguaaauccgaugaauuauuacauaauguaaauguugguaaauccaccacaaauaucaugauaacuacuauaauuauagugauuauaguaauauuguuauuauuaauugcaguugggcuguuccuauacugcaaggccagaugaggacuaguacuggcugcaucucccuuuccucuguccuccauccuucucccaggauggugaagggggaccugguacccagugauccccaccccaggauccuaaaucaugacuuaccugcuaauaaaaacucauuggaaaagugagaagaucuaaaaaaaaaaaaaaaaaaaaaaaaaaaaaaaaaaaaaaaaaaaaaaaaaaaaaaaaaaaaaaaaugcaucccccccccccccccccccccccccccccccaaaggcucuuuucagagccaccagaauu

SEQ ID NO: 12393 - RNA, 2040 nt, Artificial Sequence
  mRNA product Design h-1 comprising derived and/or modified sequence from HRSV(Memphis-37)__AIY60640.1__F-del (opt1)
gggagacccgugacccggaaguuguacggcuacgcgacuuucccucccacaaacccucgcgcccuuccuuuccuacuugggcccggcagaaagcuuaccauggagcugcccauccucaagaccaacgccaucaccacgauccuggccgcggugacccugugcuucgccagcucccagaacaucaccgaggaguucuaccagagcacgugcuccgccgucagcaagggcuaccucuccgcccugcgcaccgggugguacaccagcgugaucaccaucgagcuguccaacaucaaggagaacaagugcaacggcaccgacgccaaggugaagcucaucaagcaggagcuggacaaguacaagaacgcggucacggagcugcagcuccugaugcagagcaccccggccgccaacaaccgggcccgccgggagcugccccgcuucaugaacuacacccucaacaacaccaagaacaacaacgugacgcuguccaagaagcggaagcgccgguuccugggguuccuccugggcguggggagcgcgaucgccuccggcaucgccgucagcaaggugcugcaccucgagggcgaggugaacaagaucaagaacgcccugcuguccaccaacaaggccgucgugagccucuccaacggggugagcguccugaccuccaaggugcuggaccucaagaacuacaucgacaagcagcugcugcccaucgugaacaagcagagcugcuccaucagcaacaucgagaccgucaucgaguuccagcagaagaacaaccgccuccuggagaucacgcgggaguucagcgugaacgcgggcgugaccacccccgucuccaccuacaugcugacgaacagcgagcuccugucccugaucaacgacaugccgaucaccaacgaccagaagaagcucaugagcaacaacgugcagaucgugcgccagcaguccuacagcaucauguccaucaucaaggaggagguccuggccuacguggugcagcugccccucuacggggucaucgacacccccugcuggaagcugcacaccagcccccugugcacgaccaacaccaaggagggcuccaacaucugccucacccggacggaccgcgggugguacugcgacaacgccggcagcguguccuucuucccgcaggccgagaccugcaagguccagagcaaccggguguucugcgacaccaugaacucccugacccugcccagcgaggugaaccucugcaacaucgacaucuucaaccccaaguacgacugcaagaucaugacguccaagaccgacgucagcuccagcgugaucaccucccugggcgccaucgugagcugcuacgggaagaccaagugcacggcgagcaacaagaaccgcggcaucaucaagaccuucuccaacgggugcgacuacgucagcaacaagggcguggacaccguguccgucggcaacacccuguacuacgugaacaagcaggagggcaagagccucuacgugaagggggagcccaucaucaacuucuacgacccgcuggucuuccccuccgacgaguucgacgccagcaucucccaggugaacgagaagaucaaccagagccuggccuucauccggaaguccgacgagcuccugcacaacgugaacgucggcaagagcaccacgaacaucaugaucaccaccaucaucaucgugaucaucgugauccugcugcuccugaucgccgucgggcuguuccucuacugcaaggcccgcugaggacuaguacuggcugcaucucccuuuccucuguccuccauccuucucccaggauggugaagggggaccugguacccagugauccccaccccaggauccuaaaucaugacuuaccugcuaauaaaaacucauuggaaaagugagaagaucuaaaaaaaaaaaaaaaaaaaaaaaaaaaaaaaaaaaaaaaaaaaaaaaaaaaaaaaaaaaaaaaaugcaucccccccccccccccccccccccccccccccaaaggcucuuuucagagccaccagaauu

SEQ ID NO: 12394 - RNA, 2040 nt, Artificial Sequence
  mRNA product Design h-1 comprising derived and/or modified sequence from HRSV(Memphis-37)__AIY60640.1__F-del (opt2)
gggagacccgugacccggaaguuguacggcuacgcgacuuucccucccacaaacccucgcgcccuuccuuuccuacuugggcccggcagaaagcuuaccauggagcuccccauccucaagaccaacgccaucaccaccauccucgccgccgucacccucugcuucgccuccucccagaacaucaccgaggaguucuaccaguccaccugcuccgccgucuccaagggcuaccucuccgcccuccgcaccggcugguacaccuccgucaucaccaucgagcucuccaacaucaaggagaacaagugcaacggcaccgacgccaaggucaagcucaucaagcaggagcucgacaaguacaagaacgccgucaccgagcuccagcuccucaugcaguccacccccgccgccaacaaccgcgcccgccgcgagcucccccgcuucaugaacuacacccucaacaacaccaagaacaacaacgucacccucuccaagaagcgcaagcgccgcuuccucggcuuccuccucggcgucggcuccgccaucgccuccggcaucgccgucuccaagguccuccaccucgagggcgaggucaacaagaucaagaacgcccuccucuccaccaacaaggccgucgucucccucuccaacggcgucuccguccucaccuccaagguccucgaccucaagaacuacaucgacaagcagcuccuccccaucgucaacaagcaguccugcuccaucuccaacaucgagaccgucaucgaguuccagcagaagaacaaccgccuccucgagaucacccgcgaguucuccgucaacgccggcgucaccacccccgucuccaccuacaugcucaccaacuccgagcuccucucccucaucaacgacaugcccaucaccaacgaccagaagaagcucauguccaacaacguccagaucguccgccagcaguccuacuccaucauguccaucaucaaggaggagguccucgccuacgucguccagcucccccucuacggcgucaucgacacccccugcuggaagcuccacaccuccccccucugcaccaccaacaccaaggagggcuccaacaucugccucacccgcaccgaccgcggcugguacugcgacaacgccggcuccgucuccuucuucccccaggccgagaccugcaagguccaguccaaccgcgucuucugcgacaccaugaacucccucacccuccccuccgaggucaaccucugcaacaucgacaucuucaaccccaaguacgacugcaagaucaugaccuccaagaccgacgucuccuccuccgucaucaccucccucggcgccaucgucuccugcuacggcaagaccaagugcaccgccuccaacaagaaccgcggcaucaucaagaccuucuccaacggcugcgacuacgucuccaacaagggcgucgacaccgucuccgucggcaacacccucuacuacgucaacaagcaggagggcaagucccucuacgucaagggcgagcccaucaucaacuucuacgacccccucgucuuccccuccgacgaguucgacgccuccaucucccaggucaacgagaagaucaaccagucccucgccuucauccgcaaguccgacgagcuccuccacaacgucaacgucggcaaguccaccaccaacaucaugaucaccaccaucaucaucgucaucaucgucauccuccuccuccucaucgccgucggccucuuccucuacugcaaggcccgcugaggacuaguacuggcugcaucucccuuuccucuguccuccauccuucucccaggauggugaagggggaccugguacccagugauccccaccccaggauccuaaaucaugacuuaccugcuaauaaaaacucauuggaaaagugagaagaucuaaaaaaaaaaaaaaaaaaaaaaaaaaaaaaaaaaaaaaaaaaaaaaaaaaaaaaaaaaaaaaaaugcaucccccccccccccccccccccccccccccccaaaggcucuuuucagagccaccagaauu

SEQ ID NO: 12395 - RNA, 2040 nt, Artificial Sequence
  mRNA product Design h-1 comprising derived and/or modified sequence from HRSV(Memphis-37)__AIY60640.1__F-del (opt3)
gggagacccgugacccggaaguuguacggcuacgcgacuuucccucccacaaacccucgcgcccuuccuuuccuacuugggcccggcagaaagcuuaccauggagcugcccauccucaagaccaacgccauuacaacuauacuugcugcagugacgcugugcuucgccagcucccagaauaucaccgaagaguuuuaccaaucuacauguucagcggucaguaaaggcuauuugagcgcuuuaagaacugggugguacaccuccguuauuacaaucgaacugucuaacauuaaggagaauaaaugcaacggaaccgacgccaaggugaaacuaaucaagcaggaacucgauaaguauaaaaaugcaguaacugagcugcagcuucugaugcagucgaccccugccgcuaacaauagggcacggcgcgaguugccacgauucaugaacuacacacucaauaacacgaagaauaacaaugugacucugagcaaaaagcguaaaagaagguuucuggguuuccucuuaggcgucgggucagccauagcuaguggaaucgccguguccaagguucugcaccuugaaggcgaggugaacaagauuaaaaaugcguugcugucuaccaacaaggcagucgugagccuauccaacgguguaucaguucucacaaguaaagugcuggaccuuaagaauuauaucgauaaacaacuguugccgauugucaacaagcagagcuguucuaucuccaauauagaaacugugauugaguuucagcagaaaaacaaucggcuccuggagaucacccgcgaguucucagugaacgccggggucacaacccccguuagcacguacauguuaacuaauagugaacugcucucucuuauuaacgacaugccuaucacaaaugaucaaaagaagcugauguccaacaaugugcagaucguaagacagcagagcuauucgauuaugucuauaaucaaagaagagguguuggcuuacgucgugcaacuaccacuguacggaguuauugacacccccugcuggaagcuccauacuuccccucuguguacaaccaacacgaaagaaggcucaaauaucugccuuaccaggacagaucggggcugguauugugacaacgccgggagugugagcuuuuucccacaggcagagacuugcaagguccaguccaaucgcguguuuugugauaccaugaacucucugacauugcccagcgagguaaaccucugcaauauagacauuuucaacccuaaauacgauuguaagaucaugacuucaaagaccgacguuaguuccagcgugaucacaucucugggagcuauugucucaugcuaugguaaaaccaagugcacugccaguaauaaaaaccgaggcaucauuaagacguuuagcaaugggugugauuacguguccaacaaaggagucgacacagugucuguuggcaauaccuuauauuacgugaacaagcaagaagguaagucgcuguauguaaaaggggagccaauaaucaauuucuacgacccgcuagucuuucccagcgaugaguucgacgcguccauuucacaggugaacgaaaagaucaaucagagucucgccuucaucagaaaaucugaugaacugcuucacaacguuaaugugggaaagagcacuaccaacauuaugauaacaaccaucauuaucgucauuaucgugauauugcugcuccugaucgcaguaggccuuuuucuguacugcaaagcuaggugaggacuaguacuggcugcaucucccuuuccucuguccuccauccuucucccaggauggugaagggggaccugguacccagugauccccaccccaggauccuaaaucaugacuuaccugcuaauaaaaacucauuggaaaagugagaagaucuaaaaaaaaaaaaaaaaaaaaaaaaaaaaaaaaaaaaaaaaaaaaaaaaaaaaaaaaaaaaaaaaugcaucccccccccccccccccccccccccccccccaaaggcucuuuucagagccaccagaauu

SEQ ID NO: 12396 - RNA, 2040 nt, Artificial Sequence
  mRNA product Design h-1 comprising derived and/or modified sequence from HRSV(Memphis-37)__AIY60640.1__F-del (opt4)
gggagacccgugacccggaaguuguacggcuacgcgacuuucccucccacaaacccucgcgcccuuccuuuccuacuugggcccggcagaaagcuuaccauggagcugcccauccugaagaccaacgccaucaccaccauccuggccgccgugacccugugcuucgccagcagccagaacaucaccgaggaguucuaccagagcaccugcagcgccgugagcaagggcuaccugagcgcccugagaaccggcugguacaccagcgugaucaccaucgagcugagcaacaucaaggagaacaagugcaacggcaccgacgccaaggugaagcugaucaagcaggagcuggacaaguacaagaacgccgugaccgagcugcagcugcugaugcagagcacccccgccgccaacaacagagccagaagagagcugcccagauucaugaacuacacccugaacaacaccaagaacaacaacgugacccugagcaagaagagaaagagaagauuccugggcuuccugcugggcgugggcagcgccaucgccagcggcaucgccgugagcaaggugcugcaccuggagggcgaggugaacaagaucaagaacgcccugcugagcaccaacaaggccguggugagccugagcaacggcgugagcgugcugaccagcaaggugcuggaccugaagaacuacaucgacaagcagcugcugcccaucgugaacaagcagagcugcagcaucagcaacaucgagaccgugaucgaguuccagcagaagaacaacagacugcuggagaucaccagagaguucagcgugaacgccggcgugaccacccccgugagcaccuacaugcugaccaacagcgagcugcugagccugaucaacgacaugcccaucaccaacgaccagaagaagcugaugagcaacaacgugcagaucgugagacagcagagcuacagcaucaugagcaucaucaaggaggaggugcuggccuacguggugcagcugccccuguacggcgugaucgacacccccugcuggaagcugcacaccagcccccugugcaccaccaacaccaaggagggcagcaacaucugccugaccagaaccgacagaggcugguacugcgacaacgccggcagcgugagcuucuucccccaggccgagaccugcaaggugcagagcaacagaguguucugcgacaccaugaacagccugacccugcccagcgaggugaaccugugcaacaucgacaucuucaaccccaaguacgacugcaagaucaugaccagcaagaccgacgugagcagcagcgugaucaccagccugggcgccaucgugagcugcuacggcaagaccaagugcaccgccagcaacaagaacagaggcaucaucaagaccuucagcaacggcugcgacuacgugagcaacaagggcguggacaccgugagcgugggcaacacccuguacuacgugaacaagcaggagggcaagagccuguacgugaagggcgagcccaucaucaacuucuacgacccccugguguuccccagcgacgaguucgacgccagcaucagccaggugaacgagaagaucaaccagagccuggccuucaucagaaagagcgacgagcugcugcacaacgugaacgugggcaagagcaccaccaacaucaugaucaccaccaucaucaucgugaucaucgugauccugcugcugcugaucgccgugggccuguuccuguacugcaaggccagaugaggacuaguacuggcugcaucucccuuuccucuguccuccauccuucucccaggauggugaagggggaccugguacccagugauccccaccccaggauccuaaaucaugacuuaccugcuaauaaaaacucauuggaaaagugagaagaucuaaaaaaaaaaaaaaaaaaaaaaaaaaaaaaaaaaaaaaaaaaaaaaaaaaaaaaaaaaaaaaaaugcaucccccccccccccccccccccccccccccccaaaggcucuuuucagagccaccagaauu

SEQ ID NO: 12397 - RNA, 2040 nt, Artificial Sequence
  mRNA product Design h-1 comprising derived and/or modified sequence from HRSV(Memphis-37)__AIY60640.1__F-del (opt5)
gggagacccgugacccggaaguuguacggcuacgcgacuuucccucccacaaacccucgcgcccuuccuuuccuacuugggcccggcagaaagcuuaccauggagcugcccauccucaagaccaacgccauuacaacgauccuggcugccgugacccuuugcuucgcgagcucccagaauauuacagaagaguuuuaccaaucuaccuguagcgcugucuccaaaggcuaucugucugcccucagaacagggugguacaccagcguuaucacaauugaacuguccaacaucaaggagaauaaaugcaacggaaccgacgccaaggugaaacuuaucaagcaggaacuggauaaguauaaaaaugcugugacggagcuccagcugcugaugcagucuaccccugccgcuaacaaucgggcccgcagagagcucccgcgguucaugaacuacacacugaauaacaccaagaauaacaaugucacacuuagcaaaaagcgcaaaagacgguuucugggcuuccuccugggggugggauccgcgauugccagcggcaucgcuguuucuaaggugcuucaccuggaaggggaggucaacaagauuaaaaaugcccuccuguccaccaacaaggcugugguuagccugucuaacggaguguccguccucacgagcaaagugcuggaccuuaagaauuauaucgauaaacaacugcuccccauugugaacaagcagucuuguuccaucagcaauauugaaacagucaucgaguuucagcagaaaaacaaucgccugcuugagaucaccagagaauuuuccguuaacgccggcgugacaaccccugugucuaccuacaugcugacaaauagcgagcuccugucccugauuaacgacaugcccaucacgaaugaucaaaagaagcucaugagcaacaauguccagauugugcggcagcagucuuauuccaucaugagcauuaucaaagaagagguucuggcguacgugguccaacuuccucuguacggcgugaucgacacccccugcuggaagcuccauacaucuccucuguguaccacaaacaccaaagaagggagcaauauuugccuuacgcgcacagauagaggaugguauugugacaacgccggcuccguuucuuucuucccgcaggcugagaccugcaaggugcagagcaaucgggucuuuugugauaccaugaacucccugacacuccccagcgaggugaaccugugcaauaucgacauuuucaacccuaaauacgauuguaagaucaugaccucuaagacagacgucuccagcucugugauuacgucccugggggccaucguuagcugcuauggaaaaaccaagugcacagcuuccaauaaaaaccgcggcaucauuaagaccuuuucuaaugggugugauuacgugagcaacaaaggagucgacacaguguccguuggcaauacccucuauuacgugaacaagcaagaaggcaagucucuguaugucaaaggggagcccaucauuaauuucuacgacccucuuguguuucccagcgaugaguucgacgccuccaucagccaggugaacgaaaagauuaaucagucucuggccuucaucagaaaauccgaugaacuccugcacaacguuaaugucggaaagagcacgaccaacauuaugaucacaaccaucauuaucgugauuaucgugauucugcuucuccugaucgcugucggccuguuucucuacugcaaagcgcggugaggacuaguacuggcugcaucucccuuuccucuguccuccauccuucucccaggauggugaagggggaccugguacccagugauccccaccccaggauccuaaaucaugacuuaccugcuaauaaaaacucauuggaaaagugagaagaucuaaaaaaaaaaaaaaaaaaaaaaaaaaaaaaaaaaaaaaaaaaaaaaaaaaaaaaaaaaaaaaaaugcaucccccccccccccccccccccccccccccccaaaggcucuuuucagagccaccagaauu

SEQ ID NO: 12398 - RNA, 2040 nt, Artificial Sequence
  mRNA product Design h-1 comprising derived and/or modified sequence from HRSV(Memphis-37)__AIY60640.1__F-del (opt6)
gggagacccgugacccggaaguuguacggcuacgcgacuuucccucccacaaacccucgcgcccuuccuuuccuacuugggcccggcagaaagcuuaccauggaacucccaauauuaaaaacuaacgcaaucacaaccauauuagcagccgucacucuaugcuuugccuccucacaaaauauaacagaagaauuuuaccaauccacaugcucagccguuagcaaaggauaucuaucagcccuaagaacaggcugguauacuucaguaauaacaauagaacuaucaaauauaaaagaaaacaaaugcaacggaaccgacgcuaaaguaaagcucauaaaacaagaauuagacaaauacaaaaaugcaguaacagaacuacaacuccuaaugcaaucaaccccagccgccaauaacagagcuagacgagaacuaccccgauucaugaauuacacacuaaacaacacaaaaaacaacaauguaacacucucaaaaaaaagaaaacgaagauucuuagguuuucuccugggaguaggaucagcaaucgcuuccggaaucgcagucaguaaaguccuucaccuugaaggcgaaguaaacaaaauaaaaaaugcacuacuaucuacaaauaaagcaguaguaucccuauccaauggcgucucaguauuaaccucaaaaguacucgaccuuaaaaauuauauagacaaacaauuacuacccauagucaauaaacaauccuguuccauaucaaacauagaaacaguaaucgaauuucaacaaaaaaacaacagauuacuagaaauaacacgcgaauuuucagucaacgccggaguaaccacacccgucucaacauacaugcuaaccaacuccgaacuacuaucacuuaucaacgacaugccaauaacaaaugaccaaaaaaaacucaugucaaacaacguacaaauaguccgccaacaaucauacucuauaaugucuauuaucaaagaagaaguucucgcauacguaguacaacuaccacuauauggugucauagacacaccauguuggaaacuccauacaucacccuuauguacaaccaauacaaaagaaggcucaaacaucugccuaacucgaacagaccgaggaugguacugcgacaaugcaggaucugucucauucuucccucaagcagaaacauguaaaguucaaucuaauagaguuuucugcgauacaaugaacucacuaacucuaccaucagaaguaaaucucuguaauauugacauauucaacccaaaauacgauugcaagaucaugacaucaaaaacugacguaucauccucagucaucaccucauuaggagcaaucguaagcuguuacgggaaaacaaaaugcaccgcuucuaacaaaaauagaggaauaauuaaaaccuucucaaacggaugcgauuacgucuccaauaaaggaguagauacaguaagcguaggaaauacucuauacuacgucaauaaacaagaaggaaaaucacuuuaugucaaaggagaacccauaauaaauuucuacgacccauuagucuucccaucagaugaauuugacgcauccauaucccaagucaacgaaaaaaucaaucaaucacuagcauucauacgaaaaucagacgaacuacuacacaacguuaacguaggaaaaucaacaaccaacaucaugauaaccacuauaauaaucgucauaauagucauccuauuauuacuaauagccguaggccuuuuccuauacuguaaagcuagauaaggacuaguacuggcugcaucucccuuuccucuguccuccauccuucucccaggauggugaagggggaccugguacccagugauccccaccccaggauccuaaaucaugacuuaccugcuaauaaaaacucauuggaaaagugagaagaucuaaaaaaaaaaaaaaaaaaaaaaaaaaaaaaaaaaaaaaaaaaaaaaaaaaaaaaaaaaaaaaaaugcaucccccccccccccccccccccccccccccccaaaggcucuuuucagagccaccagaauu

SEQ ID NO: 12399 - RNA, 2040 nt, Artificial Sequence
  mRNA product Design h-1 comprising derived and/or modified sequence from HRSV(Memphis-37)__AIY60640.1__F-del (opt11)
gggagacccgugacccggaaguuguacggcuacgcgacuuucccucccacaaacccucgcgcccuuccuuuccuacuugggcccggcagaaagcuuaccauggaacucccgauccucaaaaccaacgccaucaccacuauccucgccgccguaacccucugcuucgccucaucccaaaacaucaccgaagaauuuuaccaauccacaugcuccgccgucuccaaagguuaccucucagcccuccgcaccggcugguacaccuccguuaucaccaucgaacuuuccaacauaaaagagaacaagugcaacggcaccgacgcaaaaguaaaacuaaucaaacaagaacuagacaaauacaaaaacgccgucaccgaacuccagcuccucaugcaaucgacgcccgccgccaacaaccgagcaaggcgcgaacuuccacgcuucaugaacuacacccucaacaacacuaaaaacaacaacgugacccuauccaaaaagcguaaacgccgauuccuagguuuccuucucggugucggcuccgccauugccuccggcaucgcuguuuccaaaguccuccaccucgaaggcgaaguaaacaagauaaaaaacgcccuccucucuacaaacaaggccgugguaucgcucucuaacggcgucucuguacucaccuccaaaguccucgaccucaaaaacuacaucgacaagcaacuccucccuaucgucaauaaacaauccugcuccauuuccaacaucgaaacagugaucgaauuucaacaaaaaaacaaccgauuacuagaaaucacccgcgaauuuucagucaacgccggcgucacaacgccagucucaaccuacaugcucaccaacucagaacucuuaucacucaucaacgacaugcccaucacuaacgaccagaaaaaacugauguccaacaacgugcaaauaguccgccaacaguccuacuccaucauguccauaaucaaggaggaggugcucgccuacguaguccaacucccccucuacggagucauugacaccccuugcuggaaacuacacaccuccccucucugcaccaccaacaccaaagaaggcagcaacaucugccuaaccaggacggaccgaggaugguacugcgacaaugcaggcuccgucagcuucuucccacaagccgaaacaugcaaaguucaaucaaaccguguauucugcgacaccaugaacucacucacccuccccucagaaguaaaccuaugcaacauagauaucuucaaccccaaauacgacugcaaaauuaugaccuccaaaaccgaugucuccagcuccguuaucacgucacucggcgccaucgucuccugcuacggcaagaccaaaugcaccgccuccaacaaaaaccgcggaauaaucaaaacauucucuaacggcugcgacuacgucuccaauaaaggcgucgacaccgucuccgugggcaacacgcuguacuacgucaacaaacaagaaggcaaaucucuuuacgucaaaggugaaccaaucaucaacuucuacgacccccucguauuccccuccgacgaauuugacgcgagcaucucccaagucaacgaaaagaucaaccaaucccucgccuucauccgaaaaagcgacgaacuccuccacaacgucaacgucggcaaaaguaccacaaacauuaugaucaccaccaucaucauagucaucaucgucauccugcuccuacuaauagccgucggccucuucuuguacugcaaggcacgaugaggacuaguacuggcugcaucucccuuuccucuguccuccauccuucucccaggauggugaagggggaccugguacccagugauccccaccccaggauccuaaaucaugacuuaccugcuaauaaaaacucauuggaaaagugagaagaucuaaaaaaaaaaaaaaaaaaaaaaaaaaaaaaaaaaaaaaaaaaaaaaaaaaaaaaaaaaaaaaaaugcaucccccccccccccccccccccccccccccccaaaggcucuuuucagagccaccagaauu

SEQ ID NO: 12400 - RNA, 2256 nt, Artificial Sequence
  mRNA product Design h-2 comprising derived and/or modified sequence from HRSV(Memphis-37)__AIY60640.1__F-del (wt)
gggagacccgugacccggaaguuguacggcuacgcgacuuucccucccacaaacccucgcgcccuuccuuuccuacuugggcccggcagaaagcuuaccauggaguugccaauccucaaaacaaaugcaauuaccacaauccuugcugcagucacacucuguuucgcuuccagucaaaacaucacugaagaauuuuaucaaucaacaugcagugcaguuagcaaaggcuaucuuagugcuuuaagaacugguugguauacuaguguuauaacuauagaauuaaguaauaucaaggaaaauaaguguaauggaacagaugcuaagguaaaauugauaaaacaagaauuagauaaauauaaaaaugcuguaacagaauugcaguugcucaugcaaagcacaccagcagccaacaaucgagccagaagagaacuaccaagguuuaugaauuauacacucaacaauaccaaaaauaacaauguaacauuaagcaagaaaaggaaaagaagauuucuuggcuuuuuguuagguguuggaucugcaaucgccaguggcauugcuguaucuaaaguccugcaccuagaaggggaagugaacaaaaucaaaaaugcucuacuauccacaaacaaggcuguagucagcuuaucaaauggaguuagugucuuaaccagcaaaguguuagaccucaaaaacuauauagauaaacaguuguuacccauugugaacaagcaaagcugcagcauaucaaacauugaaacugugauagaauuccaacaaaagaacaacagacuacuagagauuaccagggaauuuaguguuaaugcagguguaacuacaccuguaagcacuuauauguuaacaaauagugaauuauuaucauuaaucaaugauaugccuauaacaaaugaucagaaaaaguuaauguccaacaauguucaaauaguuagacagcaaaguuacucuaucauguccauaauaaaggaggaagucuuagcauauguaguucaauuaccacuauaugguguaauagauacaccuuguuggaaacuacacacauccccucuaugcacaaccaacacaaaggaaggguccaacaucuguuuaacaagaaccgacagaggaugguacugugacaaugcaggaucagugucuuucuucccacaagcugaaacaugcaaaguucaaucgaaucgaguauuuugugacacaaugaacagucuaacauuaccaagugaaguaaaucucugcaacauugacauauucaacccuaaauaugauugcaaaauuaugacuucaaaaacagaugugagcagcuccguuaucacaucucuaggagccauugugucaugcuauggcaaaacuaaauguacagcauccaauaaaaaucguggaaucauaaagacauuuucuaacgggugugauuauguaucaaauaaggggguggacacuguaucuguagguaauacauuauauuauguaaauaagcaagaaggaaaaagccucuauguaaaaggugaaccaauaauaaauuucuaugacccauuaguguucccuucugaugaauuugaugcaucaauaucucaagucaaugagaagauuaaccagagccuagcauuuauucguaaauccgaugaauuauuacauaauguaaauguugguaaauccaccacaaauaucaugauaacuacuauaauuauagugauuauaguaauauuguuauuauuaauugcaguugggcuguuccuauacugcaaggccagaugaggacuagugaagggaacacccaaauuuaauucagccuuaagcacaauuaauuaagagugaaacguaauuguacaagcaguuggucacccaccauagggcaugaucaacaccgcaaccuuuccuuuuucccccagugauucugaaaaaccccucuucccuucagcuugcuuagauguuccaaauuuaguaagcuuaaggcggccuacagaagaaaaagaaaaaaaaggccacaaaaguucccucucacuuucaguaaauaaaauaaaagcagcaacagaaauaaagaaauaaaugaaauucaaaaugaaauaaauauuguguugugcagcauuaaaaaaucaauaaaaauuaaaaaugagcaagaucuaaaaaaaaaaaaaaaaaaaaaaaaaaaaaaaaaaaaaaaaaaaaaaaaaaaaaaaaaaaaaaaaugcaucccccccccccccccccccccccccccccccaaaggcucuuuucagagccaccagaauu

SEQ ID NO: 12401 - RNA, 2256 nt, Artificial Sequence
  mRNA product Design h-2 comprising derived and/or modified sequence from HRSV(Memphis-37)__AIY60640.1__F-del (opt1)
gggagacccgugacccggaaguuguacggcuacgcgacuuucccucccacaaacccucgcgcccuuccuuuccuacuugggcccggcagaaagcuuaccauggagcugcccauccucaagaccaacgccaucaccacgauccuggccgcggugacccugugcuucgccagcucccagaacaucaccgaggaguucuaccagagcacgugcuccgccgucagcaagggcuaccucuccgcccugcgcaccgggugguacaccagcgugaucaccaucgagcuguccaacaucaaggagaacaagugcaacggcaccgacgccaaggugaagcucaucaagcaggagcuggacaaguacaagaacgcggucacggagcugcagcuccugaugcagagcaccccggccgccaacaaccgggcccgccgggagcugccccgcuucaugaacuacacccucaacaacaccaagaacaacaacgugacgcuguccaagaagcggaagcgccgguuccugggguuccuccugggcguggggagcgcgaucgccuccggcaucgccgucagcaaggugcugcaccucgagggcgaggugaacaagaucaagaacgcccugcuguccaccaacaaggccgucgugagccucuccaacggggugagcguccugaccuccaaggugcuggaccucaagaacuacaucgacaagcagcugcugcccaucgugaacaagcagagcugcuccaucagcaacaucgagaccgucaucgaguuccagcagaagaacaaccgccuccuggagaucacgcgggaguucagcgugaacgcgggcgugaccacccccgucuccaccuacaugcugacgaacagcgagcuccugucccugaucaacgacaugccgaucaccaacgaccagaagaagcucaugagcaacaacgugcagaucgugcgccagcaguccuacagcaucauguccaucaucaaggaggagguccuggccuacguggugcagcugccccucuacggggucaucgacacccccugcuggaagcugcacaccagcccccugugcacgaccaacaccaaggagggcuccaacaucugccucacccggacggaccgcgggugguacugcgacaacgccggcagcguguccuucuucccgcaggccgagaccugcaagguccagagcaaccggguguucugcgacaccaugaacucccugacccugcccagcgaggugaaccucugcaacaucgacaucuucaaccccaaguacgacugcaagaucaugacguccaagaccgacgucagcuccagcgugaucaccucccugggcgccaucgugagcugcuacgggaagaccaagugcacggcgagcaacaagaaccgcggcaucaucaagaccuucuccaacgggugcgacuacgucagcaacaagggcguggacaccguguccgucggcaacacccuguacuacgugaacaagcaggagggcaagagccucuacgugaagggggagcccaucaucaacuucuacgacccgcuggucuuccccuccgacgaguucgacgccagcaucucccaggugaacgagaagaucaaccagagccuggccuucauccggaaguccgacgagcuccugcacaacgugaacgucggcaagagcaccacgaacaucaugaucaccaccaucaucaucgugaucaucgugauccugcugcuccugaucgccgucgggcuguuccucuacugcaaggcccgcugaggacuagugaagggaacacccaaauuuaauucagccuuaagcacaauuaauuaagagugaaacguaauuguacaagcaguuggucacccaccauagggcaugaucaacaccgcaaccuuuccuuuuucccccagugauucugaaaaaccccucuucccuucagcuugcuuagauguuccaaauuuaguaagcuuaaggcggccuacagaagaaaaagaaaaaaaaggccacaaaaguucccucucacuuucaguaaauaaaauaaaagcagcaacagaaauaaagaaauaaaugaaauucaaaaugaaauaaauauuguguugugcagcauuaaaaaaucaauaaaaauuaaaaaugagcaagaucuaaaaaaaaaaaaaaaaaaaaaaaaaaaaaaaaaaaaaaaaaaaaaaaaaaaaaaaaaaaaaaaaugcaucccccccccccccccccccccccccccccccaaaggcucuuuucagagccaccagaauu

SEQ ID NO: 12402 - RNA, 2256 nt, Artificial Sequence
  mRNA product Design h-2 comprising derived and/or modified sequence from HRSV(Memphis-37)__AIY60640.1__F-del (opt2)
gggagacccgugacccggaaguuguacggcuacgcgacuuucccucccacaaacccucgcgcccuuccuuuccuacuugggcccggcagaaagcuuaccauggagcuccccauccucaagaccaacgccaucaccaccauccucgccgccgucacccucugcuucgccuccucccagaacaucaccgaggaguucuaccaguccaccugcuccgccgucuccaagggcuaccucuccgcccuccgcaccggcugguacaccuccgucaucaccaucgagcucuccaacaucaaggagaacaagugcaacggcaccgacgccaaggucaagcucaucaagcaggagcucgacaaguacaagaacgccgucaccgagcuccagcuccucaugcaguccacccccgccgccaacaaccgcgcccgccgcgagcucccccgcuucaugaacuacacccucaacaacaccaagaacaacaacgucacccucuccaagaagcgcaagcgccgcuuccucggcuuccuccucggcgucggcuccgccaucgccuccggcaucgccgucuccaagguccuccaccucgagggcgaggucaacaagaucaagaacgcccuccucuccaccaacaaggccgucgucucccucuccaacggcgucuccguccucaccuccaagguccucgaccucaagaacuacaucgacaagcagcuccuccccaucgucaacaagcaguccugcuccaucuccaacaucgagaccgucaucgaguuccagcagaagaacaaccgccuccucgagaucacccgcgaguucuccgucaacgccggcgucaccacccccgucuccaccuacaugcucaccaacuccgagcuccucucccucaucaacgacaugcccaucaccaacgaccagaagaagcucauguccaacaacguccagaucguccgccagcaguccuacuccaucauguccaucaucaaggaggagguccucgccuacgucguccagcucccccucuacggcgucaucgacacccccugcuggaagcuccacaccuccccccucugcaccaccaacaccaaggagggcuccaacaucugccucacccgcaccgaccgcggcugguacugcgacaacgccggcuccgucuccuucuucccccaggccgagaccugcaagguccaguccaaccgcgucuucugcgacaccaugaacucccucacccuccccuccgaggucaaccucugcaacaucgacaucuucaaccccaaguacgacugcaagaucaugaccuccaagaccgacgucuccuccuccgucaucaccucccucggcgccaucgucuccugcuacggcaagaccaagugcaccgccuccaacaagaaccgcggcaucaucaagaccuucuccaacggcugcgacuacgucuccaacaagggcgucgacaccgucuccgucggcaacacccucuacuacgucaacaagcaggagggcaagucccucuacgucaagggcgagcccaucaucaacuucuacgacccccucgucuuccccuccgacgaguucgacgccuccaucucccaggucaacgagaagaucaaccagucccucgccuucauccgcaaguccgacgagcuccuccacaacgucaacgucggcaaguccaccaccaacaucaugaucaccaccaucaucaucgucaucaucgucauccuccuccuccucaucgccgucggccucuuccucuacugcaaggcccgcugaggacuagugaagggaacacccaaauuuaauucagccuuaagcacaauuaauuaagagugaaacguaauuguacaagcaguuggucacccaccauagggcaugaucaacaccgcaaccuuuccuuuuucccccagugauucugaaaaaccccucuucccuucagcuugcuuagauguuccaaauuuaguaagcuuaaggcggccuacagaagaaaaagaaaaaaaaggccacaaaaguucccucucacuuucaguaaauaaaauaaaagcagcaacagaaauaaagaaauaaaugaaauucaaaaugaaauaaauauuguguugugcagcauuaaaaaaucaauaaaaauuaaaaaugagcaagaucuaaaaaaaaaaaaaaaaaaaaaaaaaaaaaaaaaaaaaaaaaaaaaaaaaaaaaaaaaaaaaaaaugcaucccccccccccccccccccccccccccccccaaaggcucuuuucagagccaccagaauu

SEQ ID NO: 12403 - RNA, 2256 nt, Artificial Sequence
  mRNA product Design h-2 comprising derived and/or modified sequence from HRSV(Memphis-37)__AIY60640.1__F-del (opt3)
gggagacccgugacccggaaguuguacggcuacgcgacuuucccucccacaaacccucgcgcccuuccuuuccuacuugggcccggcagaaagcuuaccauggagcugcccauccucaagaccaacgccauuacaacuauacuugcugcagugacgcugugcuucgccagcucccagaauaucaccgaagaguuuuaccaaucuacauguucagcggucaguaaaggcuauuugagcgcuuuaagaacugggugguacaccuccguuauuacaaucgaacugucuaacauuaaggagaauaaaugcaacggaaccgacgccaaggugaaacuaaucaagcaggaacucgauaaguauaaaaaugcaguaacugagcugcagcuucugaugcagucgaccccugccgcuaacaauagggcacggcgcgaguugccacgauucaugaacuacacacucaauaacacgaagaauaacaaugugacucugagcaaaaagcguaaaagaagguuucuggguuuccucuuaggcgucgggucagccauagcuaguggaaucgccguguccaagguucugcaccuugaaggcgaggugaacaagauuaaaaaugcguugcugucuaccaacaaggcagucgugagccuauccaacgguguaucaguucucacaaguaaagugcuggaccuuaagaauuauaucgauaaacaacuguugccgauugucaacaagcagagcuguucuaucuccaauauagaaacugugauugaguuucagcagaaaaacaaucggcuccuggagaucacccgcgaguucucagugaacgccggggucacaacccccguuagcacguacauguuaacuaauagugaacugcucucucuuauuaacgacaugccuaucacaaaugaucaaaagaagcugauguccaacaaugugcagaucguaagacagcagagcuauucgauuaugucuauaaucaaagaagagguguuggcuuacgucgugcaacuaccacuguacggaguuauugacacccccugcuggaagcuccauacuuccccucuguguacaaccaacacgaaagaaggcucaaauaucugccuuaccaggacagaucggggcugguauugugacaacgccgggagugugagcuuuuucccacaggcagagacuugcaagguccaguccaaucgcguguuuugugauaccaugaacucucugacauugcccagcgagguaaaccucugcaauauagacauuuucaacccuaaauacgauuguaagaucaugacuucaaagaccgacguuaguuccagcgugaucacaucucugggagcuauugucucaugcuaugguaaaaccaagugcacugccaguaauaaaaaccgaggcaucauuaagacguuuagcaaugggugugauuacguguccaacaaaggagucgacacagugucuguuggcaauaccuuauauuacgugaacaagcaagaagguaagucgcuguauguaaaaggggagccaauaaucaauuucuacgacccgcuagucuuucccagcgaugaguucgacgcguccauuucacaggugaacgaaaagaucaaucagagucucgccuucaucagaaaaucugaugaacugcuucacaacguuaaugugggaaagagcacuaccaacauuaugauaacaaccaucauuaucgucauuaucgugauauugcugcuccugaucgcaguaggccuuuuucuguacugcaaagcuaggugaggacuagugaagggaacacccaaauuuaauucagccuuaagcacaauuaauuaagagugaaacguaauuguacaagcaguuggucacccaccauagggcaugaucaacaccgcaaccuuuccuuuuucccccagugauucugaaaaaccccucuucccuucagcuugcuuagauguuccaaauuuaguaagcuuaaggcggccuacagaagaaaaagaaaaaaaaggccacaaaaguucccucucacuuucaguaaauaaaauaaaagcagcaacagaaauaaagaaauaaaugaaauucaaaaugaaauaaauauuguguugugcagcauuaaaaaaucaauaaaaauuaaaaaugagcaagaucuaaaaaaaaaaaaaaaaaaaaaaaaaaaaaaaaaaaaaaaaaaaaaaaaaaaaaaaaaaaaaaaaugcaucccccccccccccccccccccccccccccccaaaggcucuuuucagagccaccagaauu

SEQ ID NO: 12404 - RNA, 2256 nt, Artificial Sequence
  mRNA product Design h-2 comprising derived and/or modified sequence from HRSV(Memphis-37)__AIY60640.1__F-del (opt4)
gggagacccgugacccggaaguuguacggcuacgcgacuuucccucccacaaacccucgcgcccuuccuuuccuacuugggcccggcagaaagcuuaccauggagcugcccauccugaagaccaacgccaucaccaccauccuggccgccgugacccugugcuucgccagcagccagaacaucaccgaggaguucuaccagagcaccugcagcgccgugagcaagggcuaccugagcgcccugagaaccggcugguacaccagcgugaucaccaucgagcugagcaacaucaaggagaacaagugcaacggcaccgacgccaaggugaagcugaucaagcaggagcuggacaaguacaagaacgccgugaccgagcugcagcugcugaugcagagcacccccgccgccaacaacagagccagaagagagcugcccagauucaugaacuacacccugaacaacaccaagaacaacaacgugacccugagcaagaagagaaagagaagauuccugggcuuccugcugggcgugggcagcgccaucgccagcggcaucgccgugagcaaggugcugcaccuggagggcgaggugaacaagaucaagaacgcccugcugagcaccaacaaggccguggugagccugagcaacggcgugagcgugcugaccagcaaggugcuggaccugaagaacuacaucgacaagcagcugcugcccaucgugaacaagcagagcugcagcaucagcaacaucgagaccgugaucgaguuccagcagaagaacaacagacugcuggagaucaccagagaguucagcgugaacgccggcgugaccacccccgugagcaccuacaugcugaccaacagcgagcugcugagccugaucaacgacaugcccaucaccaacgaccagaagaagcugaugagcaacaacgugcagaucgugagacagcagagcuacagcaucaugagcaucaucaaggaggaggugcuggccuacguggugcagcugccccuguacggcgugaucgacacccccugcuggaagcugcacaccagcccccugugcaccaccaacaccaaggagggcagcaacaucugccugaccagaaccgacagaggcugguacugcgacaacgccggcagcgugagcuucuucccccaggccgagaccugcaaggugcagagcaacagaguguucugcgacaccaugaacagccugacccugcccagcgaggugaaccugugcaacaucgacaucuucaaccccaaguacgacugcaagaucaugaccagcaagaccgacgugagcagcagcgugaucaccagccugggcgccaucgugagcugcuacggcaagaccaagugcaccgccagcaacaagaacagaggcaucaucaagaccuucagcaacggcugcgacuacgugagcaacaagggcguggacaccgugagcgugggcaacacccuguacuacgugaacaagcaggagggcaagagccuguacgugaagggcgagcccaucaucaacuucuacgacccccugguguuccccagcgacgaguucgacgccagcaucagccaggugaacgagaagaucaaccagagccuggccuucaucagaaagagcgacgagcugcugcacaacgugaacgugggcaagagcaccaccaacaucaugaucaccaccaucaucaucgugaucaucgugauccugcugcugcugaucgccgugggccuguuccuguacugcaaggccagaugaggacuagugaagggaacacccaaauuuaauucagccuuaagcacaauuaauuaagagugaaacguaauuguacaagcaguuggucacccaccauagggcaugaucaacaccgcaaccuuuccuuuuucccccagugauucugaaaaaccccucuucccuucagcuugcuuagauguuccaaauuuaguaagcuuaaggcggccuacagaagaaaaagaaaaaaaaggccacaaaaguucccucucacuuucaguaaauaaaauaaaagcagcaacagaaauaaagaaauaaaugaaauucaaaaugaaauaaauauuguguugugcagcauuaaaaaaucaauaaaaauuaaaaaugagcaagaucuaaaaaaaaaaaaaaaaaaaaaaaaaaaaaaaaaaaaaaaaaaaaaaaaaaaaaaaaaaaaaaaaugcaucccccccccccccccccccccccccccccccaaaggcucuuuucagagccaccagaauu

SEQ ID NO: 12405 - RNA, 2256 nt, Artificial Sequence
  mRNA product Design h-2 comprising derived and/or modified sequence from HRSV(Memphis-37)__AIY60640.1__F-del (opt5)
gggagacccgugacccggaaguuguacggcuacgcgacuuucccucccacaaacccucgcgcccuuccuuuccuacuugggcccggcagaaagcuuaccauggagcugcccauccucaagaccaacgccauuacaacgauccuggcugccgugacccuuugcuucgcgagcucccagaauauuacagaagaguuuuaccaaucuaccuguagcgcugucuccaaaggcuaucugucugcccucagaacagggugguacaccagcguuaucacaauugaacuguccaacaucaaggagaauaaaugcaacggaaccgacgccaaggugaaacuuaucaagcaggaacuggauaaguauaaaaaugcugugacggagcuccagcugcugaugcagucuaccccugccgcuaacaaucgggcccgcagagagcucccgcgguucaugaacuacacacugaauaacaccaagaauaacaaugucacacuuagcaaaaagcgcaaaagacgguuucugggcuuccuccugggggugggauccgcgauugccagcggcaucgcuguuucuaaggugcuucaccuggaaggggaggucaacaagauuaaaaaugcccuccuguccaccaacaaggcugugguuagccugucuaacggaguguccguccucacgagcaaagugcuggaccuuaagaauuauaucgauaaacaacugcuccccauugugaacaagcagucuuguuccaucagcaauauugaaacagucaucgaguuucagcagaaaaacaaucgccugcuugagaucaccagagaauuuuccguuaacgccggcgugacaaccccugugucuaccuacaugcugacaaauagcgagcuccugucccugauuaacgacaugcccaucacgaaugaucaaaagaagcucaugagcaacaauguccagauugugcggcagcagucuuauuccaucaugagcauuaucaaagaagagguucuggcguacgugguccaacuuccucuguacggcgugaucgacacccccugcuggaagcuccauacaucuccucuguguaccacaaacaccaaagaagggagcaauauuugccuuacgcgcacagauagaggaugguauugugacaacgccggcuccguuucuuucuucccgcaggcugagaccugcaaggugcagagcaaucgggucuuuugugauaccaugaacucccugacacuccccagcgaggugaaccugugcaauaucgacauuuucaacccuaaauacgauuguaagaucaugaccucuaagacagacgucuccagcucugugauuacgucccugggggccaucguuagcugcuauggaaaaaccaagugcacagcuuccaauaaaaaccgcggcaucauuaagaccuuuucuaaugggugugauuacgugagcaacaaaggagucgacacaguguccguuggcaauacccucuauuacgugaacaagcaagaaggcaagucucuguaugucaaaggggagcccaucauuaauuucuacgacccucuuguguuucccagcgaugaguucgacgccuccaucagccaggugaacgaaaagauuaaucagucucuggccuucaucagaaaauccgaugaacuccugcacaacguuaaugucggaaagagcacgaccaacauuaugaucacaaccaucauuaucgugauuaucgugauucugcuucuccugaucgcugucggccuguuucucuacugcaaagcgcggugaggacuagugaagggaacacccaaauuuaauucagccuuaagcacaauuaauuaagagugaaacguaauuguacaagcaguuggucacccaccauagggcaugaucaacaccgcaaccuuuccuuuuucccccagugauucugaaaaaccccucuucccuucagcuugcuuagauguuccaaauuuaguaagcuuaaggcggccuacagaagaaaaagaaaaaaaaggccacaaaaguucccucucacuuucaguaaauaaaauaaaagcagcaacagaaauaaagaaauaaaugaaauucaaaaugaaauaaauauuguguugugcagcauuaaaaaaucaauaaaaauuaaaaaugagcaagaucuaaaaaaaaaaaaaaaaaaaaaaaaaaaaaaaaaaaaaaaaaaaaaaaaaaaaaaaaaaaaaaaaugcaucccccccccccccccccccccccccccccccaaaggcucuuuucagagccaccagaauu

SEQ ID NO: 12406 - RNA, 2256 nt, Artificial Sequence
  mRNA product Design h-2 comprising derived and/or modified sequence from HRSV(Memphis-37)__AIY60640.1__F-del (opt6)
gggagacccgugacccggaaguuguacggcuacgcgacuuucccucccacaaacccucgcgcccuuccuuuccuacuugggcccggcagaaagcuuaccauggaacucccaauauuaaaaacuaacgcaaucacaaccauauuagcagccgucacucuaugcuuugccuccucacaaaauauaacagaagaauuuuaccaauccacaugcucagccguuagcaaaggauaucuaucagcccuaagaacaggcugguauacuucaguaauaacaauagaacuaucaaauauaaaagaaaacaaaugcaacggaaccgacgcuaaaguaaagcucauaaaacaagaauuagacaaauacaaaaaugcaguaacagaacuacaacuccuaaugcaaucaaccccagccgccaauaacagagcuagacgagaacuaccccgauucaugaauuacacacuaaacaacacaaaaaacaacaauguaacacucucaaaaaaaagaaaacgaagauucuuagguuuucuccugggaguaggaucagcaaucgcuuccggaaucgcagucaguaaaguccuucaccuugaaggcgaaguaaacaaaauaaaaaaugcacuacuaucuacaaauaaagcaguaguaucccuauccaauggcgucucaguauuaaccucaaaaguacucgaccuuaaaaauuauauagacaaacaauuacuacccauagucaauaaacaauccuguuccauaucaaacauagaaacaguaaucgaauuucaacaaaaaaacaacagauuacuagaaauaacacgcgaauuuucagucaacgccggaguaaccacacccgucucaacauacaugcuaaccaacuccgaacuacuaucacuuaucaacgacaugccaauaacaaaugaccaaaaaaaacucaugucaaacaacguacaaauaguccgccaacaaucauacucuauaaugucuauuaucaaagaagaaguucucgcauacguaguacaacuaccacuauauggugucauagacacaccauguuggaaacuccauacaucacccuuauguacaaccaauacaaaagaaggcucaaacaucugccuaacucgaacagaccgaggaugguacugcgacaaugcaggaucugucucauucuucccucaagcagaaacauguaaaguucaaucuaauagaguuuucugcgauacaaugaacucacuaacucuaccaucagaaguaaaucucuguaauauugacauauucaacccaaaauacgauugcaagaucaugacaucaaaaacugacguaucauccucagucaucaccucauuaggagcaaucguaagcuguuacgggaaaacaaaaugcaccgcuucuaacaaaaauagaggaauaauuaaaaccuucucaaacggaugcgauuacgucuccaauaaaggaguagauacaguaagcguaggaaauacucuauacuacgucaauaaacaagaaggaaaaucacuuuaugucaaaggagaacccauaauaaauuucuacgacccauuagucuucccaucagaugaauuugacgcauccauaucccaagucaacgaaaaaaucaaucaaucacuagcauucauacgaaaaucagacgaacuacuacacaacguuaacguaggaaaaucaacaaccaacaucaugauaaccacuauaauaaucgucauaauagucauccuauuauuacuaauagccguaggccuuuuccuauacuguaaagcuagauaaggacuagugaagggaacacccaaauuuaauucagccuuaagcacaauuaauuaagagugaaacguaauuguacaagcaguuggucacccaccauagggcaugaucaacaccgcaaccuuuccuuuuucccccagugauucugaaaaaccccucuucccuucagcuugcuuagauguuccaaauuuaguaagcuuaaggcggccuacagaagaaaaagaaaaaaaaggccacaaaaguucccucucacuuucaguaaauaaaauaaaagcagcaacagaaauaaagaaauaaaugaaauucaaaaugaaauaaauauuguguugugcagcauuaaaaaaucaauaaaaauuaaaaaugagcaagaucuaaaaaaaaaaaaaaaaaaaaaaaaaaaaaaaaaaaaaaaaaaaaaaaaaaaaaaaaaaaaaaaaugcaucccccccccccccccccccccccccccccccaaaggcucuuuucagagccaccagaauu

SEQ ID NO: 12407 - RNA, 2256 nt, Artificial Sequence
  mRNA product Design h-2 comprising derived and/or modified sequence from HRSV(Memphis-37)__AIY60640.1__F-del (opt11)
gggagacccgugacccggaaguuguacggcuacgcgacuuucccucccacaaacccucgcgcccuuccuuuccuacuugggcccggcagaaagcuuaccauggaacucccgauccucaaaaccaacgccaucaccacuauccucgccgccguaacccucugcuucgccucaucccaaaacaucaccgaagaauuuuaccaauccacaugcuccgccgucuccaaagguuaccucucagcccuccgcaccggcugguacaccuccguuaucaccaucgaacuuuccaacauaaaagagaacaagugcaacggcaccgacgcaaaaguaaaacuaaucaaacaagaacuagacaaauacaaaaacgccgucaccgaacuccagcuccucaugcaaucgacgcccgccgccaacaaccgagcaaggcgcgaacuuccacgcuucaugaacuacacccucaacaacacuaaaaacaacaacgugacccuauccaaaaagcguaaacgccgauuccuagguuuccuucucggugucggcuccgccauugccuccggcaucgcuguuuccaaaguccuccaccucgaaggcgaaguaaacaagauaaaaaacgcccuccucucuacaaacaaggccgugguaucgcucucuaacggcgucucuguacucaccuccaaaguccucgaccucaaaaacuacaucgacaagcaacuccucccuaucgucaauaaacaauccugcuccauuuccaacaucgaaacagugaucgaauuucaacaaaaaaacaaccgauuacuagaaaucacccgcgaauuuucagucaacgccggcgucacaacgccagucucaaccuacaugcucaccaacucagaacucuuaucacucaucaacgacaugcccaucacuaacgaccagaaaaaacugauguccaacaacgugcaaauaguccgccaacaguccuacuccaucauguccauaaucaaggaggaggugcucgccuacguaguccaacucccccucuacggagucauugacaccccuugcuggaaacuacacaccuccccucucugcaccaccaacaccaaagaaggcagcaacaucugccuaaccaggacggaccgaggaugguacugcgacaaugcaggcuccgucagcuucuucccacaagccgaaacaugcaaaguucaaucaaaccguguauucugcgacaccaugaacucacucacccuccccucagaaguaaaccuaugcaacauagauaucuucaaccccaaauacgacugcaaaauuaugaccuccaaaaccgaugucuccagcuccguuaucacgucacucggcgccaucgucuccugcuacggcaagaccaaaugcaccgccuccaacaaaaaccgcggaauaaucaaaacauucucuaacggcugcgacuacgucuccaauaaaggcgucgacaccgucuccgugggcaacacgcuguacuacgucaacaaacaagaaggcaaaucucuuuacgucaaaggugaaccaaucaucaacuucuacgacccccucguauuccccuccgacgaauuugacgcgagcaucucccaagucaacgaaaagaucaaccaaucccucgccuucauccgaaaaagcgacgaacuccuccacaacgucaacgucggcaaaaguaccacaaacauuaugaucaccaccaucaucauagucaucaucgucauccugcuccuacuaauagccgucggccucuucuuguacugcaaggcacgaugaggacuagugaagggaacacccaaauuuaauucagccuuaagcacaauuaauuaagagugaaacguaauuguacaagcaguuggucacccaccauagggcaugaucaacaccgcaaccuuuccuuuuucccccagugauucugaaaaaccccucuucccuucagcuugcuuagauguuccaaauuuaguaagcuuaaggcggccuacagaagaaaaagaaaaaaaaggccacaaaaguucccucucacuuucaguaaauaaaauaaaagcagcaacagaaauaaagaaauaaaugaaauucaaaaugaaauaaauauuguguugugcagcauuaaaaaaucaauaaaaauuaaaaaugagcaagaucuaaaaaaaaaaaaaaaaaaaaaaaaaaaaaaaaaaaaaaaaaaaaaaaaaaaaaaaaaaaaaaaaugcaucccccccccccccccccccccccccccccccaaaggcucuuuucagagccaccagaauu

SEQ ID NO: 12408 - RNA, 2036 nt, Artificial Sequence
  mRNA product Design h-3 comprising derived and/or modified sequence from HRSV(Memphis-37)__AIY60640.1__F-del (wt)
gggagacccgugacccggaaguuguacggcuacgcgacuuucccucccacaaacccucgcgcccuuccuuuccuacuugggcccggcagaaagcuuaccauggaguugccaauccucaaaacaaaugcaauuaccacaauccuugcugcagucacacucuguuucgcuuccagucaaaacaucacugaagaauuuuaucaaucaacaugcagugcaguuagcaaaggcuaucuuagugcuuuaagaacugguugguauacuaguguuauaacuauagaauuaaguaauaucaaggaaaauaaguguaauggaacagaugcuaagguaaaauugauaaaacaagaauuagauaaauauaaaaaugcuguaacagaauugcaguugcucaugcaaagcacaccagcagccaacaaucgagccagaagagaacuaccaagguuuaugaauuauacacucaacaauaccaaaaauaacaauguaacauuaagcaagaaaaggaaaagaagauuucuuggcuuuuuguuagguguuggaucugcaaucgccaguggcauugcuguaucuaaaguccugcaccuagaaggggaagugaacaaaaucaaaaaugcucuacuauccacaaacaaggcuguagucagcuuaucaaauggaguuagugucuuaaccagcaaaguguuagaccucaaaaacuauauagauaaacaguuguuacccauugugaacaagcaaagcugcagcauaucaaacauugaaacugugauagaauuccaacaaaagaacaacagacuacuagagauuaccagggaauuuaguguuaaugcagguguaacuacaccuguaagcacuuauauguuaacaaauagugaauuauuaucauuaaucaaugauaugccuauaacaaaugaucagaaaaaguuaauguccaacaauguucaaauaguuagacagcaaaguuacucuaucauguccauaauaaaggaggaagucuuagcauauguaguucaauuaccacuauaugguguaauagauacaccuuguuggaaacuacacacauccccucuaugcacaaccaacacaaaggaaggguccaacaucuguuuaacaagaaccgacagaggaugguacugugacaaugcaggaucagugucuuucuucccacaagcugaaacaugcaaaguucaaucgaaucgaguauuuugugacacaaugaacagucuaacauuaccaagugaaguaaaucucugcaacauugacauauucaacccuaaauaugauugcaaaauuaugacuucaaaaacagaugugagcagcuccguuaucacaucucuaggagccauugugucaugcuauggcaaaacuaaauguacagcauccaauaaaaaucguggaaucauaaagacauuuucuaacgggugugauuauguaucaaauaaggggguggacacuguaucuguagguaauacauuauauuauguaaauaagcaagaaggaaaaagccucuauguaaaaggugaaccaauaauaaauuucuaugacccauuaguguucccuucugaugaauuugaugcaucaauaucucaagucaaugagaagauuaaccagagccuagcauuuauucguaaauccgaugaauuauuacauaauguaaauguugguaaauccaccacaaauaucaugauaacuacuauaauuauagugauuauaguaauauuguuauuauuaauugcaguugggcuguuccuauacugcaaggccagaugaggacuaguggaagcauuuuccuggcugauuaaaagaaauuacucagcuauggucaucuguuccuguuagaaggcuaugcagcauauuauauacuaugcgcauguuaugaaaugcauaauaaaaaauuuuaaaaaaucuaaaagaucuaaaaaaaaaaaaaaaaaaaaaaaaaaaaaaaaaaaaaaaaaaaaaaaaaaaaaaaaaaaaaaaaugcaucccccccccccccccccccccccccccccccaaaggcucuuuucagagccaccagaauu

SEQ ID NO: 12409 - RNA, 2036 nt, Artificial Sequence
  mRNA product Design h-3 comprising derived and/or modified sequence from HRSV(Memphis-37)__AIY60640.1__F-del (opt1)
gggagacccgugacccggaaguuguacggcuacgcgacuuucccucccacaaacccucgcgcccuuccuuuccuacuugggcccggcagaaagcuuaccauggagcugcccauccucaagaccaacgccaucaccacgauccuggccgcggugacccugugcuucgccagcucccagaacaucaccgaggaguucuaccagagcacgugcuccgccgucagcaagggcuaccucuccgcccugcgcaccgggugguacaccagcgugaucaccaucgagcuguccaacaucaaggagaacaagugcaacggcaccgacgccaaggugaagcucaucaagcaggagcuggacaaguacaagaacgcggucacggagcugcagcuccugaugcagagcaccccggccgccaacaaccgggcccgccgggagcugccccgcuucaugaacuacacccucaacaacaccaagaacaacaacgugacgcuguccaagaagcggaagcgccgguuccugggguuccuccugggcguggggagcgcgaucgccuccggcaucgccgucagcaaggugcugcaccucgagggcgaggugaacaagaucaagaacgcccugcuguccaccaacaaggccgucgugagccucuccaacggggugagcguccugaccuccaaggugcuggaccucaagaacuacaucgacaagcagcugcugcccaucgugaacaagcagagcugcuccaucagcaacaucgagaccgucaucgaguuccagcagaagaacaaccgccuccuggagaucacgcgggaguucagcgugaacgcgggcgugaccacccccgucuccaccuacaugcugacgaacagcgagcuccugucccugaucaacgacaugccgaucaccaacgaccagaagaagcucaugagcaacaacgugcagaucgugcgccagcaguccuacagcaucauguccaucaucaaggaggagguccuggccuacguggugcagcugccccucuacggggucaucgacacccccugcuggaagcugcacaccagcccccugugcacgaccaacaccaaggagggcuccaacaucugccucacccggacggaccgcgggugguacugcgacaacgccggcagcguguccuucuucccgcaggccgagaccugcaagguccagagcaaccggguguucugcgacaccaugaacucccugacccugcccagcgaggugaaccucugcaacaucgacaucuucaaccccaaguacgacugcaagaucaugacguccaagaccgacgucagcuccagcgugaucaccucccugggcgccaucgugagcugcuacgggaagaccaagugcacggcgagcaacaagaaccgcggcaucaucaagaccuucuccaacgggugcgacuacgucagcaacaagggcguggacaccguguccgucggcaacacccuguacuacgugaacaagcaggagggcaagagccucuacgugaagggggagcccaucaucaacuucuacgacccgcuggucuuccccuccgacgaguucgacgccagcaucucccaggugaacgagaagaucaaccagagccuggccuucauccggaaguccgacgagcuccugcacaacgugaacgucggcaagagcaccacgaacaucaugaucaccaccaucaucaucgugaucaucgugauccugcugcuccugaucgccgucgggcuguuccucuacugcaaggcccgcugaggacuaguggaagcauuuuccuggcugauuaaaagaaauuacucagcuauggucaucuguuccuguuagaaggcuaugcagcauauuauauacuaugcgcauguuaugaaaugcauaauaaaaaauuuuaaaaaaucuaaaagaucuaaaaaaaaaaaaaaaaaaaaaaaaaaaaaaaaaaaaaaaaaaaaaaaaaaaaaaaaaaaaaaaaugcaucccccccccccccccccccccccccccccccaaaggcucuuuucagagccaccagaauu

SEQ ID NO: 12410 - RNA, 2036 nt, Artificial Sequence
  mRNA product Design h-3 comprising derived and/or modified sequence from HRSV(Memphis-37)__AIY60640.1__F-del (opt2)
gggagacccgugacccggaaguuguacggcuacgcgacuuucccucccacaaacccucgcgcccuuccuuuccuacuugggcccggcagaaagcuuaccauggagcuccccauccucaagaccaacgccaucaccaccauccucgccgccgucacccucugcuucgccuccucccagaacaucaccgaggaguucuaccaguccaccugcuccgccgucuccaagggcuaccucuccgcccuccgcaccggcugguacaccuccgucaucaccaucgagcucuccaacaucaaggagaacaagugcaacggcaccgacgccaaggucaagcucaucaagcaggagcucgacaaguacaagaacgccgucaccgagcuccagcuccucaugcaguccacccccgccgccaacaaccgcgcccgccgcgagcucccccgcuucaugaacuacacccucaacaacaccaagaacaacaacgucacccucuccaagaagcgcaagcgccgcuuccucggcuuccuccucggcgucggcuccgccaucgccuccggcaucgccgucuccaagguccuccaccucgagggcgaggucaacaagaucaagaacgcccuccucuccaccaacaaggccgucgucucccucuccaacggcgucuccguccucaccuccaagguccucgaccucaagaacuacaucgacaagcagcuccuccccaucgucaacaagcaguccugcuccaucuccaacaucgagaccgucaucgaguuccagcagaagaacaaccgccuccucgagaucacccgcgaguucuccgucaacgccggcgucaccacccccgucuccaccuacaugcucaccaacuccgagcuccucucccucaucaacgacaugcccaucaccaacgaccagaagaagcucauguccaacaacguccagaucguccgccagcaguccuacuccaucauguccaucaucaaggaggagguccucgccuacgucguccagcucccccucuacggcgucaucgacacccccugcuggaagcuccacaccuccccccucugcaccaccaacaccaaggagggcuccaacaucugccucacccgcaccgaccgcggcugguacugcgacaacgccggcuccgucuccuucuucccccaggccgagaccugcaagguccaguccaaccgcgucuucugcgacaccaugaacucccucacccuccccuccgaggucaaccucugcaacaucgacaucuucaaccccaaguacgacugcaagaucaugaccuccaagaccgacgucuccuccuccgucaucaccucccucggcgccaucgucuccugcuacggcaagaccaagugcaccgccuccaacaagaaccgcggcaucaucaagaccuucuccaacggcugcgacuacgucuccaacaagggcgucgacaccgucuccgucggcaacacccucuacuacgucaacaagcaggagggcaagucccucuacgucaagggcgagcccaucaucaacuucuacgacccccucgucuuccccuccgacgaguucgacgccuccaucucccaggucaacgagaagaucaaccagucccucgccuucauccgcaaguccgacgagcuccuccacaacgucaacgucggcaaguccaccaccaacaucaugaucaccaccaucaucaucgucaucaucgucauccuccuccuccucaucgccgucggccucuuccucuacugcaaggcccgcugaggacuaguggaagcauuuuccuggcugauuaaaagaaauuacucagcuauggucaucuguuccuguuagaaggcuaugcagcauauuauauacuaugcgcauguuaugaaaugcauaauaaaaaauuuuaaaaaaucuaaaagaucuaaaaaaaaaaaaaaaaaaaaaaaaaaaaaaaaaaaaaaaaaaaaaaaaaaaaaaaaaaaaaaaaugcaucccccccccccccccccccccccccccccccaaaggcucuuuucagagccaccagaauu

SEQ ID NO: 12411 - RNA, 2036 nt, Artificial Sequence
  mRNA product Design h-3 comprising derived and/or modified sequence from HRSV(Memphis-37)__AIY60640.1__F-del (opt3)
gggagacccgugacccggaaguuguacggcuacgcgacuuucccucccacaaacccucgcgcccuuccuuuccuacuugggcccggcagaaagcuuaccauggagcugcccauccucaagaccaacgccauuacaacuauacuugcugcagugacgcugugcuucgccagcucccagaauaucaccgaagaguuuuaccaaucuacauguucagcggucaguaaaggcuauuugagcgcuuuaagaacugggugguacaccuccguuauuacaaucgaacugucuaacauuaaggagaauaaaugcaacggaaccgacgccaaggugaaacuaaucaagcaggaacucgauaaguauaaaaaugcaguaacugagcugcagcuucugaugcagucgaccccugccgcuaacaauagggcacggcgcgaguugccacgauucaugaacuacacacucaauaacacgaagaauaacaaugugacucugagcaaaaagcguaaaagaagguuucuggguuuccucuuaggcgucgggucagccauagcuaguggaaucgccguguccaagguucugcaccuugaaggcgaggugaacaagauuaaaaaugcguugcugucuaccaacaaggcagucgugagccuauccaacgguguaucaguucucacaaguaaagugcuggaccuuaagaauuauaucgauaaacaacuguugccgauugucaacaagcagagcuguucuaucuccaauauagaaacugugauugaguuucagcagaaaaacaaucggcuccuggagaucacccgcgaguucucagugaacgccggggucacaacccccguuagcacguacauguuaacuaauagugaacugcucucucuuauuaacgacaugccuaucacaaaugaucaaaagaagcugauguccaacaaugugcagaucguaagacagcagagcuauucgauuaugucuauaaucaaagaagagguguuggcuuacgucgugcaacuaccacuguacggaguuauugacacccccugcuggaagcuccauacuuccccucuguguacaaccaacacgaaagaaggcucaaauaucugccuuaccaggacagaucggggcugguauugugacaacgccgggagugugagcuuuuucccacaggcagagacuugcaagguccaguccaaucgcguguuuugugauaccaugaacucucugacauugcccagcgagguaaaccucugcaauauagacauuuucaacccuaaauacgauuguaagaucaugacuucaaagaccgacguuaguuccagcgugaucacaucucugggagcuauugucucaugcuaugguaaaaccaagugcacugccaguaauaaaaaccgaggcaucauuaagacguuuagcaaugggugugauuacguguccaacaaaggagucgacacagugucuguuggcaauaccuuauauuacgugaacaagcaagaagguaagucgcuguauguaaaaggggagccaauaaucaauuucuacgacccgcuagucuuucccagcgaugaguucgacgcguccauuucacaggugaacgaaaagaucaaucagagucucgccuucaucagaaaaucugaugaacugcuucacaacguuaaugugggaaagagcacuaccaacauuaugauaacaaccaucauuaucgucauuaucgugauauugcugcuccugaucgcaguaggccuuuuucuguacugcaaagcuaggugaggacuaguggaagcauuuuccuggcugauuaaaagaaauuacucagcuauggucaucuguuccuguuagaaggcuaugcagcauauuauauacuaugcgcauguuaugaaaugcauaauaaaaaauuuuaaaaaaucuaaaagaucuaaaaaaaaaaaaaaaaaaaaaaaaaaaaaaaaaaaaaaaaaaaaaaaaaaaaaaaaaaaaaaaaugcaucccccccccccccccccccccccccccccccaaaggcucuuuucagagccaccagaauu

SEQ ID NO: 12412 - RNA, 2036 nt, Artificial Sequence
  mRNA product Design h-3 comprising derived and/or modified sequence from HRSV(Memphis-37)__AIY60640.1__F-del (opt4)
gggagacccgugacccggaaguuguacggcuacgcgacuuucccucccacaaacccucgcgcccuuccuuuccuacuugggcccggcagaaagcuuaccauggagcugcccauccugaagaccaacgccaucaccaccauccuggccgccgugacccugugcuucgccagcagccagaacaucaccgaggaguucuaccagagcaccugcagcgccgugagcaagggcuaccugagcgcccugagaaccggcugguacaccagcgugaucaccaucgagcugagcaacaucaaggagaacaagugcaacggcaccgacgccaaggugaagcugaucaagcaggagcuggacaaguacaagaacgccgugaccgagcugcagcugcugaugcagagcacccccgccgccaacaacagagccagaagagagcugcccagauucaugaacuacacccugaacaacaccaagaacaacaacgugacccugagcaagaagagaaagagaagauuccugggcuuccugcugggcgugggcagcgccaucgccagcggcaucgccgugagcaaggugcugcaccuggagggcgaggugaacaagaucaagaacgcccugcugagcaccaacaaggccguggugagccugagcaacggcgugagcgugcugaccagcaaggugcuggaccugaagaacuacaucgacaagcagcugcugcccaucgugaacaagcagagcugcagcaucagcaacaucgagaccgugaucgaguuccagcagaagaacaacagacugcuggagaucaccagagaguucagcgugaacgccggcgugaccacccccgugagcaccuacaugcugaccaacagcgagcugcugagccugaucaacgacaugcccaucaccaacgaccagaagaagcugaugagcaacaacgugcagaucgugagacagcagagcuacagcaucaugagcaucaucaaggaggaggugcuggccuacguggugcagcugccccuguacggcgugaucgacacccccugcuggaagcugcacaccagcccccugugcaccaccaacaccaaggagggcagcaacaucugccugaccagaaccgacagaggcugguacugcgacaacgccggcagcgugagcuucuucccccaggccgagaccugcaaggugcagagcaacagaguguucugcgacaccaugaacagccugacccugcccagcgaggugaaccugugcaacaucgacaucuucaaccccaaguacgacugcaagaucaugaccagcaagaccgacgugagcagcagcgugaucaccagccugggcgccaucgugagcugcuacggcaagaccaagugcaccgccagcaacaagaacagaggcaucaucaagaccuucagcaacggcugcgacuacgugagcaacaagggcguggacaccgugagcgugggcaacacccuguacuacgugaacaagcaggagggcaagagccuguacgugaagggcgagcccaucaucaacuucuacgacccccugguguuccccagcgacgaguucgacgccagcaucagccaggugaacgagaagaucaaccagagccuggccuucaucagaaagagcgacgagcugcugcacaacgugaacgugggcaagagcaccaccaacaucaugaucaccaccaucaucaucgugaucaucgugauccugcugcugcugaucgccgugggccuguuccuguacugcaaggccagaugaggacuaguggaagcauuuuccuggcugauuaaaagaaauuacucagcuauggucaucuguuccuguuagaaggcuaugcagcauauuauauacuaugcgcauguuaugaaaugcauaauaaaaaauuuuaaaaaaucuaaaagaucuaaaaaaaaaaaaaaaaaaaaaaaaaaaaaaaaaaaaaaaaaaaaaaaaaaaaaaaaaaaaaaaaugcaucccccccccccccccccccccccccccccccaaaggcucuuuucagagccaccagaauu

SEQ ID NO: 12413 - RNA, 2036 nt, Artificial Sequence
  mRNA product Design h-3 comprising derived and/or modified sequence from HRSV(Memphis-37)__AIY60640.1__F-del (opt5)
gggagacccgugacccggaaguuguacggcuacgcgacuuucccucccacaaacccucgcgcccuuccuuuccuacuugggcccggcagaaagcuuaccauggagcugcccauccucaagaccaacgccauuacaacgauccuggcugccgugacccuuugcuucgcgagcucccagaauauuacagaagaguuuuaccaaucuaccuguagcgcugucuccaaaggcuaucugucugcccucagaacagggugguacaccagcguuaucacaauugaacuguccaacaucaaggagaauaaaugcaacggaaccgacgccaaggugaaacuuaucaagcaggaacuggauaaguauaaaaaugcugugacggagcuccagcugcugaugcagucuaccccugccgcuaacaaucgggcccgcagagagcucccgcgguucaugaacuacacacugaauaacaccaagaauaacaaugucacacuuagcaaaaagcgcaaaagacgguuucugggcuuccuccugggggugggauccgcgauugccagcggcaucgcuguuucuaaggugcuucaccuggaaggggaggucaacaagauuaaaaaugcccuccuguccaccaacaaggcugugguuagccugucuaacggaguguccguccucacgagcaaagugcuggaccuuaagaauuauaucgauaaacaacugcuccccauugugaacaagcagucuuguuccaucagcaauauugaaacagucaucgaguuucagcagaaaaacaaucgccugcuugagaucaccagagaauuuuccguuaacgccggcgugacaaccccugugucuaccuacaugcugacaaauagcgagcuccugucccugauuaacgacaugcccaucacgaaugaucaaaagaagcucaugagcaacaauguccagauugugcggcagcagucuuauuccaucaugagcauuaucaaagaagagguucuggcguacgugguccaacuuccucuguacggcgugaucgacacccccugcuggaagcuccauacaucuccucuguguaccacaaacaccaaagaagggagcaauauuugccuuacgcgcacagauagaggaugguauugugacaacgccggcuccguuucuuucuucccgcaggcugagaccugcaaggugcagagcaaucgggucuuuugugauaccaugaacucccugacacuccccagcgaggugaaccugugcaauaucgacauuuucaacccuaaauacgauuguaagaucaugaccucuaagacagacgucuccagcucugugauuacgucccugggggccaucguuagcugcuauggaaaaaccaagugcacagcuuccaauaaaaaccgcggcaucauuaagaccuuuucuaaugggugugauuacgugagcaacaaaggagucgacacaguguccguuggcaauacccucuauuacgugaacaagcaagaaggcaagucucuguaugucaaaggggagcccaucauuaauuucuacgacccucuuguguuucccagcgaugaguucgacgccuccaucagccaggugaacgaaaagauuaaucagucucuggccuucaucagaaaauccgaugaacuccugcacaacguuaaugucggaaagagcacgaccaacauuaugaucacaaccaucauuaucgugauuaucgugauucugcuucuccugaucgcugucggccuguuucucuacugcaaagcgcggugaggacuaguggaagcauuuuccuggcugauuaaaagaaauuacucagcuauggucaucuguuccuguuagaaggcuaugcagcauauuauauacuaugcgcauguuaugaaaugcauaauaaaaaauuuuaaaaaaucuaaaagaucuaaaaaaaaaaaaaaaaaaaaaaaaaaaaaaaaaaaaaaaaaaaaaaaaaaaaaaaaaaaaaaaaugcaucccccccccccccccccccccccccccccccaaaggcucuuuucagagccaccagaauu

SEQ ID NO: 12414 - RNA, 2036 nt, Artificial Sequence
  mRNA product Design h-3 comprising derived and/or modified sequence from HRSV(Memphis-37)__AIY60640.1__F-del (opt6)
gggagacccgugacccggaaguuguacggcuacgcgacuuucccucccacaaacccucgcgcccuuccuuuccuacuugggcccggcagaaagcuuaccauggaacucccaauauuaaaaacuaacgcaaucacaaccauauuagcagccgucacucuaugcuuugccuccucacaaaauauaacagaagaauuuuaccaauccacaugcucagccguuagcaaaggauaucuaucagcccuaagaacaggcugguauacuucaguaauaacaauagaacuaucaaauauaaaagaaaacaaaugcaacggaaccgacgcuaaaguaaagcucauaaaacaagaauuagacaaauacaaaaaugcaguaacagaacuacaacuccuaaugcaaucaaccccagccgccaauaacagagcuagacgagaacuaccccgauucaugaauuacacacuaaacaacacaaaaaacaacaauguaacacucucaaaaaaaagaaaacgaagauucuuagguuuucuccugggaguaggaucagcaaucgcuuccggaaucgcagucaguaaaguccuucaccuugaaggcgaaguaaacaaaauaaaaaaugcacuacuaucuacaaauaaagcaguaguaucccuauccaauggcgucucaguauuaaccucaaaaguacucgaccuuaaaaauuauauagacaaacaauuacuacccauagucaauaaacaauccuguuccauaucaaacauagaaacaguaaucgaauuucaacaaaaaaacaacagauuacuagaaauaacacgcgaauuuucagucaacgccggaguaaccacacccgucucaacauacaugcuaaccaacuccgaacuacuaucacuuaucaacgacaugccaauaacaaaugaccaaaaaaaacucaugucaaacaacguacaaauaguccgccaacaaucauacucuauaaugucuauuaucaaagaagaaguucucgcauacguaguacaacuaccacuauauggugucauagacacaccauguuggaaacuccauacaucacccuuauguacaaccaauacaaaagaaggcucaaacaucugccuaacucgaacagaccgaggaugguacugcgacaaugcaggaucugucucauucuucccucaagcagaaacauguaaaguucaaucuaauagaguuuucugcgauacaaugaacucacuaacucuaccaucagaaguaaaucucuguaauauugacauauucaacccaaaauacgauugcaagaucaugacaucaaaaacugacguaucauccucagucaucaccucauuaggagcaaucguaagcuguuacgggaaaacaaaaugcaccgcuucuaacaaaaauagaggaauaauuaaaaccuucucaaacggaugcgauuacgucuccaauaaaggaguagauacaguaagcguaggaaauacucuauacuacgucaauaaacaagaaggaaaaucacuuuaugucaaaggagaacccauaauaaauuucuacgacccauuagucuucccaucagaugaauuugacgcauccauaucccaagucaacgaaaaaaucaaucaaucacuagcauucauacgaaaaucagacgaacuacuacacaacguuaacguaggaaaaucaacaaccaacaucaugauaaccacuauaauaaucgucauaauagucauccuauuauuacuaauagccguaggccuuuuccuauacuguaaagcuagauaaggacuaguggaagcauuuuccuggcugauuaaaagaaauuacucagcuauggucaucuguuccuguuagaaggcuaugcagcauauuauauacuaugcgcauguuaugaaaugcauaauaaaaaauuuuaaaaaaucuaaaagaucuaaaaaaaaaaaaaaaaaaaaaaaaaaaaaaaaaaaaaaaaaaaaaaaaaaaaaaaaaaaaaaaaugcaucccccccccccccccccccccccccccccccaaaggcucuuuucagagccaccagaauu

SEQ ID NO: 12415 - RNA, 2036 nt, Artificial Sequence
  mRNA product Design h-3 comprising derived and/or modified sequence from HRSV(Memphis-37)__AIY60640.1__F-del (opt11)
gggagacccgugacccggaaguuguacggcuacgcgacuuucccucccacaaacccucgcgcccuuccuuuccuacuugggcccggcagaaagcuuaccauggaacucccgauccucaaaaccaacgccaucaccacuauccucgccgccguaacccucugcuucgccucaucccaaaacaucaccgaagaauuuuaccaauccacaugcuccgccgucuccaaagguuaccucucagcccuccgcaccggcugguacaccuccguuaucaccaucgaacuuuccaacauaaaagagaacaagugcaacggcaccgacgcaaaaguaaaacuaaucaaacaagaacuagacaaauacaaaaacgccgucaccgaacuccagcuccucaugcaaucgacgcccgccgccaacaaccgagcaaggcgcgaacuuccacgcuucaugaacuacacccucaacaacacuaaaaacaacaacgugacccuauccaaaaagcguaaacgccgauuccuagguuuccuucucggugucggcuccgccauugccuccggcaucgcuguuuccaaaguccuccaccucgaaggcgaaguaaacaagauaaaaaacgcccuccucucuacaaacaaggccgugguaucgcucucuaacggcgucucuguacucaccuccaaaguccucgaccucaaaaacuacaucgacaagcaacuccucccuaucgucaauaaacaauccugcuccauuuccaacaucgaaacagugaucgaauuucaacaaaaaaacaaccgauuacuagaaaucacccgcgaauuuucagucaacgccggcgucacaacgccagucucaaccuacaugcucaccaacucagaacucuuaucacucaucaacgacaugcccaucacuaacgaccagaaaaaacugauguccaacaacgugcaaauaguccgccaacaguccuacuccaucauguccauaaucaaggaggaggugcucgccuacguaguccaacucccccucuacggagucauugacaccccuugcuggaaacuacacaccuccccucucugcaccaccaacaccaaagaaggcagcaacaucugccuaaccaggacggaccgaggaugguacugcgacaaugcaggcuccgucagcuucuucccacaagccgaaacaugcaaaguucaaucaaaccguguauucugcgacaccaugaacucacucacccuccccucagaaguaaaccuaugcaacauagauaucuucaaccccaaauacgacugcaaaauuaugaccuccaaaaccgaugucuccagcuccguuaucacgucacucggcgccaucgucuccugcuacggcaagaccaaaugcaccgccuccaacaaaaaccgcggaauaaucaaaacauucucuaacggcugcgacuacgucuccaauaaaggcgucgacaccgucuccgugggcaacacgcuguacuacgucaacaaacaagaaggcaaaucucuuuacgucaaaggugaaccaaucaucaacuucuacgacccccucguauuccccuccgacgaauuugacgcgagcaucucccaagucaacgaaaagaucaaccaaucccucgccuucauccgaaaaagcgacgaacuccuccacaacgucaacgucggcaaaaguaccacaaacauuaugaucaccaccaucaucauagucaucaucgucauccugcuccuacuaauagccgucggccucuucuuguacugcaaggcacgaugaggacuaguggaagcauuuuccuggcugauuaaaagaaauuacucagcuauggucaucuguuccuguuagaaggcuaugcagcauauuauauacuaugcgcauguuaugaaaugcauaauaaaaaauuuuaaaaaaucuaaaagaucuaaaaaaaaaaaaaaaaaaaaaaaaaaaaaaaaaaaaaaaaaaaaaaaaaaaaaaaaaaaaaaaaugcaucccccccccccccccccccccccccccccccaaaggcucuuuucagagccaccagaauu

SEQ ID NO: 12416 - RNA, 2099 nt, Artificial Sequence
  mRNA product Design h-4 comprising derived and/or modified sequence from HRSV(Memphis-37)__AIY60640.1__F-del (wt)
gggagagggcgcuuggcuugcaaggacccugagcugcggcauugaagcacacccaacccaacucgacugaagucagccucacugaaccggaucugagaaucuucucucucugggcuugccagggcucuccgaaccuagcuagcauccucuucaauuccaacuagaaagcuuaccauggaguugccaauccucaaaacaaaugcaauuaccacaauccuugcugcagucacacucuguuucgcuuccagucaaaacaucacugaagaauuuuaucaaucaacaugcagugcaguuagcaaaggcuaucuuagugcuuuaagaacugguugguauacuaguguuauaacuauagaauuaaguaauaucaaggaaaauaaguguaauggaacagaugcuaagguaaaauugauaaaacaagaauuagauaaauauaaaaaugcuguaacagaauugcaguugcucaugcaaagcacaccagcagccaacaaucgagccagaagagaacuaccaagguuuaugaauuauacacucaacaauaccaaaaauaacaauguaacauuaagcaagaaaaggaaaagaagauuucuuggcuuuuuguuagguguuggaucugcaaucgccaguggcauugcuguaucuaaaguccugcaccuagaaggggaagugaacaaaaucaaaaaugcucuacuauccacaaacaaggcuguagucagcuuaucaaauggaguuagugucuuaaccagcaaaguguuagaccucaaaaacuauauagauaaacaguuguuacccauugugaacaagcaaagcugcagcauaucaaacauugaaacugugauagaauuccaacaaaagaacaacagacuacuagagauuaccagggaauuuaguguuaaugcagguguaacuacaccuguaagcacuuauauguuaacaaauagugaauuauuaucauuaaucaaugauaugccuauaacaaaugaucagaaaaaguuaauguccaacaauguucaaauaguuagacagcaaaguuacucuaucauguccauaauaaaggaggaagucuuagcauauguaguucaauuaccacuauaugguguaauagauacaccuuguuggaaacuacacacauccccucuaugcacaaccaacacaaaggaaggguccaacaucuguuuaacaagaaccgacagaggaugguacugugacaaugcaggaucagugucuuucuucccacaagcugaaacaugcaaaguucaaucgaaucgaguauuuugugacacaaugaacagucuaacauuaccaagugaaguaaaucucugcaacauugacauauucaacccuaaauaugauugcaaaauuaugacuucaaaaacagaugugagcagcuccguuaucacaucucuaggagccauugugucaugcuauggcaaaacuaaauguacagcauccaauaaaaaucguggaaucauaaagacauuuucuaacgggugugauuauguaucaaauaaggggguggacacuguaucuguagguaauacauuauauuauguaaauaagcaagaaggaaaaagccucuauguaaaaggugaaccaauaauaaauuucuaugacccauuaguguucccuucugaugaauuugaugcaucaauaucucaagucaaugagaagauuaaccagagccuagcauuuauucguaaauccgaugaauuauuacauaauguaaauguugguaaauccaccacaaauaucaugauaacuacuauaauuauagugauuauaguaauauuguuauuauuaauugcaguugggcuguuccuauacugcaaggccagaugaggacuaguaauaaggaaacuguaugaaugucugugggcaggaagugaagagauccuucuguaaagguuuuuggaauuaugucugcugaauaauaaacuuuuuugaaauaauaaaucugguagaaaaaugagaucuaaaaaaaaaaaaaaaaaaaaaaaaaaaaaaaaaaaaaaaaaaaaaaaaaaaaaaaaaaaaaaaaugcaucccccccccccccccccccccccccccccccaaaggcucuuuucagagccaccagaauu

SEQ ID NO: 12417 - RNA, 2099 nt, Artificial Sequence
  mRNA product Design h-4 comprising derived and/or modified sequence from HRSV(Memphis-37)__AIY60640.1__F-del (opt1)
gggagagggcgcuuggcuugcaaggacccugagcugcggcauugaagcacacccaacccaacucgacugaagucagccucacugaaccggaucugagaaucuucucucucugggcuugccagggcucuccgaaccuagcuagcauccucuucaauuccaacuagaaagcuuaccauggagcugcccauccucaagaccaacgccaucaccacgauccuggccgcggugacccugugcuucgccagcucccagaacaucaccgaggaguucuaccagagcacgugcuccgccgucagcaagggcuaccucuccgcccugcgcaccgggugguacaccagcgugaucaccaucgagcuguccaacaucaaggagaacaagugcaacggcaccgacgccaaggugaagcucaucaagcaggagcuggacaaguacaagaacgcggucacggagcugcagcuccugaugcagagcaccccggccgccaacaaccgggcccgccgggagcugccccgcuucaugaacuacacccucaacaacaccaagaacaacaacgugacgcuguccaagaagcggaagcgccgguuccugggguuccuccugggcguggggagcgcgaucgccuccggcaucgccgucagcaaggugcugcaccucgagggcgaggugaacaagaucaagaacgcccugcuguccaccaacaaggccgucgugagccucuccaacggggugagcguccugaccuccaaggugcuggaccucaagaacuacaucgacaagcagcugcugcccaucgugaacaagcagagcugcuccaucagcaacaucgagaccgucaucgaguuccagcagaagaacaaccgccuccuggagaucacgcgggaguucagcgugaacgcgggcgugaccacccccgucuccaccuacaugcugacgaacagcgagcuccugucccugaucaacgacaugccgaucaccaacgaccagaagaagcucaugagcaacaacgugcagaucgugcgccagcaguccuacagcaucauguccaucaucaaggaggagguccuggccuacguggugcagcugccccucuacggggucaucgacacccccugcuggaagcugcacaccagcccccugugcacgaccaacaccaaggagggcuccaacaucugccucacccggacggaccgcgggugguacugcgacaacgccggcagcguguccuucuucccgcaggccgagaccugcaagguccagagcaaccggguguucugcgacaccaugaacucccugacccugcccagcgaggugaaccucugcaacaucgacaucuucaaccccaaguacgacugcaagaucaugacguccaagaccgacgucagcuccagcgugaucaccucccugggcgccaucgugagcugcuacgggaagaccaagugcacggcgagcaacaagaaccgcggcaucaucaagaccuucuccaacgggugcgacuacgucagcaacaagggcguggacaccguguccgucggcaacacccuguacuacgugaacaagcaggagggcaagagccucuacgugaagggggagcccaucaucaacuucuacgacccgcuggucuuccccuccgacgaguucgacgccagcaucucccaggugaacgagaagaucaaccagagccuggccuucauccggaaguccgacgagcuccugcacaacgugaacgucggcaagagcaccacgaacaucaugaucaccaccaucaucaucgugaucaucgugauccugcugcuccugaucgccgucgggcuguuccucuacugcaaggcccgcugaggacuaguaauaaggaaacuguaugaaugucugugggcaggaagugaagagauccuucuguaaagguuuuuggaauuaugucugcugaauaauaaacuuuuuugaaauaauaaaucugguagaaaaaugagaucuaaaaaaaaaaaaaaaaaaaaaaaaaaaaaaaaaaaaaaaaaaaaaaaaaaaaaaaaaaaaaaaaugcaucccccccccccccccccccccccccccccccaaaggcucuuuucagagccaccagaauu

SEQ ID NO: 12418 - RNA, 2099 nt, Artificial Sequence
  mRNA product Design h-4 comprising derived and/or modified sequence from HRSV(Memphis-37)__AIY60640.1__F-del (opt2)
gggagagggcgcuuggcuugcaaggacccugagcugcggcauugaagcacacccaacccaacucgacugaagucagccucacugaaccggaucugagaaucuucucucucugggcuugccagggcucuccgaaccuagcuagcauccucuucaauuccaacuagaaagcuuaccauggagcuccccauccucaagaccaacgccaucaccaccauccucgccgccgucacccucugcuucgccuccucccagaacaucaccgaggaguucuaccaguccaccugcuccgccgucuccaagggcuaccucuccgcccuccgcaccggcugguacaccuccgucaucaccaucgagcucuccaacaucaaggagaacaagugcaacggcaccgacgccaaggucaagcucaucaagcaggagcucgacaaguacaagaacgccgucaccgagcuccagcuccucaugcaguccacccccgccgccaacaaccgcgcccgccgcgagcucccccgcuucaugaacuacacccucaacaacaccaagaacaacaacgucacccucuccaagaagcgcaagcgccgcuuccucggcuuccuccucggcgucggcuccgccaucgccuccggcaucgccgucuccaagguccuccaccucgagggcgaggucaacaagaucaagaacgcccuccucuccaccaacaaggccgucgucucccucuccaacggcgucuccguccucaccuccaagguccucgaccucaagaacuacaucgacaagcagcuccuccccaucgucaacaagcaguccugcuccaucuccaacaucgagaccgucaucgaguuccagcagaagaacaaccgccuccucgagaucacccgcgaguucuccgucaacgccggcgucaccacccccgucuccaccuacaugcucaccaacuccgagcuccucucccucaucaacgacaugcccaucaccaacgaccagaagaagcucauguccaacaacguccagaucguccgccagcaguccuacuccaucauguccaucaucaaggaggagguccucgccuacgucguccagcucccccucuacggcgucaucgacacccccugcuggaagcuccacaccuccccccucugcaccaccaacaccaaggagggcuccaacaucugccucacccgcaccgaccgcggcugguacugcgacaacgccggcuccgucuccuucuucccccaggccgagaccugcaagguccaguccaaccgcgucuucugcgacaccaugaacucccucacccuccccuccgaggucaaccucugcaacaucgacaucuucaaccccaaguacgacugcaagaucaugaccuccaagaccgacgucuccuccuccgucaucaccucccucggcgccaucgucuccugcuacggcaagaccaagugcaccgccuccaacaagaaccgcggcaucaucaagaccuucuccaacggcugcgacuacgucuccaacaagggcgucgacaccgucuccgucggcaacacccucuacuacgucaacaagcaggagggcaagucccucuacgucaagggcgagcccaucaucaacuucuacgacccccucgucuuccccuccgacgaguucgacgccuccaucucccaggucaacgagaagaucaaccagucccucgccuucauccgcaaguccgacgagcuccuccacaacgucaacgucggcaaguccaccaccaacaucaugaucaccaccaucaucaucgucaucaucgucauccuccuccuccucaucgccgucggccucuuccucuacugcaaggcccgcugaggacuaguaauaaggaaacuguaugaaugucugugggcaggaagugaagagauccuucuguaaagguuuuuggaauuaugucugcugaauaauaaacuuuuuugaaauaauaaaucugguagaaaaaugagaucuaaaaaaaaaaaaaaaaaaaaaaaaaaaaaaaaaaaaaaaaaaaaaaaaaaaaaaaaaaaaaaaaugcaucccccccccccccccccccccccccccccccaaaggcucuuuucagagccaccagaauu

SEQ ID NO: 12419 - RNA, 2099 nt, Artificial Sequence
  mRNA product Design h-4 comprising derived and/or modified sequence from HRSV(Memphis-37)__AIY60640.1__F-del (opt3)
gggagagggcgcuuggcuugcaaggacccugagcugcggcauugaagcacacccaacccaacucgacugaagucagccucacugaaccggaucugagaaucuucucucucugggcuugccagggcucuccgaaccuagcuagcauccucuucaauuccaacuagaaagcuuaccauggagcugcccauccucaagaccaacgccauuacaacuauacuugcugcagugacgcugugcuucgccagcucccagaauaucaccgaagaguuuuaccaaucuacauguucagcggucaguaaaggcuauuugagcgcuuuaagaacugggugguacaccuccguuauuacaaucgaacugucuaacauuaaggagaauaaaugcaacggaaccgacgccaaggugaaacuaaucaagcaggaacucgauaaguauaaaaaugcaguaacugagcugcagcuucugaugcagucgaccccugccgcuaacaauagggcacggcgcgaguugccacgauucaugaacuacacacucaauaacacgaagaauaacaaugugacucugagcaaaaagcguaaaagaagguuucuggguuuccucuuaggcgucgggucagccauagcuaguggaaucgccguguccaagguucugcaccuugaaggcgaggugaacaagauuaaaaaugcguugcugucuaccaacaaggcagucgugagccuauccaacgguguaucaguucucacaaguaaagugcuggaccuuaagaauuauaucgauaaacaacuguugccgauugucaacaagcagagcuguucuaucuccaauauagaaacugugauugaguuucagcagaaaaacaaucggcuccuggagaucacccgcgaguucucagugaacgccggggucacaacccccguuagcacguacauguuaacuaauagugaacugcucucucuuauuaacgacaugccuaucacaaaugaucaaaagaagcugauguccaacaaugugcagaucguaagacagcagagcuauucgauuaugucuauaaucaaagaagagguguuggcuuacgucgugcaacuaccacuguacggaguuauugacacccccugcuggaagcuccauacuuccccucuguguacaaccaacacgaaagaaggcucaaauaucugccuuaccaggacagaucggggcugguauugugacaacgccgggagugugagcuuuuucccacaggcagagacuugcaagguccaguccaaucgcguguuuugugauaccaugaacucucugacauugcccagcgagguaaaccucugcaauauagacauuuucaacccuaaauacgauuguaagaucaugacuucaaagaccgacguuaguuccagcgugaucacaucucugggagcuauugucucaugcuaugguaaaaccaagugcacugccaguaauaaaaaccgaggcaucauuaagacguuuagcaaugggugugauuacguguccaacaaaggagucgacacagugucuguuggcaauaccuuauauuacgugaacaagcaagaagguaagucgcuguauguaaaaggggagccaauaaucaauuucuacgacccgcuagucuuucccagcgaugaguucgacgcguccauuucacaggugaacgaaaagaucaaucagagucucgccuucaucagaaaaucugaugaacugcuucacaacguuaaugugggaaagagcacuaccaacauuaugauaacaaccaucauuaucgucauuaucgugauauugcugcuccugaucgcaguaggccuuuuucuguacugcaaagcuaggugaggacuaguaauaaggaaacuguaugaaugucugugggcaggaagugaagagauccuucuguaaagguuuuuggaauuaugucugcugaauaauaaacuuuuuugaaauaauaaaucugguagaaaaaugagaucuaaaaaaaaaaaaaaaaaaaaaaaaaaaaaaaaaaaaaaaaaaaaaaaaaaaaaaaaaaaaaaaaugcaucccccccccccccccccccccccccccccccaaaggcucuuuucagagccaccagaauu

SEQ ID NO: 12420 - RNA, 2099 nt, Artificial Sequence
  mRNA product Design h-4 comprising derived and/or modified sequence from HRSV(Memphis-37)__AIY60640.1__F-del (opt4)
gggagagggcgcuuggcuugcaaggacccugagcugcggcauugaagcacacccaacccaacucgacugaagucagccucacugaaccggaucugagaaucuucucucucugggcuugccagggcucuccgaaccuagcuagcauccucuucaauuccaacuagaaagcuuaccauggagcugcccauccugaagaccaacgccaucaccaccauccuggccgccgugacccugugcuucgccagcagccagaacaucaccgaggaguucuaccagagcaccugcagcgccgugagcaagggcuaccugagcgcccugagaaccggcugguacaccagcgugaucaccaucgagcugagcaacaucaaggagaacaagugcaacggcaccgacgccaaggugaagcugaucaagcaggagcuggacaaguacaagaacgccgugaccgagcugcagcugcugaugcagagcacccccgccgccaacaacagagccagaagagagcugcccagauucaugaacuacacccugaacaacaccaagaacaacaacgugacccugagcaagaagagaaagagaagauuccugggcuuccugcugggcgugggcagcgccaucgccagcggcaucgccgugagcaaggugcugcaccuggagggcgaggugaacaagaucaagaacgcccugcugagcaccaacaaggccguggugagccugagcaacggcgugagcgugcugaccagcaaggugcuggaccugaagaacuacaucgacaagcagcugcugcccaucgugaacaagcagagcugcagcaucagcaacaucgagaccgugaucgaguuccagcagaagaacaacagacugcuggagaucaccagagaguucagcgugaacgccggcgugaccacccccgugagcaccuacaugcugaccaacagcgagcugcugagccugaucaacgacaugcccaucaccaacgaccagaagaagcugaugagcaacaacgugcagaucgugagacagcagagcuacagcaucaugagcaucaucaaggaggaggugcuggccuacguggugcagcugccccuguacggcgugaucgacacccccugcuggaagcugcacaccagcccccugugcaccaccaacaccaaggagggcagcaacaucugccugaccagaaccgacagaggcugguacugcgacaacgccggcagcgugagcuucuucccccaggccgagaccugcaaggugcagagcaacagaguguucugcgacaccaugaacagccugacccugcccagcgaggugaaccugugcaacaucgacaucuucaaccccaaguacgacugcaagaucaugaccagcaagaccgacgugagcagcagcgugaucaccagccugggcgccaucgugagcugcuacggcaagaccaagugcaccgccagcaacaagaacagaggcaucaucaagaccuucagcaacggcugcgacuacgugagcaacaagggcguggacaccgugagcgugggcaacacccuguacuacgugaacaagcaggagggcaagagccuguacgugaagggcgagcccaucaucaacuucuacgacccccugguguuccccagcgacgaguucgacgccagcaucagccaggugaacgagaagaucaaccagagccuggccuucaucagaaagagcgacgagcugcugcacaacgugaacgugggcaagagcaccaccaacaucaugaucaccaccaucaucaucgugaucaucgugauccugcugcugcugaucgccgugggccuguuccuguacugcaaggccagaugaggacuaguaauaaggaaacuguaugaaugucugugggcaggaagugaagagauccuucuguaaagguuuuuggaauuaugucugcugaauaauaaacuuuuuugaaauaauaaaucugguagaaaaaugagaucuaaaaaaaaaaaaaaaaaaaaaaaaaaaaaaaaaaaaaaaaaaaaaaaaaaaaaaaaaaaaaaaaugcaucccccccccccccccccccccccccccccccaaaggcucuuuucagagccaccagaauu

SEQ ID NO: 12421 - RNA, 2099 nt, Artificial Sequence
  mRNA product Design h-4 comprising derived and/or modified sequence from HRSV(Memphis-37)__AIY60640.1__F-del (opt5)
gggagagggcgcuuggcuugcaaggacccugagcugcggcauugaagcacacccaacccaacucgacugaagucagccucacugaaccggaucugagaaucuucucucucugggcuugccagggcucuccgaaccuagcuagcauccucuucaauuccaacuagaaagcuuaccauggagcugcccauccucaagaccaacgccauuacaacgauccuggcugccgugacccuuugcuucgcgagcucccagaauauuacagaagaguuuuaccaaucuaccuguagcgcugucuccaaaggcuaucugucugcccucagaacagggugguacaccagcguuaucacaauugaacuguccaacaucaaggagaauaaaugcaacggaaccgacgccaaggugaaacuuaucaagcaggaacuggauaaguauaaaaaugcugugacggagcuccagcugcugaugcagucuaccccugccgcuaacaaucgggcccgcagagagcucccgcgguucaugaacuacacacugaauaacaccaagaauaacaaugucacacuuagcaaaaagcgcaaaagacgguuucugggcuuccuccugggggugggauccgcgauugccagcggcaucgcuguuucuaaggugcuucaccuggaaggggaggucaacaagauuaaaaaugcccuccuguccaccaacaaggcugugguuagccugucuaacggaguguccguccucacgagcaaagugcuggaccuuaagaauuauaucgauaaacaacugcuccccauugugaacaagcagucuuguuccaucagcaauauugaaacagucaucgaguuucagcagaaaaacaaucgccugcuugagaucaccagagaauuuuccguuaacgccggcgugacaaccccugugucuaccuacaugcugacaaauagcgagcuccugucccugauuaacgacaugcccaucacgaaugaucaaaagaagcucaugagcaacaauguccagauugugcggcagcagucuuauuccaucaugagcauuaucaaagaagagguucuggcguacgugguccaacuuccucuguacggcgugaucgacacccccugcuggaagcuccauacaucuccucuguguaccacaaacaccaaagaagggagcaauauuugccuuacgcgcacagauagaggaugguauugugacaacgccggcuccguuucuuucuucccgcaggcugagaccugcaaggugcagagcaaucgggucuuuugugauaccaugaacucccugacacuccccagcgaggugaaccugugcaauaucgacauuuucaacccuaaauacgauuguaagaucaugaccucuaagacagacgucuccagcucugugauuacgucccugggggccaucguuagcugcuauggaaaaaccaagugcacagcuuccaauaaaaaccgcggcaucauuaagaccuuuucuaaugggugugauuacgugagcaacaaaggagucgacacaguguccguuggcaauacccucuauuacgugaacaagcaagaaggcaagucucuguaugucaaaggggagcccaucauuaauuucuacgacccucuuguguuucccagcgaugaguucgacgccuccaucagccaggugaacgaaaagauuaaucagucucuggccuucaucagaaaauccgaugaacuccugcacaacguuaaugucggaaagagcacgaccaacauuaugaucacaaccaucauuaucgugauuaucgugauucugcuucuccugaucgcugucggccuguuucucuacugcaaagcgcggugaggacuaguaauaaggaaacuguaugaaugucugugggcaggaagugaagagauccuucuguaaagguuuuuggaauuaugucugcugaauaauaaacuuuuuugaaauaauaaaucugguagaaaaaugagaucuaaaaaaaaaaaaaaaaaaaaaaaaaaaaaaaaaaaaaaaaaaaaaaaaaaaaaaaaaaaaaaaaugcaucccccccccccccccccccccccccccccccaaaggcucuuuucagagccaccagaauu

SEQ ID NO: 12422 - RNA, 2099 nt, Artificial Sequence
  mRNA product Design h-4 comprising derived and/or modified sequence from HRSV(Memphis-37)__AIY60640.1__F-del (opt6)
gggagagggcgcuuggcuugcaaggacccugagcugcggcauugaagcacacccaacccaacucgacugaagucagccucacugaaccggaucugagaaucuucucucucugggcuugccagggcucuccgaaccuagcuagcauccucuucaauuccaacuagaaagcuuaccauggaacucccaauauuaaaaacuaacgcaaucacaaccauauuagcagccgucacucuaugcuuugccuccucacaaaauauaacagaagaauuuuaccaauccacaugcucagccguuagcaaaggauaucuaucagcccuaagaacaggcugguauacuucaguaauaacaauagaacuaucaaauauaaaagaaaacaaaugcaacggaaccgacgcuaaaguaaagcucauaaaacaagaauuagacaaauacaaaaaugcaguaacagaacuacaacuccuaaugcaaucaaccccagccgccaauaacagagcuagacgagaacuaccccgauucaugaauuacacacuaaacaacacaaaaaacaacaauguaacacucucaaaaaaaagaaaacgaagauucuuagguuuucuccugggaguaggaucagcaaucgcuuccggaaucgcagucaguaaaguccuucaccuugaaggcgaaguaaacaaaauaaaaaaugcacuacuaucuacaaauaaagcaguaguaucccuauccaauggcgucucaguauuaaccucaaaaguacucgaccuuaaaaauuauauagacaaacaauuacuacccauagucaauaaacaauccuguuccauaucaaacauagaaacaguaaucgaauuucaacaaaaaaacaacagauuacuagaaauaacacgcgaauuuucagucaacgccggaguaaccacacccgucucaacauacaugcuaaccaacuccgaacuacuaucacuuaucaacgacaugccaauaacaaaugaccaaaaaaaacucaugucaaacaacguacaaauaguccgccaacaaucauacucuauaaugucuauuaucaaagaagaaguucucgcauacguaguacaacuaccacuauauggugucauagacacaccauguuggaaacuccauacaucacccuuauguacaaccaauacaaaagaaggcucaaacaucugccuaacucgaacagaccgaggaugguacugcgacaaugcaggaucugucucauucuucccucaagcagaaacauguaaaguucaaucuaauagaguuuucugcgauacaaugaacucacuaacucuaccaucagaaguaaaucucuguaauauugacauauucaacccaaaauacgauugcaagaucaugacaucaaaaacugacguaucauccucagucaucaccucauuaggagcaaucguaagcuguuacgggaaaacaaaaugcaccgcuucuaacaaaaauagaggaauaauuaaaaccuucucaaacggaugcgauuacgucuccaauaaaggaguagauacaguaagcguaggaaauacucuauacuacgucaauaaacaagaaggaaaaucacuuuaugucaaaggagaacccauaauaaauuucuacgacccauuagucuucccaucagaugaauuugacgcauccauaucccaagucaacgaaaaaaucaaucaaucacuagcauucauacgaaaaucagacgaacuacuacacaacguuaacguaggaaaaucaacaaccaacaucaugauaaccacuauaauaaucgucauaauagucauccuauuauuacuaauagccguaggccuuuuccuauacuguaaagcuagauaaggacuaguaauaaggaaacuguaugaaugucugugggcaggaagugaagagauccuucuguaaagguuuuuggaauuaugucugcugaauaauaaacuuuuuugaaauaauaaaucugguagaaaaaugagaucuaaaaaaaaaaaaaaaaaaaaaaaaaaaaaaaaaaaaaaaaaaaaaaaaaaaaaaaaaaaaaaaaugcaucccccccccccccccccccccccccccccccaaaggcucuuuucagagccaccagaauu

SEQ ID NO: 12423 - RNA, 2099 nt, Artificial Sequence
  mRNA product Design h-4 comprising derived and/or modified sequence from HRSV(Memphis-37)__AIY60640.1__F-del (opt11)
gggagagggcgcuuggcuugcaaggacccugagcugcggcauugaagcacacccaacccaacucgacugaagucagccucacugaaccggaucugagaaucuucucucucugggcuugccagggcucuccgaaccuagcuagcauccucuucaauuccaacuagaaagcuuaccauggaacucccgauccucaaaaccaacgccaucaccacuauccucgccgccguaacccucugcuucgccucaucccaaaacaucaccgaagaauuuuaccaauccacaugcuccgccgucuccaaagguuaccucucagcccuccgcaccggcugguacaccuccguuaucaccaucgaacuuuccaacauaaaagagaacaagugcaacggcaccgacgcaaaaguaaaacuaaucaaacaagaacuagacaaauacaaaaacgccgucaccgaacuccagcuccucaugcaaucgacgcccgccgccaacaaccgagcaaggcgcgaacuuccacgcuucaugaacuacacccucaacaacacuaaaaacaacaacgugacccuauccaaaaagcguaaacgccgauuccuagguuuccuucucggugucggcuccgccauugccuccggcaucgcuguuuccaaaguccuccaccucgaaggcgaaguaaacaagauaaaaaacgcccuccucucuacaaacaaggccgugguaucgcucucuaacggcgucucuguacucaccuccaaaguccucgaccucaaaaacuacaucgacaagcaacuccucccuaucgucaauaaacaauccugcuccauuuccaacaucgaaacagugaucgaauuucaacaaaaaaacaaccgauuacuagaaaucacccgcgaauuuucagucaacgccggcgucacaacgccagucucaaccuacaugcucaccaacucagaacucuuaucacucaucaacgacaugcccaucacuaacgaccagaaaaaacugauguccaacaacgugcaaauaguccgccaacaguccuacuccaucauguccauaaucaaggaggaggugcucgccuacguaguccaacucccccucuacggagucauugacaccccuugcuggaaacuacacaccuccccucucugcaccaccaacaccaaagaaggcagcaacaucugccuaaccaggacggaccgaggaugguacugcgacaaugcaggcuccgucagcuucuucccacaagccgaaacaugcaaaguucaaucaaaccguguauucugcgacaccaugaacucacucacccuccccucagaaguaaaccuaugcaacauagauaucuucaaccccaaauacgacugcaaaauuaugaccuccaaaaccgaugucuccagcuccguuaucacgucacucggcgccaucgucuccugcuacggcaagaccaaaugcaccgccuccaacaaaaaccgcggaauaaucaaaacauucucuaacggcugcgacuacgucuccaauaaaggcgucgacaccgucuccgugggcaacacgcuguacuacgucaacaaacaagaaggcaaaucucuuuacgucaaaggugaaccaaucaucaacuucuacgacccccucguauuccccuccgacgaauuugacgcgagcaucucccaagucaacgaaaagaucaaccaaucccucgccuucauccgaaaaagcgacgaacuccuccacaacgucaacgucggcaaaaguaccacaaacauuaugaucaccaccaucaucauagucaucaucgucauccugcuccuacuaauagccgucggccucuucuuguacugcaaggcacgaugaggacuaguaauaaggaaacuguaugaaugucugugggcaggaagugaagagauccuucuguaaagguuuuuggaauuaugucugcugaauaauaaacuuuuuugaaauaauaaaucugguagaaaaaugagaucuaaaaaaaaaaaaaaaaaaaaaaaaaaaaaaaaaaaaaaaaaaaaaaaaaaaaaaaaaaaaaaaaugcaucccccccccccccccccccccccccccccccaaaggcucuuuucagagccaccagaauu

SEQ ID NO: 12424 - RNA, 2115 nt, Artificial Sequence
  mRNA product Design h-5 comprising derived and/or modified sequence from HRSV(Memphis-37)__AIY60640.1__F-del (wt)
gggagagggcgcuuggcuugcaaggacccugagcugcggcauugaagcacacccaacccaacucgacugaagucagccucacugaaccggaucugagaaucuucucucucugggcuugccagggcucuccgaaccuagcuagcauccucuucaauuccaacuagaaagcuuaccauggaguugccaauccucaaaacaaaugcaauuaccacaauccuugcugcagucacacucuguuucgcuuccagucaaaacaucacugaagaauuuuaucaaucaacaugcagugcaguuagcaaaggcuaucuuagugcuuuaagaacugguugguauacuaguguuauaacuauagaauuaaguaauaucaaggaaaauaaguguaauggaacagaugcuaagguaaaauugauaaaacaagaauuagauaaauauaaaaaugcuguaacagaauugcaguugcucaugcaaagcacaccagcagccaacaaucgagccagaagagaacuaccaagguuuaugaauuauacacucaacaauaccaaaaauaacaauguaacauuaagcaagaaaaggaaaagaagauuucuuggcuuuuuguuagguguuggaucugcaaucgccaguggcauugcuguaucuaaaguccugcaccuagaaggggaagugaacaaaaucaaaaaugcucuacuauccacaaacaaggcuguagucagcuuaucaaauggaguuagugucuuaaccagcaaaguguuagaccucaaaaacuauauagauaaacaguuguuacccauugugaacaagcaaagcugcagcauaucaaacauugaaacugugauagaauuccaacaaaagaacaacagacuacuagagauuaccagggaauuuaguguuaaugcagguguaacuacaccuguaagcacuuauauguuaacaaauagugaauuauuaucauuaaucaaugauaugccuauaacaaaugaucagaaaaaguuaauguccaacaauguucaaauaguuagacagcaaaguuacucuaucauguccauaauaaaggaggaagucuuagcauauguaguucaauuaccacuauaugguguaauagauacaccuuguuggaaacuacacacauccccucuaugcacaaccaacacaaaggaaggguccaacaucuguuuaacaagaaccgacagaggaugguacugugacaaugcaggaucagugucuuucuucccacaagcugaaacaugcaaaguucaaucgaaucgaguauuuugugacacaaugaacagucuaacauuaccaagugaaguaaaucucugcaacauugacauauucaacccuaaauaugauugcaaaauuaugacuucaaaaacagaugugagcagcuccguuaucacaucucuaggagccauugugucaugcuauggcaaaacuaaauguacagcauccaauaaaaaucguggaaucauaaagacauuuucuaacgggugugauuauguaucaaauaaggggguggacacuguaucuguagguaauacauuauauuauguaaauaagcaagaaggaaaaagccucuauguaaaaggugaaccaauaauaaauuucuaugacccauuaguguucccuucugaugaauuugaugcaucaauaucucaagucaaugagaagauuaaccagagccuagcauuuauucguaaauccgaugaauuauuacauaauguaaauguugguaaauccaccacaaauaucaugauaacuacuauaauuauagugauuauaguaauauuguuauuauuaauugcaguugggcuguuccuauacugcaaggccagaugaggacuaguacuggcugcaucucccuuuccucuguccuccauccuucucccaggauggugaagggggaccugguacccagugauccccaccccaggauccuaaaucaugacuuaccugcuaauaaaaacucauuggaaaagugagaagaucuaaaaaaaaaaaaaaaaaaaaaaaaaaaaaaaaaaaaaaaaaaaaaaaaaaaaaaaaaaaaaaaaugcaucccccccccccccccccccccccccccccccaaaggcucuuuucagagccaccagaauu

SEQ ID NO: 12425 - RNA, 2115 nt, Artificial Sequence
  mRNA product Design h-5 comprising derived and/or modified sequence from HRSV(Memphis-37)__AIY60640.1__F-del (opt1)
gggagagggcgcuuggcuugcaaggacccugagcugcggcauugaagcacacccaacccaacucgacugaagucagccucacugaaccggaucugagaaucuucucucucugggcuugccagggcucuccgaaccuagcuagcauccucuucaauuccaacuagaaagcuuaccauggagcugcccauccucaagaccaacgccaucaccacgauccuggccgcggugacccugugcuucgccagcucccagaacaucaccgaggaguucuaccagagcacgugcuccgccgucagcaagggcuaccucuccgcccugcgcaccgggugguacaccagcgugaucaccaucgagcuguccaacaucaaggagaacaagugcaacggcaccgacgccaaggugaagcucaucaagcaggagcuggacaaguacaagaacgcggucacggagcugcagcuccugaugcagagcaccccggccgccaacaaccgggcccgccgggagcugccccgcuucaugaacuacacccucaacaacaccaagaacaacaacgugacgcuguccaagaagcggaagcgccgguuccugggguuccuccugggcguggggagcgcgaucgccuccggcaucgccgucagcaaggugcugcaccucgagggcgaggugaacaagaucaagaacgcccugcuguccaccaacaaggccgucgugagccucuccaacggggugagcguccugaccuccaaggugcuggaccucaagaacuacaucgacaagcagcugcugcccaucgugaacaagcagagcugcuccaucagcaacaucgagaccgucaucgaguuccagcagaagaacaaccgccuccuggagaucacgcgggaguucagcgugaacgcgggcgugaccacccccgucuccaccuacaugcugacgaacagcgagcuccugucccugaucaacgacaugccgaucaccaacgaccagaagaagcucaugagcaacaacgugcagaucgugcgccagcaguccuacagcaucauguccaucaucaaggaggagguccuggccuacguggugcagcugccccucuacggggucaucgacacccccugcuggaagcugcacaccagcccccugugcacgaccaacaccaaggagggcuccaacaucugccucacccggacggaccgcgggugguacugcgacaacgccggcagcguguccuucuucccgcaggccgagaccugcaagguccagagcaaccggguguucugcgacaccaugaacucccugacccugcccagcgaggugaaccucugcaacaucgacaucuucaaccccaaguacgacugcaagaucaugacguccaagaccgacgucagcuccagcgugaucaccucccugggcgccaucgugagcugcuacgggaagaccaagugcacggcgagcaacaagaaccgcggcaucaucaagaccuucuccaacgggugcgacuacgucagcaacaagggcguggacaccguguccgucggcaacacccuguacuacgugaacaagcaggagggcaagagccucuacgugaagggggagcccaucaucaacuucuacgacccgcuggucuuccccuccgacgaguucgacgccagcaucucccaggugaacgagaagaucaaccagagccuggccuucauccggaaguccgacgagcuccugcacaacgugaacgucggcaagagcaccacgaacaucaugaucaccaccaucaucaucgugaucaucgugauccugcugcuccugaucgccgucgggcuguuccucuacugcaaggcccgcugaggacuaguacuggcugcaucucccuuuccucuguccuccauccuucucccaggauggugaagggggaccugguacccagugauccccaccccaggauccuaaaucaugacuuaccugcuaauaaaaacucauuggaaaagugagaagaucuaaaaaaaaaaaaaaaaaaaaaaaaaaaaaaaaaaaaaaaaaaaaaaaaaaaaaaaaaaaaaaaaugcaucccccccccccccccccccccccccccccccaaaggcucuuuucagagccaccagaauu

SEQ ID NO: 12426 - RNA, 2115 nt, Artificial Sequence
  mRNA product Design h-5 comprising derived and/or modified sequence from HRSV(Memphis-37)__AIY60640.1__F-del (opt2)
gggagagggcgcuuggcuugcaaggacccugagcugcggcauugaagcacacccaacccaacucgacugaagucagccucacugaaccggaucugagaaucuucucucucugggcuugccagggcucuccgaaccuagcuagcauccucuucaauuccaacuagaaagcuuaccauggagcuccccauccucaagaccaacgccaucaccaccauccucgccgccgucacccucugcuucgccuccucccagaacaucaccgaggaguucuaccaguccaccugcuccgccgucuccaagggcuaccucuccgcccuccgcaccggcugguacaccuccgucaucaccaucgagcucuccaacaucaaggagaacaagugcaacggcaccgacgccaaggucaagcucaucaagcaggagcucgacaaguacaagaacgccgucaccgagcuccagcuccucaugcaguccacccccgccgccaacaaccgcgcccgccgcgagcucccccgcuucaugaacuacacccucaacaacaccaagaacaacaacgucacccucuccaagaagcgcaagcgccgcuuccucggcuuccuccucggcgucggcuccgccaucgccuccggcaucgccgucuccaagguccuccaccucgagggcgaggucaacaagaucaagaacgcccuccucuccaccaacaaggccgucgucucccucuccaacggcgucuccguccucaccuccaagguccucgaccucaagaacuacaucgacaagcagcuccuccccaucgucaacaagcaguccugcuccaucuccaacaucgagaccgucaucgaguuccagcagaagaacaaccgccuccucgagaucacccgcgaguucuccgucaacgccggcgucaccacccccgucuccaccuacaugcucaccaacuccgagcuccucucccucaucaacgacaugcccaucaccaacgaccagaagaagcucauguccaacaacguccagaucguccgccagcaguccuacuccaucauguccaucaucaaggaggagguccucgccuacgucguccagcucccccucuacggcgucaucgacacccccugcuggaagcuccacaccuccccccucugcaccaccaacaccaaggagggcuccaacaucugccucacccgcaccgaccgcggcugguacugcgacaacgccggcuccgucuccuucuucccccaggccgagaccugcaagguccaguccaaccgcgucuucugcgacaccaugaacucccucacccuccccuccgaggucaaccucugcaacaucgacaucuucaaccccaaguacgacugcaagaucaugaccuccaagaccgacgucuccuccuccgucaucaccucccucggcgccaucgucuccugcuacggcaagaccaagugcaccgccuccaacaagaaccgcggcaucaucaagaccuucuccaacggcugcgacuacgucuccaacaagggcgucgacaccgucuccgucggcaacacccucuacuacgucaacaagcaggagggcaagucccucuacgucaagggcgagcccaucaucaacuucuacgacccccucgucuuccccuccgacgaguucgacgccuccaucucccaggucaacgagaagaucaaccagucccucgccuucauccgcaaguccgacgagcuccuccacaacgucaacgucggcaaguccaccaccaacaucaugaucaccaccaucaucaucgucaucaucgucauccuccuccuccucaucgccgucggccucuuccucuacugcaaggcccgcugaggacuaguacuggcugcaucucccuuuccucuguccuccauccuucucccaggauggugaagggggaccugguacccagugauccccaccccaggauccuaaaucaugacuuaccugcuaauaaaaacucauuggaaaagugagaagaucuaaaaaaaaaaaaaaaaaaaaaaaaaaaaaaaaaaaaaaaaaaaaaaaaaaaaaaaaaaaaaaaaugcaucccccccccccccccccccccccccccccccaaaggcucuuuucagagccaccagaauu

SEQ ID NO: 12427 - RNA, 2115 nt, Artificial Sequence
  mRNA product Design h-5 comprising derived and/or modified sequence from HRSV(Memphis-37)__AIY60640.1__F-del (opt3)
gggagagggcgcuuggcuugcaaggacccugagcugcggcauugaagcacacccaacccaacucgacugaagucagccucacugaaccggaucugagaaucuucucucucugggcuugccagggcucuccgaaccuagcuagcauccucuucaauuccaacuagaaagcuuaccauggagcugcccauccucaagaccaacgccauuacaacuauacuugcugcagugacgcugugcuucgccagcucccagaauaucaccgaagaguuuuaccaaucuacauguucagcggucaguaaaggcuauuugagcgcuuuaagaacugggugguacaccuccguuauuacaaucgaacugucuaacauuaaggagaauaaaugcaacggaaccgacgccaaggugaaacuaaucaagcaggaacucgauaaguauaaaaaugcaguaacugagcugcagcuucugaugcagucgaccccugccgcuaacaauagggcacggcgcgaguugccacgauucaugaacuacacacucaauaacacgaagaauaacaaugugacucugagcaaaaagcguaaaagaagguuucuggguuuccucuuaggcgucgggucagccauagcuaguggaaucgccguguccaagguucugcaccuugaaggcgaggugaacaagauuaaaaaugcguugcugucuaccaacaaggcagucgugagccuauccaacgguguaucaguucucacaaguaaagugcuggaccuuaagaauuauaucgauaaacaacuguugccgauugucaacaagcagagcuguucuaucuccaauauagaaacugugauugaguuucagcagaaaaacaaucggcuccuggagaucacccgcgaguucucagugaacgccggggucacaacccccguuagcacguacauguuaacuaauagugaacugcucucucuuauuaacgacaugccuaucacaaaugaucaaaagaagcugauguccaacaaugugcagaucguaagacagcagagcuauucgauuaugucuauaaucaaagaagagguguuggcuuacgucgugcaacuaccacuguacggaguuauugacacccccugcuggaagcuccauacuuccccucuguguacaaccaacacgaaagaaggcucaaauaucugccuuaccaggacagaucggggcugguauugugacaacgccgggagugugagcuuuuucccacaggcagagacuugcaagguccaguccaaucgcguguuuugugauaccaugaacucucugacauugcccagcgagguaaaccucugcaauauagacauuuucaacccuaaauacgauuguaagaucaugacuucaaagaccgacguuaguuccagcgugaucacaucucugggagcuauugucucaugcuaugguaaaaccaagugcacugccaguaauaaaaaccgaggcaucauuaagacguuuagcaaugggugugauuacguguccaacaaaggagucgacacagugucuguuggcaauaccuuauauuacgugaacaagcaagaagguaagucgcuguauguaaaaggggagccaauaaucaauuucuacgacccgcuagucuuucccagcgaugaguucgacgcguccauuucacaggugaacgaaaagaucaaucagagucucgccuucaucagaaaaucugaugaacugcuucacaacguuaaugugggaaagagcacuaccaacauuaugauaacaaccaucauuaucgucauuaucgugauauugcugcuccugaucgcaguaggccuuuuucuguacugcaaagcuaggugaggacuaguacuggcugcaucucccuuuccucuguccuccauccuucucccaggauggugaagggggaccugguacccagugauccccaccccaggauccuaaaucaugacuuaccugcuaauaaaaacucauuggaaaagugagaagaucuaaaaaaaaaaaaaaaaaaaaaaaaaaaaaaaaaaaaaaaaaaaaaaaaaaaaaaaaaaaaaaaaugcaucccccccccccccccccccccccccccccccaaaggcucuuuucagagccaccagaauu

SEQ ID NO: 12428 - RNA, 2115 nt, Artificial Sequence
  mRNA product Design h-5 comprising derived and/or modified sequence from HRSV(Memphis-37)__AIY60640.1__F-del (opt4)
gggagagggcgcuuggcuugcaaggacccugagcugcggcauugaagcacacccaacccaacucgacugaagucagccucacugaaccggaucugagaaucuucucucucugggcuugccagggcucuccgaaccuagcuagcauccucuucaauuccaacuagaaagcuuaccauggagcugcccauccugaagaccaacgccaucaccaccauccuggccgccgugacccugugcuucgccagcagccagaacaucaccgaggaguucuaccagagcaccugcagcgccgugagcaagggcuaccugagcgcccugagaaccggcugguacaccagcgugaucaccaucgagcugagcaacaucaaggagaacaagugcaacggcaccgacgccaaggugaagcugaucaagcaggagcuggacaaguacaagaacgccgugaccgagcugcagcugcugaugcagagcacccccgccgccaacaacagagccagaagagagcugcccagauucaugaacuacacccugaacaacaccaagaacaacaacgugacccugagcaagaagagaaagagaagauuccugggcuuccugcugggcgugggcagcgccaucgccagcggcaucgccgugagcaaggugcugcaccuggagggcgaggugaacaagaucaagaacgcccugcugagcaccaacaaggccguggugagccugagcaacggcgugagcgugcugaccagcaaggugcuggaccugaagaacuacaucgacaagcagcugcugcccaucgugaacaagcagagcugcagcaucagcaacaucgagaccgugaucgaguuccagcagaagaacaacagacugcuggagaucaccagagaguucagcgugaacgccggcgugaccacccccgugagcaccuacaugcugaccaacagcgagcugcugagccugaucaacgacaugcccaucaccaacgaccagaagaagcugaugagcaacaacgugcagaucgugagacagcagagcuacagcaucaugagcaucaucaaggaggaggugcuggccuacguggugcagcugccccuguacggcgugaucgacacccccugcuggaagcugcacaccagcccccugugcaccaccaacaccaaggagggcagcaacaucugccugaccagaaccgacagaggcugguacugcgacaacgccggcagcgugagcuucuucccccaggccgagaccugcaaggugcagagcaacagaguguucugcgacaccaugaacagccugacccugcccagcgaggugaaccugugcaacaucgacaucuucaaccccaaguacgacugcaagaucaugaccagcaagaccgacgugagcagcagcgugaucaccagccugggcgccaucgugagcugcuacggcaagaccaagugcaccgccagcaacaagaacagaggcaucaucaagaccuucagcaacggcugcgacuacgugagcaacaagggcguggacaccgugagcgugggcaacacccuguacuacgugaacaagcaggagggcaagagccuguacgugaagggcgagcccaucaucaacuucuacgacccccugguguuccccagcgacgaguucgacgccagcaucagccaggugaacgagaagaucaaccagagccuggccuucaucagaaagagcgacgagcugcugcacaacgugaacgugggcaagagcaccaccaacaucaugaucaccaccaucaucaucgugaucaucgugauccugcugcugcugaucgccgugggccuguuccuguacugcaaggccagaugaggacuaguacuggcugcaucucccuuuccucuguccuccauccuucucccaggauggugaagggggaccugguacccagugauccccaccccaggauccuaaaucaugacuuaccugcuaauaaaaacucauuggaaaagugagaagaucuaaaaaaaaaaaaaaaaaaaaaaaaaaaaaaaaaaaaaaaaaaaaaaaaaaaaaaaaaaaaaaaaugcaucccccccccccccccccccccccccccccccaaaggcucuuuucagagccaccagaauu

SEQ ID NO: 12429 - RNA, 2115 nt, Artificial Sequence
  mRNA product Design h-5 comprising derived and/or modified sequence from HRSV(Memphis-37)__AIY60640.1__F-del (opt5)
gggagagggcgcuuggcuugcaaggacccugagcugcggcauugaagcacacccaacccaacucgacugaagucagccucacugaaccggaucugagaaucuucucucucugggcuugccagggcucuccgaaccuagcuagcauccucuucaauuccaacuagaaagcuuaccauggagcugcccauccucaagaccaacgccauuacaacgauccuggcugccgugacccuuugcuucgcgagcucccagaauauuacagaagaguuuuaccaaucuaccuguagcgcugucuccaaaggcuaucugucugcccucagaacagggugguacaccagcguuaucacaauugaacuguccaacaucaaggagaauaaaugcaacggaaccgacgccaaggugaaacuuaucaagcaggaacuggauaaguauaaaaaugcugugacggagcuccagcugcugaugcagucuaccccugccgcuaacaaucgggcccgcagagagcucccgcgguucaugaacuacacacugaauaacaccaagaauaacaaugucacacuuagcaaaaagcgcaaaagacgguuucugggcuuccuccugggggugggauccgcgauugccagcggcaucgcuguuucuaaggugcuucaccuggaaggggaggucaacaagauuaaaaaugcccuccuguccaccaacaaggcugugguuagccugucuaacggaguguccguccucacgagcaaagugcuggaccuuaagaauuauaucgauaaacaacugcuccccauugugaacaagcagucuuguuccaucagcaauauugaaacagucaucgaguuucagcagaaaaacaaucgccugcuugagaucaccagagaauuuuccguuaacgccggcgugacaaccccugugucuaccuacaugcugacaaauagcgagcuccugucccugauuaacgacaugcccaucacgaaugaucaaaagaagcucaugagcaacaauguccagauugugcggcagcagucuuauuccaucaugagcauuaucaaagaagagguucuggcguacgugguccaacuuccucuguacggcgugaucgacacccccugcuggaagcuccauacaucuccucuguguaccacaaacaccaaagaagggagcaauauuugccuuacgcgcacagauagaggaugguauugugacaacgccggcuccguuucuuucuucccgcaggcugagaccugcaaggugcagagcaaucgggucuuuugugauaccaugaacucccugacacuccccagcgaggugaaccugugcaauaucgacauuuucaacccuaaauacgauuguaagaucaugaccucuaagacagacgucuccagcucugugauuacgucccugggggccaucguuagcugcuauggaaaaaccaagugcacagcuuccaauaaaaaccgcggcaucauuaagaccuuuucuaaugggugugauuacgugagcaacaaaggagucgacacaguguccguuggcaauacccucuauuacgugaacaagcaagaaggcaagucucuguaugucaaaggggagcccaucauuaauuucuacgacccucuuguguuucccagcgaugaguucgacgccuccaucagccaggugaacgaaaagauuaaucagucucuggccuucaucagaaaauccgaugaacuccugcacaacguuaaugucggaaagagcacgaccaacauuaugaucacaaccaucauuaucgugauuaucgugauucugcuucuccugaucgcugucggccuguuucucuacugcaaagcgcggugaggacuaguacuggcugcaucucccuuuccucuguccuccauccuucucccaggauggugaagggggaccugguacccagugauccccaccccaggauccuaaaucaugacuuaccugcuaauaaaaacucauuggaaaagugagaagaucuaaaaaaaaaaaaaaaaaaaaaaaaaaaaaaaaaaaaaaaaaaaaaaaaaaaaaaaaaaaaaaaaugcaucccccccccccccccccccccccccccccccaaaggcucuuuucagagccaccagaauu

SEQ ID NO: 12430 - RNA, 2115 nt, Artificial Sequence
  mRNA product Design h-5 comprising derived and/or modified sequence from HRSV(Memphis-37)__AIY60640.1__F-del (opt6)
gggagagggcgcuuggcuugcaaggacccugagcugcggcauugaagcacacccaacccaacucgacugaagucagccucacugaaccggaucugagaaucuucucucucugggcuugccagggcucuccgaaccuagcuagcauccucuucaauuccaacuagaaagcuuaccauggaacucccaauauuaaaaacuaacgcaaucacaaccauauuagcagccgucacucuaugcuuugccuccucacaaaauauaacagaagaauuuuaccaauccacaugcucagccguuagcaaaggauaucuaucagcccuaagaacaggcugguauacuucaguaauaacaauagaacuaucaaauauaaaagaaaacaaaugcaacggaaccgacgcuaaaguaaagcucauaaaacaagaauuagacaaauacaaaaaugcaguaacagaacuacaacuccuaaugcaaucaaccccagccgccaauaacagagcuagacgagaacuaccccgauucaugaauuacacacuaaacaacacaaaaaacaacaauguaacacucucaaaaaaaagaaaacgaagauucuuagguuuucuccugggaguaggaucagcaaucgcuuccggaaucgcagucaguaaaguccuucaccuugaaggcgaaguaaacaaaauaaaaaaugcacuacuaucuacaaauaaagcaguaguaucccuauccaauggcgucucaguauuaaccucaaaaguacucgaccuuaaaaauuauauagacaaacaauuacuacccauagucaauaaacaauccuguuccauaucaaacauagaaacaguaaucgaauuucaacaaaaaaacaacagauuacuagaaauaacacgcgaauuuucagucaacgccggaguaaccacacccgucucaacauacaugcuaaccaacuccgaacuacuaucacuuaucaacgacaugccaauaacaaaugaccaaaaaaaacucaugucaaacaacguacaaauaguccgccaacaaucauacucuauaaugucuauuaucaaagaagaaguucucgcauacguaguacaacuaccacuauauggugucauagacacaccauguuggaaacuccauacaucacccuuauguacaaccaauacaaaagaaggcucaaacaucugccuaacucgaacagaccgaggaugguacugcgacaaugcaggaucugucucauucuucccucaagcagaaacauguaaaguucaaucuaauagaguuuucugcgauacaaugaacucacuaacucuaccaucagaaguaaaucucuguaauauugacauauucaacccaaaauacgauugcaagaucaugacaucaaaaacugacguaucauccucagucaucaccucauuaggagcaaucguaagcuguuacgggaaaacaaaaugcaccgcuucuaacaaaaauagaggaauaauuaaaaccuucucaaacggaugcgauuacgucuccaauaaaggaguagauacaguaagcguaggaaauacucuauacuacgucaauaaacaagaaggaaaaucacuuuaugucaaaggagaacccauaauaaauuucuacgacccauuagucuucccaucagaugaauuugacgcauccauaucccaagucaacgaaaaaaucaaucaaucacuagcauucauacgaaaaucagacgaacuacuacacaacguuaacguaggaaaaucaacaaccaacaucaugauaaccacuauaauaaucgucauaauagucauccuauuauuacuaauagccguaggccuuuuccuauacuguaaagcuagauaaggacuaguacuggcugcaucucccuuuccucuguccuccauccuucucccaggauggugaagggggaccugguacccagugauccccaccccaggauccuaaaucaugacuuaccugcuaauaaaaacucauuggaaaagugagaagaucuaaaaaaaaaaaaaaaaaaaaaaaaaaaaaaaaaaaaaaaaaaaaaaaaaaaaaaaaaaaaaaaaugcaucccccccccccccccccccccccccccccccaaaggcucuuuucagagccaccagaauu

SEQ ID NO: 12431 - RNA, 2115 nt, Artificial Sequence
  mRNA product Design h-5 comprising derived and/or modified sequence from HRSV(Memphis-37)__AIY60640.1__F-del (opt11)
gggagagggcgcuuggcuugcaaggacccugagcugcggcauugaagcacacccaacccaacucgacugaagucagccucacugaaccggaucugagaaucuucucucucugggcuugccagggcucuccgaaccuagcuagcauccucuucaauuccaacuagaaagcuuaccauggaacucccgauccucaaaaccaacgccaucaccacuauccucgccgccguaacccucugcuucgccucaucccaaaacaucaccgaagaauuuuaccaauccacaugcuccgccgucuccaaagguuaccucucagcccuccgcaccggcugguacaccuccguuaucaccaucgaacuuuccaacauaaaagagaacaagugcaacggcaccgacgcaaaaguaaaacuaaucaaacaagaacuagacaaauacaaaaacgccgucaccgaacuccagcuccucaugcaaucgacgcccgccgccaacaaccgagcaaggcgcgaacuuccacgcuucaugaacuacacccucaacaacacuaaaaacaacaacgugacccuauccaaaaagcguaaacgccgauuccuagguuuccuucucggugucggcuccgccauugccuccggcaucgcuguuuccaaaguccuccaccucgaaggcgaaguaaacaagauaaaaaacgcccuccucucuacaaacaaggccgugguaucgcucucuaacggcgucucuguacucaccuccaaaguccucgaccucaaaaacuacaucgacaagcaacuccucccuaucgucaauaaacaauccugcuccauuuccaacaucgaaacagugaucgaauuucaacaaaaaaacaaccgauuacuagaaaucacccgcgaauuuucagucaacgccggcgucacaacgccagucucaaccuacaugcucaccaacucagaacucuuaucacucaucaacgacaugcccaucacuaacgaccagaaaaaacugauguccaacaacgugcaaauaguccgccaacaguccuacuccaucauguccauaaucaaggaggaggugcucgccuacguaguccaacucccccucuacggagucauugacaccccuugcuggaaacuacacaccuccccucucugcaccaccaacaccaaagaaggcagcaacaucugccuaaccaggacggaccgaggaugguacugcgacaaugcaggcuccgucagcuucuucccacaagccgaaacaugcaaaguucaaucaaaccguguauucugcgacaccaugaacucacucacccuccccucagaaguaaaccuaugcaacauagauaucuucaaccccaaauacgacugcaaaauuaugaccuccaaaaccgaugucuccagcuccguuaucacgucacucggcgccaucgucuccugcuacggcaagaccaaaugcaccgccuccaacaaaaaccgcggaauaaucaaaacauucucuaacggcugcgacuacgucuccaauaaaggcgucgacaccgucuccgugggcaacacgcuguacuacgucaacaaacaagaaggcaaaucucuuuacgucaaaggugaaccaaucaucaacuucuacgacccccucguauuccccuccgacgaauuugacgcgagcaucucccaagucaacgaaaagaucaaccaaucccucgccuucauccgaaaaagcgacgaacuccuccacaacgucaacgucggcaaaaguaccacaaacauuaugaucaccaccaucaucauagucaucaucgucauccugcuccuacuaauagccgucggccucuucuuguacugcaaggcacgaugaggacuaguacuggcugcaucucccuuuccucuguccuccauccuucucccaggauggugaagggggaccugguacccagugauccccaccccaggauccuaaaucaugacuuaccugcuaauaaaaacucauuggaaaagugagaagaucuaaaaaaaaaaaaaaaaaaaaaaaaaaaaaaaaaaaaaaaaaaaaaaaaaaaaaaaaaaaaaaaaugcaucccccccccccccccccccccccccccccccaaaggcucuuuucagagccaccagaauu

SEQ ID NO: 12432 - RNA, 2048 nt, Artificial Sequence
  mRNA product Design i-1 comprising derived and/or modified sequence from HRSV(Memphis-37)__AIY60640.1__F-del (wt)
gggagagggcgcuuggcuugcaaggacccugagcugcggcauugaagcacacccaacccaacucgacugaagucagccucacugaaccggaucugagaaucuucucucucugggcuugccagggcucuccgaaccuagcuagcauccucuucaauuccaacuagaaagcuuaccauggaguugccaauccucaaaacaaaugcaauuaccacaauccuugcugcagucacacucuguuucgcuuccagucaaaacaucacugaagaauuuuaucaaucaacaugcagugcaguuagcaaaggcuaucuuagugcuuuaagaacugguugguauacuaguguuauaacuauagaauuaaguaauaucaaggaaaauaaguguaauggaacagaugcuaagguaaaauugauaaaacaagaauuagauaaauauaaaaaugcuguaacagaauugcaguugcucaugcaaagcacaccagcagccaacaaucgagccagaagagaacuaccaagguuuaugaauuauacacucaacaauaccaaaaauaacaauguaacauuaagcaagaaaaggaaaagaagauuucuuggcuuuuuguuagguguuggaucugcaaucgccaguggcauugcuguaucuaaaguccugcaccuagaaggggaagugaacaaaaucaaaaaugcucuacuauccacaaacaaggcuguagucagcuuaucaaauggaguuagugucuuaaccagcaaaguguuagaccucaaaaacuauauagauaaacaguuguuacccauugugaacaagcaaagcugcagcauaucaaacauugaaacugugauagaauuccaacaaaagaacaacagacuacuagagauuaccagggaauuuaguguuaaugcagguguaacuacaccuguaagcacuuauauguuaacaaauagugaauuauuaucauuaaucaaugauaugccuauaacaaaugaucagaaaaaguuaauguccaacaauguucaaauaguuagacagcaaaguuacucuaucauguccauaauaaaggaggaagucuuagcauauguaguucaauuaccacuauaugguguaauagauacaccuuguuggaaacuacacacauccccucuaugcacaaccaacacaaaggaaggguccaacaucuguuuaacaagaaccgacagaggaugguacugugacaaugcaggaucagugucuuucuucccacaagcugaaacaugcaaaguucaaucgaaucgaguauuuugugacacaaugaacagucuaacauuaccaagugaaguaaaucucugcaacauugacauauucaacccuaaauaugauugcaaaauuaugacuucaaaaacagaugugagcagcuccguuaucacaucucuaggagccauugugucaugcuauggcaaaacuaaauguacagcauccaauaaaaaucguggaaucauaaagacauuuucuaacgggugugauuauguaucaaauaaggggguggacacuguaucuguagguaauacauuauauuauguaaauaagcaagaaggaaaaagccucuauguaaaaggugaaccaauaauaaauuucuaugacccauuaguguucccuucugaugaauuugaugcaucaauaucucaagucaaugagaagauuaaccagagccuagcauuuauucguaaauccgaugaauuauuacauaauguaaauguugguaaauccaccacaaauaucaugauaacuacuauaauuauagugauuauaguaauauuguuauuauuaauugcaguugggcuguuccuauacugcaaggccagaugaggacuaguguccaccugucccuccugggcugcuggauugucucguuuuccugccaaauaaacaggaucagcgcuuuacagaucuaaaaaaaaaaaaaaaaaaaaaaaaaaaaaaaaaaaaaaaaaaaaaaaaaaaaaaaaaaaaaaaaugcaucccccccccccccccccccccccccccccccaaaggcucuuuucagagccaccagaauu

SEQ ID NO: 12433 - RNA, 2048 nt, Artificial Sequence
  mRNA product Design i-1 comprising derived and/or modified sequence from HRSV(Memphis-37)__AIY60640.1__F-del (opt1)
gggagagggcgcuuggcuugcaaggacccugagcugcggcauugaagcacacccaacccaacucgacugaagucagccucacugaaccggaucugagaaucuucucucucugggcuugccagggcucuccgaaccuagcuagcauccucuucaauuccaacuagaaagcuuaccauggagcugcccauccucaagaccaacgccaucaccacgauccuggccgcggugacccugugcuucgccagcucccagaacaucaccgaggaguucuaccagagcacgugcuccgccgucagcaagggcuaccucuccgcccugcgcaccgggugguacaccagcgugaucaccaucgagcuguccaacaucaaggagaacaagugcaacggcaccgacgccaaggugaagcucaucaagcaggagcuggacaaguacaagaacgcggucacggagcugcagcuccugaugcagagcaccccggccgccaacaaccgggcccgccgggagcugccccgcuucaugaacuacacccucaacaacaccaagaacaacaacgugacgcuguccaagaagcggaagcgccgguuccugggguuccuccugggcguggggagcgcgaucgccuccggcaucgccgucagcaaggugcugcaccucgagggcgaggugaacaagaucaagaacgcccugcuguccaccaacaaggccgucgugagccucuccaacggggugagcguccugaccuccaaggugcuggaccucaagaacuacaucgacaagcagcugcugcccaucgugaacaagcagagcugcuccaucagcaacaucgagaccgucaucgaguuccagcagaagaacaaccgccuccuggagaucacgcgggaguucagcgugaacgcgggcgugaccacccccgucuccaccuacaugcugacgaacagcgagcuccugucccugaucaacgacaugccgaucaccaacgaccagaagaagcucaugagcaacaacgugcagaucgugcgccagcaguccuacagcaucauguccaucaucaaggaggagguccuggccuacguggugcagcugccccucuacggggucaucgacacccccugcuggaagcugcacaccagcccccugugcacgaccaacaccaaggagggcuccaacaucugccucacccggacggaccgcgggugguacugcgacaacgccggcagcguguccuucuucccgcaggccgagaccugcaagguccagagcaaccggguguucugcgacaccaugaacucccugacccugcccagcgaggugaaccucugcaacaucgacaucuucaaccccaaguacgacugcaagaucaugacguccaagaccgacgucagcuccagcgugaucaccucccugggcgccaucgugagcugcuacgggaagaccaagugcacggcgagcaacaagaaccgcggcaucaucaagaccuucuccaacgggugcgacuacgucagcaacaagggcguggacaccguguccgucggcaacacccuguacuacgugaacaagcaggagggcaagagccucuacgugaagggggagcccaucaucaacuucuacgacccgcuggucuuccccuccgacgaguucgacgccagcaucucccaggugaacgagaagaucaaccagagccuggccuucauccggaaguccgacgagcuccugcacaacgugaacgucggcaagagcaccacgaacaucaugaucaccaccaucaucaucgugaucaucgugauccugcugcuccugaucgccgucgggcuguuccucuacugcaaggcccgcugaggacuaguguccaccugucccuccugggcugcuggauugucucguuuuccugccaaauaaacaggaucagcgcuuuacagaucuaaaaaaaaaaaaaaaaaaaaaaaaaaaaaaaaaaaaaaaaaaaaaaaaaaaaaaaaaaaaaaaaugcaucccccccccccccccccccccccccccccccaaaggcucuuuucagagccaccagaauu

SEQ ID NO: 12434 - RNA, 2048 nt, Artificial Sequence
  mRNA product Design i-1 comprising derived and/or modified sequence from HRSV(Memphis-37)__AIY60640.1__F-del (opt2)
gggagagggcgcuuggcuugcaaggacccugagcugcggcauugaagcacacccaacccaacucgacugaagucagccucacugaaccggaucugagaaucuucucucucugggcuugccagggcucuccgaaccuagcuagcauccucuucaauuccaacuagaaagcuuaccauggagcuccccauccucaagaccaacgccaucaccaccauccucgccgccgucacccucugcuucgccuccucccagaacaucaccgaggaguucuaccaguccaccugcuccgccgucuccaagggcuaccucuccgcccuccgcaccggcugguacaccuccgucaucaccaucgagcucuccaacaucaaggagaacaagugcaacggcaccgacgccaaggucaagcucaucaagcaggagcucgacaaguacaagaacgccgucaccgagcuccagcuccucaugcaguccacccccgccgccaacaaccgcgcccgccgcgagcucccccgcuucaugaacuacacccucaacaacaccaagaacaacaacgucacccucuccaagaagcgcaagcgccgcuuccucggcuuccuccucggcgucggcuccgccaucgccuccggcaucgccgucuccaagguccuccaccucgagggcgaggucaacaagaucaagaacgcccuccucuccaccaacaaggccgucgucucccucuccaacggcgucuccguccucaccuccaagguccucgaccucaagaacuacaucgacaagcagcuccuccccaucgucaacaagcaguccugcuccaucuccaacaucgagaccgucaucgaguuccagcagaagaacaaccgccuccucgagaucacccgcgaguucuccgucaacgccggcgucaccacccccgucuccaccuacaugcucaccaacuccgagcuccucucccucaucaacgacaugcccaucaccaacgaccagaagaagcucauguccaacaacguccagaucguccgccagcaguccuacuccaucauguccaucaucaaggaggagguccucgccuacgucguccagcucccccucuacggcgucaucgacacccccugcuggaagcuccacaccuccccccucugcaccaccaacaccaaggagggcuccaacaucugccucacccgcaccgaccgcggcugguacugcgacaacgccggcuccgucuccuucuucccccaggccgagaccugcaagguccaguccaaccgcgucuucugcgacaccaugaacucccucacccuccccuccgaggucaaccucugcaacaucgacaucuucaaccccaaguacgacugcaagaucaugaccuccaagaccgacgucuccuccuccgucaucaccucccucggcgccaucgucuccugcuacggcaagaccaagugcaccgccuccaacaagaaccgcggcaucaucaagaccuucuccaacggcugcgacuacgucuccaacaagggcgucgacaccgucuccgucggcaacacccucuacuacgucaacaagcaggagggcaagucccucuacgucaagggcgagcccaucaucaacuucuacgacccccucgucuuccccuccgacgaguucgacgccuccaucucccaggucaacgagaagaucaaccagucccucgccuucauccgcaaguccgacgagcuccuccacaacgucaacgucggcaaguccaccaccaacaucaugaucaccaccaucaucaucgucaucaucgucauccuccuccuccucaucgccgucggccucuuccucuacugcaaggcccgcugaggacuaguguccaccugucccuccugggcugcuggauugucucguuuuccugccaaauaaacaggaucagcgcuuuacagaucuaaaaaaaaaaaaaaaaaaaaaaaaaaaaaaaaaaaaaaaaaaaaaaaaaaaaaaaaaaaaaaaaugcaucccccccccccccccccccccccccccccccaaaggcucuuuucagagccaccagaauu

SEQ ID NO: 12435 - RNA, 2048 nt, Artificial Sequence
  mRNA product Design i-1 comprising derived and/or modified sequence from HRSV(Memphis-37)__AIY60640.1__F-del (opt3)
gggagagggcgcuuggcuugcaaggacccugagcugcggcauugaagcacacccaacccaacucgacugaagucagccucacugaaccggaucugagaaucuucucucucugggcuugccagggcucuccgaaccuagcuagcauccucuucaauuccaacuagaaagcuuaccauggagcugcccauccucaagaccaacgccauuacaacuauacuugcugcagugacgcugugcuucgccagcucccagaauaucaccgaagaguuuuaccaaucuacauguucagcggucaguaaaggcuauuugagcgcuuuaagaacugggugguacaccuccguuauuacaaucgaacugucuaacauuaaggagaauaaaugcaacggaaccgacgccaaggugaaacuaaucaagcaggaacucgauaaguauaaaaaugcaguaacugagcugcagcuucugaugcagucgaccccugccgcuaacaauagggcacggcgcgaguugccacgauucaugaacuacacacucaauaacacgaagaauaacaaugugacucugagcaaaaagcguaaaagaagguuucuggguuuccucuuaggcgucgggucagccauagcuaguggaaucgccguguccaagguucugcaccuugaaggcgaggugaacaagauuaaaaaugcguugcugucuaccaacaaggcagucgugagccuauccaacgguguaucaguucucacaaguaaagugcuggaccuuaagaauuauaucgauaaacaacuguugccgauugucaacaagcagagcuguucuaucuccaauauagaaacugugauugaguuucagcagaaaaacaaucggcuccuggagaucacccgcgaguucucagugaacgccggggucacaacccccguuagcacguacauguuaacuaauagugaacugcucucucuuauuaacgacaugccuaucacaaaugaucaaaagaagcugauguccaacaaugugcagaucguaagacagcagagcuauucgauuaugucuauaaucaaagaagagguguuggcuuacgucgugcaacuaccacuguacggaguuauugacacccccugcuggaagcuccauacuuccccucuguguacaaccaacacgaaagaaggcucaaauaucugccuuaccaggacagaucggggcugguauugugacaacgccgggagugugagcuuuuucccacaggcagagacuugcaagguccaguccaaucgcguguuuugugauaccaugaacucucugacauugcccagcgagguaaaccucugcaauauagacauuuucaacccuaaauacgauuguaagaucaugacuucaaagaccgacguuaguuccagcgugaucacaucucugggagcuauugucucaugcuaugguaaaaccaagugcacugccaguaauaaaaaccgaggcaucauuaagacguuuagcaaugggugugauuacguguccaacaaaggagucgacacagugucuguuggcaauaccuuauauuacgugaacaagcaagaagguaagucgcuguauguaaaaggggagccaauaaucaauuucuacgacccgcuagucuuucccagcgaugaguucgacgcguccauuucacaggugaacgaaaagaucaaucagagucucgccuucaucagaaaaucugaugaacugcuucacaacguuaaugugggaaagagcacuaccaacauuaugauaacaaccaucauuaucgucauuaucgugauauugcugcuccugaucgcaguaggccuuuuucuguacugcaaagcuaggugaggacuaguguccaccugucccuccugggcugcuggauugucucguuuuccugccaaauaaacaggaucagcgcuuuacagaucuaaaaaaaaaaaaaaaaaaaaaaaaaaaaaaaaaaaaaaaaaaaaaaaaaaaaaaaaaaaaaaaaugcaucccccccccccccccccccccccccccccccaaaggcucuuuucagagccaccagaauu

SEQ ID NO: 12436 - RNA, 2048 nt, Artificial Sequence
  mRNA product Design i-1 comprising derived and/or modified sequence from HRSV(Memphis-37)__AIY60640.1__F-del (opt4)
gggagagggcgcuuggcuugcaaggacccugagcugcggcauugaagcacacccaacccaacucgacugaagucagccucacugaaccggaucugagaaucuucucucucugggcuugccagggcucuccgaaccuagcuagcauccucuucaauuccaacuagaaagcuuaccauggagcugcccauccugaagaccaacgccaucaccaccauccuggccgccgugacccugugcuucgccagcagccagaacaucaccgaggaguucuaccagagcaccugcagcgccgugagcaagggcuaccugagcgcccugagaaccggcugguacaccagcgugaucaccaucgagcugagcaacaucaaggagaacaagugcaacggcaccgacgccaaggugaagcugaucaagcaggagcuggacaaguacaagaacgccgugaccgagcugcagcugcugaugcagagcacccccgccgccaacaacagagccagaagagagcugcccagauucaugaacuacacccugaacaacaccaagaacaacaacgugacccugagcaagaagagaaagagaagauuccugggcuuccugcugggcgugggcagcgccaucgccagcggcaucgccgugagcaaggugcugcaccuggagggcgaggugaacaagaucaagaacgcccugcugagcaccaacaaggccguggugagccugagcaacggcgugagcgugcugaccagcaaggugcuggaccugaagaacuacaucgacaagcagcugcugcccaucgugaacaagcagagcugcagcaucagcaacaucgagaccgugaucgaguuccagcagaagaacaacagacugcuggagaucaccagagaguucagcgugaacgccggcgugaccacccccgugagcaccuacaugcugaccaacagcgagcugcugagccugaucaacgacaugcccaucaccaacgaccagaagaagcugaugagcaacaacgugcagaucgugagacagcagagcuacagcaucaugagcaucaucaaggaggaggugcuggccuacguggugcagcugccccuguacggcgugaucgacacccccugcuggaagcugcacaccagcccccugugcaccaccaacaccaaggagggcagcaacaucugccugaccagaaccgacagaggcugguacugcgacaacgccggcagcgugagcuucuucccccaggccgagaccugcaaggugcagagcaacagaguguucugcgacaccaugaacagccugacccugcccagcgaggugaaccugugcaacaucgacaucuucaaccccaaguacgacugcaagaucaugaccagcaagaccgacgugagcagcagcgugaucaccagccugggcgccaucgugagcugcuacggcaagaccaagugcaccgccagcaacaagaacagaggcaucaucaagaccuucagcaacggcugcgacuacgugagcaacaagggcguggacaccgugagcgugggcaacacccuguacuacgugaacaagcaggagggcaagagccuguacgugaagggcgagcccaucaucaacuucuacgacccccugguguuccccagcgacgaguucgacgccagcaucagccaggugaacgagaagaucaaccagagccuggccuucaucagaaagagcgacgagcugcugcacaacgugaacgugggcaagagcaccaccaacaucaugaucaccaccaucaucaucgugaucaucgugauccugcugcugcugaucgccgugggccuguuccuguacugcaaggccagaugaggacuaguguccaccugucccuccugggcugcuggauugucucguuuuccugccaaauaaacaggaucagcgcuuuacagaucuaaaaaaaaaaaaaaaaaaaaaaaaaaaaaaaaaaaaaaaaaaaaaaaaaaaaaaaaaaaaaaaaugcaucccccccccccccccccccccccccccccccaaaggcucuuuucagagccaccagaauu

SEQ ID NO: 12437 - RNA, 2048 nt, Artificial Sequence
  mRNA product Design i-1 comprising derived and/or modified sequence from HRSV(Memphis-37)__AIY60640.1__F-del (opt5)
gggagagggcgcuuggcuugcaaggacccugagcugcggcauugaagcacacccaacccaacucgacugaagucagccucacugaaccggaucugagaaucuucucucucugggcuugccagggcucuccgaaccuagcuagcauccucuucaauuccaacuagaaagcuuaccauggagcugcccauccucaagaccaacgccauuacaacgauccuggcugccgugacccuuugcuucgcgagcucccagaauauuacagaagaguuuuaccaaucuaccuguagcgcugucuccaaaggcuaucugucugcccucagaacagggugguacaccagcguuaucacaauugaacuguccaacaucaaggagaauaaaugcaacggaaccgacgccaaggugaaacuuaucaagcaggaacuggauaaguauaaaaaugcugugacggagcuccagcugcugaugcagucuaccccugccgcuaacaaucgggcccgcagagagcucccgcgguucaugaacuacacacugaauaacaccaagaauaacaaugucacacuuagcaaaaagcgcaaaagacgguuucugggcuuccuccugggggugggauccgcgauugccagcggcaucgcuguuucuaaggugcuucaccuggaaggggaggucaacaagauuaaaaaugcccuccuguccaccaacaaggcugugguuagccugucuaacggaguguccguccucacgagcaaagugcuggaccuuaagaauuauaucgauaaacaacugcuccccauugugaacaagcagucuuguuccaucagcaauauugaaacagucaucgaguuucagcagaaaaacaaucgccugcuugagaucaccagagaauuuuccguuaacgccggcgugacaaccccugugucuaccuacaugcugacaaauagcgagcuccugucccugauuaacgacaugcccaucacgaaugaucaaaagaagcucaugagcaacaauguccagauugugcggcagcagucuuauuccaucaugagcauuaucaaagaagagguucuggcguacgugguccaacuuccucuguacggcgugaucgacacccccugcuggaagcuccauacaucuccucuguguaccacaaacaccaaagaagggagcaauauuugccuuacgcgcacagauagaggaugguauugugacaacgccggcuccguuucuuucuucccgcaggcugagaccugcaaggugcagagcaaucgggucuuuugugauaccaugaacucccugacacuccccagcgaggugaaccugugcaauaucgacauuuucaacccuaaauacgauuguaagaucaugaccucuaagacagacgucuccagcucugugauuacgucccugggggccaucguuagcugcuauggaaaaaccaagugcacagcuuccaauaaaaaccgcggcaucauuaagaccuuuucuaaugggugugauuacgugagcaacaaaggagucgacacaguguccguuggcaauacccucuauuacgugaacaagcaagaaggcaagucucuguaugucaaaggggagcccaucauuaauuucuacgacccucuuguguuucccagcgaugaguucgacgccuccaucagccaggugaacgaaaagauuaaucagucucuggccuucaucagaaaauccgaugaacuccugcacaacguuaaugucggaaagagcacgaccaacauuaugaucacaaccaucauuaucgugauuaucgugauucugcuucuccugaucgcugucggccuguuucucuacugcaaagcgcggugaggacuaguguccaccugucccuccugggcugcuggauugucucguuuuccugccaaauaaacaggaucagcgcuuuacagaucuaaaaaaaaaaaaaaaaaaaaaaaaaaaaaaaaaaaaaaaaaaaaaaaaaaaaaaaaaaaaaaaaugcaucccccccccccccccccccccccccccccccaaaggcucuuuucagagccaccagaauu

SEQ ID NO: 12438 - RNA, 2048 nt, Artificial Sequence
  mRNA product Design i-1 comprising derived and/or modified sequence from HRSV(Memphis-37)__AIY60640.1__F-del (opt6)
gggagagggcgcuuggcuugcaaggacccugagcugcggcauugaagcacacccaacccaacucgacugaagucagccucacugaaccggaucugagaaucuucucucucugggcuugccagggcucuccgaaccuagcuagcauccucuucaauuccaacuagaaagcuuaccauggaacucccaauauuaaaaacuaacgcaaucacaaccauauuagcagccgucacucuaugcuuugccuccucacaaaauauaacagaagaauuuuaccaauccacaugcucagccguuagcaaaggauaucuaucagcccuaagaacaggcugguauacuucaguaauaacaauagaacuaucaaauauaaaagaaaacaaaugcaacggaaccgacgcuaaaguaaagcucauaaaacaagaauuagacaaauacaaaaaugcaguaacagaacuacaacuccuaaugcaaucaaccccagccgccaauaacagagcuagacgagaacuaccccgauucaugaauuacacacuaaacaacacaaaaaacaacaauguaacacucucaaaaaaaagaaaacgaagauucuuagguuuucuccugggaguaggaucagcaaucgcuuccggaaucgcagucaguaaaguccuucaccuugaaggcgaaguaaacaaaauaaaaaaugcacuacuaucuacaaauaaagcaguaguaucccuauccaauggcgucucaguauuaaccucaaaaguacucgaccuuaaaaauuauauagacaaacaauuacuacccauagucaauaaacaauccuguuccauaucaaacauagaaacaguaaucgaauuucaacaaaaaaacaacagauuacuagaaauaacacgcgaauuuucagucaacgccggaguaaccacacccgucucaacauacaugcuaaccaacuccgaacuacuaucacuuaucaacgacaugccaauaacaaaugaccaaaaaaaacucaugucaaacaacguacaaauaguccgccaacaaucauacucuauaaugucuauuaucaaagaagaaguucucgcauacguaguacaacuaccacuauauggugucauagacacaccauguuggaaacuccauacaucacccuuauguacaaccaauacaaaagaaggcucaaacaucugccuaacucgaacagaccgaggaugguacugcgacaaugcaggaucugucucauucuucccucaagcagaaacauguaaaguucaaucuaauagaguuuucugcgauacaaugaacucacuaacucuaccaucagaaguaaaucucuguaauauugacauauucaacccaaaauacgauugcaagaucaugacaucaaaaacugacguaucauccucagucaucaccucauuaggagcaaucguaagcuguuacgggaaaacaaaaugcaccgcuucuaacaaaaauagaggaauaauuaaaaccuucucaaacggaugcgauuacgucuccaauaaaggaguagauacaguaagcguaggaaauacucuauacuacgucaauaaacaagaaggaaaaucacuuuaugucaaaggagaacccauaauaaauuucuacgacccauuagucuucccaucagaugaauuugacgcauccauaucccaagucaacgaaaaaaucaaucaaucacuagcauucauacgaaaaucagacgaacuacuacacaacguuaacguaggaaaaucaacaaccaacaucaugauaaccacuauaauaaucgucauaauagucauccuauuauuacuaauagccguaggccuuuuccuauacuguaaagcuagauaaggacuaguguccaccugucccuccugggcugcuggauugucucguuuuccugccaaauaaacaggaucagcgcuuuacagaucuaaaaaaaaaaaaaaaaaaaaaaaaaaaaaaaaaaaaaaaaaaaaaaaaaaaaaaaaaaaaaaaaugcaucccccccccccccccccccccccccccccccaaaggcucuuuucagagccaccagaauu

SEQ ID NO: 12439 - RNA, 2048 nt, Artificial Sequence
  mRNA product Design i-1 comprising derived and/or modified sequence from HRSV(Memphis-37)__AIY60640.1__F-del (opt11)
gggagagggcgcuuggcuugcaaggacccugagcugcggcauugaagcacacccaacccaacucgacugaagucagccucacugaaccggaucugagaaucuucucucucugggcuugccagggcucuccgaaccuagcuagcauccucuucaauuccaacuagaaagcuuaccauggaacucccgauccucaaaaccaacgccaucaccacuauccucgccgccguaacccucugcuucgccucaucccaaaacaucaccgaagaauuuuaccaauccacaugcuccgccgucuccaaagguuaccucucagcccuccgcaccggcugguacaccuccguuaucaccaucgaacuuuccaacauaaaagagaacaagugcaacggcaccgacgcaaaaguaaaacuaaucaaacaagaacuagacaaauacaaaaacgccgucaccgaacuccagcuccucaugcaaucgacgcccgccgccaacaaccgagcaaggcgcgaacuuccacgcuucaugaacuacacccucaacaacacuaaaaacaacaacgugacccuauccaaaaagcguaaacgccgauuccuagguuuccuucucggugucggcuccgccauugccuccggcaucgcuguuuccaaaguccuccaccucgaaggcgaaguaaacaagauaaaaaacgcccuccucucuacaaacaaggccgugguaucgcucucuaacggcgucucuguacucaccuccaaaguccucgaccucaaaaacuacaucgacaagcaacuccucccuaucgucaauaaacaauccugcuccauuuccaacaucgaaacagugaucgaauuucaacaaaaaaacaaccgauuacuagaaaucacccgcgaauuuucagucaacgccggcgucacaacgccagucucaaccuacaugcucaccaacucagaacucuuaucacucaucaacgacaugcccaucacuaacgaccagaaaaaacugauguccaacaacgugcaaauaguccgccaacaguccuacuccaucauguccauaaucaaggaggaggugcucgccuacguaguccaacucccccucuacggagucauugacaccccuugcuggaaacuacacaccuccccucucugcaccaccaacaccaaagaaggcagcaacaucugccuaaccaggacggaccgaggaugguacugcgacaaugcaggcuccgucagcuucuucccacaagccgaaacaugcaaaguucaaucaaaccguguauucugcgacaccaugaacucacucacccuccccucagaaguaaaccuaugcaacauagauaucuucaaccccaaauacgacugcaaaauuaugaccuccaaaaccgaugucuccagcuccguuaucacgucacucggcgccaucgucuccugcuacggcaagaccaaaugcaccgccuccaacaaaaaccgcggaauaaucaaaacauucucuaacggcugcgacuacgucuccaauaaaggcgucgacaccgucuccgugggcaacacgcuguacuacgucaacaaacaagaaggcaaaucucuuuacgucaaaggugaaccaaucaucaacuucuacgacccccucguauuccccuccgacgaauuugacgcgagcaucucccaagucaacgaaaagaucaaccaaucccucgccuucauccgaaaaagcgacgaacuccuccacaacgucaacgucggcaaaaguaccacaaacauuaugaucaccaccaucaucauagucaucaucgucauccugcuccuacuaauagccgucggccucuucuuguacugcaaggcacgaugaggacuaguguccaccugucccuccugggcugcuggauugucucguuuuccugccaaauaaacaggaucagcgcuuuacagaucuaaaaaaaaaaaaaaaaaaaaaaaaaaaaaaaaaaaaaaaaaaaaaaaaaaaaaaaaaaaaaaaaugcaucccccccccccccccccccccccccccccccaaaggcucuuuucagagccaccagaauu

SEQ ID NO: 12440 - RNA, 2048 nt, Artificial Sequence
  mRNA product Design i-2 comprising derived and/or modified sequence from HRSV(Memphis-37)__AIY60640.1__F-del (wt)
gggagaggcgcugccuacggagguggcagccaucuccuucucggcaucaagcuuaccauggaguugccaauccucaaaacaaaugcaauuaccacaauccuugcugcagucacacucuguuucgcuuccagucaaaacaucacugaagaauuuuaucaaucaacaugcagugcaguuagcaaaggcuaucuuagugcuuuaagaacugguugguauacuaguguuauaacuauagaauuaaguaauaucaaggaaaauaaguguaauggaacagaugcuaagguaaaauugauaaaacaagaauuagauaaauauaaaaaugcuguaacagaauugcaguugcucaugcaaagcacaccagcagccaacaaucgagccagaagagaacuaccaagguuuaugaauuauacacucaacaauaccaaaaauaacaauguaacauuaagcaagaaaaggaaaagaagauuucuuggcuuuuuguuagguguuggaucugcaaucgccaguggcauugcuguaucuaaaguccugcaccuagaaggggaagugaacaaaaucaaaaaugcucuacuauccacaaacaaggcuguagucagcuuaucaaauggaguuagugucuuaaccagcaaaguguuagaccucaaaaacuauauagauaaacaguuguuacccauugugaacaagcaaagcugcagcauaucaaacauugaaacugugauagaauuccaacaaaagaacaacagacuacuagagauuaccagggaauuuaguguuaaugcagguguaacuacaccuguaagcacuuauauguuaacaaauagugaauuauuaucauuaaucaaugauaugccuauaacaaaugaucagaaaaaguuaauguccaacaauguucaaauaguuagacagcaaaguuacucuaucauguccauaauaaaggaggaagucuuagcauauguaguucaauuaccacuauaugguguaauagauacaccuuguuggaaacuacacacauccccucuaugcacaaccaacacaaaggaaggguccaacaucuguuuaacaagaaccgacagaggaugguacugugacaaugcaggaucagugucuuucuucccacaagcugaaacaugcaaaguucaaucgaaucgaguauuuugugacacaaugaacagucuaacauuaccaagugaaguaaaucucugcaacauugacauauucaacccuaaauaugauugcaaaauuaugacuucaaaaacagaugugagcagcuccguuaucacaucucuaggagccauugugucaugcuauggcaaaacuaaauguacagcauccaauaaaaaucguggaaucauaaagacauuuucuaacgggugugauuauguaucaaauaaggggguggacacuguaucuguagguaauacauuauauuauguaaauaagcaagaaggaaaaagccucuauguaaaaggugaaccaauaauaaauuucuaugacccauuaguguucccuucugaugaauuugaugcaucaauaucucaagucaaugagaagauuaaccagagccuagcauuuauucguaaauccgaugaauuauuacauaauguaaauguugguaaauccaccacaaauaucaugauaacuacuauaauuauagugauuauaguaauauuguuauuauuaauugcaguugggcuguuccuauacugcaaggccagaugaggacuagugcaucacauuuaaaagcaucucagccuaccaugagaauaagagaaagaaaaugaagaucaauagcuuauucaucucuuuuucuuuuucguugguguaaagccaacacccugucuaaaaaacauaaauuucuuuaaucauuuugccucuuuucucugugcuucaauuaauaaaaaauggaaagaaccuagaucuaaaaaaaaaaaaaaaaaaaaaaaaaaaaaaaaaaaaaaaaaaaaaaaaaaaaaaaaaaaaaaaaugcaucccccccccccccccccccccccccccccccaaaggcucuuuucagagccaccagaauu

SEQ ID NO: 12441 - RNA, 2048 nt, Artificial Sequence
  mRNA product Design i-2 comprising derived and/or modified sequence from HRSV(Memphis-37)__AIY60640.1__F-del (opt1)
gggagaggcgcugccuacggagguggcagccaucuccuucucggcaucaagcuuaccauggagcugcccauccucaagaccaacgccaucaccacgauccuggccgcggugacccugugcuucgccagcucccagaacaucaccgaggaguucuaccagagcacgugcuccgccgucagcaagggcuaccucuccgcccugcgcaccgggugguacaccagcgugaucaccaucgagcuguccaacaucaaggagaacaagugcaacggcaccgacgccaaggugaagcucaucaagcaggagcuggacaaguacaagaacgcggucacggagcugcagcuccugaugcagagcaccccggccgccaacaaccgggcccgccgggagcugccccgcuucaugaacuacacccucaacaacaccaagaacaacaacgugacgcuguccaagaagcggaagcgccgguuccugggguuccuccugggcguggggagcgcgaucgccuccggcaucgccgucagcaaggugcugcaccucgagggcgaggugaacaagaucaagaacgcccugcuguccaccaacaaggccgucgugagccucuccaacggggugagcguccugaccuccaaggugcuggaccucaagaacuacaucgacaagcagcugcugcccaucgugaacaagcagagcugcuccaucagcaacaucgagaccgucaucgaguuccagcagaagaacaaccgccuccuggagaucacgcgggaguucagcgugaacgcgggcgugaccacccccgucuccaccuacaugcugacgaacagcgagcuccugucccugaucaacgacaugccgaucaccaacgaccagaagaagcucaugagcaacaacgugcagaucgugcgccagcaguccuacagcaucauguccaucaucaaggaggagguccuggccuacguggugcagcugccccucuacggggucaucgacacccccugcuggaagcugcacaccagcccccugugcacgaccaacaccaaggagggcuccaacaucugccucacccggacggaccgcgggugguacugcgacaacgccggcagcguguccuucuucccgcaggccgagaccugcaagguccagagcaaccggguguucugcgacaccaugaacucccugacccugcccagcgaggugaaccucugcaacaucgacaucuucaaccccaaguacgacugcaagaucaugacguccaagaccgacgucagcuccagcgugaucaccucccugggcgccaucgugagcugcuacgggaagaccaagugcacggcgagcaacaagaaccgcggcaucaucaagaccuucuccaacgggugcgacuacgucagcaacaagggcguggacaccguguccgucggcaacacccuguacuacgugaacaagcaggagggcaagagccucuacgugaagggggagcccaucaucaacuucuacgacccgcuggucuuccccuccgacgaguucgacgccagcaucucccaggugaacgagaagaucaaccagagccuggccuucauccggaaguccgacgagcuccugcacaacgugaacgucggcaagagcaccacgaacaucaugaucaccaccaucaucaucgugaucaucgugauccugcugcuccugaucgccgucgggcuguuccucuacugcaaggcccgcugaggacuagugcaucacauuuaaaagcaucucagccuaccaugagaauaagagaaagaaaaugaagaucaauagcuuauucaucucuuuuucuuuuucguugguguaaagccaacacccugucuaaaaaacauaaauuucuuuaaucauuuugccucuuuucucugugcuucaauuaauaaaaaauggaaagaaccuagaucuaaaaaaaaaaaaaaaaaaaaaaaaaaaaaaaaaaaaaaaaaaaaaaaaaaaaaaaaaaaaaaaaugcaucccccccccccccccccccccccccccccccaaaggcucuuuucagagccaccagaauu

SEQ ID NO: 12442 - RNA, 2048 nt, Artificial Sequence
  mRNA product Design i-2 comprising derived and/or modified sequence from HRSV(Memphis-37)__AIY60640.1__F-del (opt2)
gggagaggcgcugccuacggagguggcagccaucuccuucucggcaucaagcuuaccauggagcuccccauccucaagaccaacgccaucaccaccauccucgccgccgucacccucugcuucgccuccucccagaacaucaccgaggaguucuaccaguccaccugcuccgccgucuccaagggcuaccucuccgcccuccgcaccggcugguacaccuccgucaucaccaucgagcucuccaacaucaaggagaacaagugcaacggcaccgacgccaaggucaagcucaucaagcaggagcucgacaaguacaagaacgccgucaccgagcuccagcuccucaugcaguccacccccgccgccaacaaccgcgcccgccgcgagcucccccgcuucaugaacuacacccucaacaacaccaagaacaacaacgucacccucuccaagaagcgcaagcgccgcuuccucggcuuccuccucggcgucggcuccgccaucgccuccggcaucgccgucuccaagguccuccaccucgagggcgaggucaacaagaucaagaacgcccuccucuccaccaacaaggccgucgucucccucuccaacggcgucuccguccucaccuccaagguccucgaccucaagaacuacaucgacaagcagcuccuccccaucgucaacaagcaguccugcuccaucuccaacaucgagaccgucaucgaguuccagcagaagaacaaccgccuccucgagaucacccgcgaguucuccgucaacgccggcgucaccacccccgucuccaccuacaugcucaccaacuccgagcuccucucccucaucaacgacaugcccaucaccaacgaccagaagaagcucauguccaacaacguccagaucguccgccagcaguccuacuccaucauguccaucaucaaggaggagguccucgccuacgucguccagcucccccucuacggcgucaucgacacccccugcuggaagcuccacaccuccccccucugcaccaccaacaccaaggagggcuccaacaucugccucacccgcaccgaccgcggcugguacugcgacaacgccggcuccgucuccuucuucccccaggccgagaccugcaagguccaguccaaccgcgucuucugcgacaccaugaacucccucacccuccccuccgaggucaaccucugcaacaucgacaucuucaaccccaaguacgacugcaagaucaugaccuccaagaccgacgucuccuccuccgucaucaccucccucggcgccaucgucuccugcuacggcaagaccaagugcaccgccuccaacaagaaccgcggcaucaucaagaccuucuccaacggcugcgacuacgucuccaacaagggcgucgacaccgucuccgucggcaacacccucuacuacgucaacaagcaggagggcaagucccucuacgucaagggcgagcccaucaucaacuucuacgacccccucgucuuccccuccgacgaguucgacgccuccaucucccaggucaacgagaagaucaaccagucccucgccuucauccgcaaguccgacgagcuccuccacaacgucaacgucggcaaguccaccaccaacaucaugaucaccaccaucaucaucgucaucaucgucauccuccuccuccucaucgccgucggccucuuccucuacugcaaggcccgcugaggacuagugcaucacauuuaaaagcaucucagccuaccaugagaauaagagaaagaaaaugaagaucaauagcuuauucaucucuuuuucuuuuucguugguguaaagccaacacccugucuaaaaaacauaaauuucuuuaaucauuuugccucuuuucucugugcuucaauuaauaaaaaauggaaagaaccuagaucuaaaaaaaaaaaaaaaaaaaaaaaaaaaaaaaaaaaaaaaaaaaaaaaaaaaaaaaaaaaaaaaaugcaucccccccccccccccccccccccccccccccaaaggcucuuuucagagccaccagaauu

SEQ ID NO: 12443 - RNA, 2048 nt, Artificial Sequence
  mRNA product Design i-2 comprising derived and/or modified sequence from HRSV(Memphis-37)__AIY60640.1__F-del (opt3)
gggagaggcgcugccuacggagguggcagccaucuccuucucggcaucaagcuuaccauggagcugcccauccucaagaccaacgccauuacaacuauacuugcugcagugacgcugugcuucgccagcucccagaauaucaccgaagaguuuuaccaaucuacauguucagcggucaguaaaggcuauuugagcgcuuuaagaacugggugguacaccuccguuauuacaaucgaacugucuaacauuaaggagaauaaaugcaacggaaccgacgccaaggugaaacuaaucaagcaggaacucgauaaguauaaaaaugcaguaacugagcugcagcuucugaugcagucgaccccugccgcuaacaauagggcacggcgcgaguugccacgauucaugaacuacacacucaauaacacgaagaauaacaaugugacucugagcaaaaagcguaaaagaagguuucuggguuuccucuuaggcgucgggucagccauagcuaguggaaucgccguguccaagguucugcaccuugaaggcgaggugaacaagauuaaaaaugcguugcugucuaccaacaaggcagucgugagccuauccaacgguguaucaguucucacaaguaaagugcuggaccuuaagaauuauaucgauaaacaacuguugccgauugucaacaagcagagcuguucuaucuccaauauagaaacugugauugaguuucagcagaaaaacaaucggcuccuggagaucacccgcgaguucucagugaacgccggggucacaacccccguuagcacguacauguuaacuaauagugaacugcucucucuuauuaacgacaugccuaucacaaaugaucaaaagaagcugauguccaacaaugugcagaucguaagacagcagagcuauucgauuaugucuauaaucaaagaagagguguuggcuuacgucgugcaacuaccacuguacggaguuauugacacccccugcuggaagcuccauacuuccccucuguguacaaccaacacgaaagaaggcucaaauaucugccuuaccaggacagaucggggcugguauugugacaacgccgggagugugagcuuuuucccacaggcagagacuugcaagguccaguccaaucgcguguuuugugauaccaugaacucucugacauugcccagcgagguaaaccucugcaauauagacauuuucaacccuaaauacgauuguaagaucaugacuucaaagaccgacguuaguuccagcgugaucacaucucugggagcuauugucucaugcuaugguaaaaccaagugcacugccaguaauaaaaaccgaggcaucauuaagacguuuagcaaugggugugauuacguguccaacaaaggagucgacacagugucuguuggcaauaccuuauauuacgugaacaagcaagaagguaagucgcuguauguaaaaggggagccaauaaucaauuucuacgacccgcuagucuuucccagcgaugaguucgacgcguccauuucacaggugaacgaaaagaucaaucagagucucgccuucaucagaaaaucugaugaacugcuucacaacguuaaugugggaaagagcacuaccaacauuaugauaacaaccaucauuaucgucauuaucgugauauugcugcuccugaucgcaguaggccuuuuucuguacugcaaagcuaggugaggacuagugcaucacauuuaaaagcaucucagccuaccaugagaauaagagaaagaaaaugaagaucaauagcuuauucaucucuuuuucuuuuucguugguguaaagccaacacccugucuaaaaaacauaaauuucuuuaaucauuuugccucuuuucucugugcuucaauuaauaaaaaauggaaagaaccuagaucuaaaaaaaaaaaaaaaaaaaaaaaaaaaaaaaaaaaaaaaaaaaaaaaaaaaaaaaaaaaaaaaaugcaucccccccccccccccccccccccccccccccaaaggcucuuuucagagccaccagaauu

SEQ ID NO: 12444 - RNA, 2048 nt, Artificial Sequence
  mRNA product Design i-2 comprising derived and/or modified sequence from HRSV(Memphis-37)__AIY60640.1__F-del (opt4)
gggagaggcgcugccuacggagguggcagccaucuccuucucggcaucaagcuuaccauggagcugcccauccugaagaccaacgccaucaccaccauccuggccgccgugacccugugcuucgccagcagccagaacaucaccgaggaguucuaccagagcaccugcagcgccgugagcaagggcuaccugagcgcccugagaaccggcugguacaccagcgugaucaccaucgagcugagcaacaucaaggagaacaagugcaacggcaccgacgccaaggugaagcugaucaagcaggagcuggacaaguacaagaacgccgugaccgagcugcagcugcugaugcagagcacccccgccgccaacaacagagccagaagagagcugcccagauucaugaacuacacccugaacaacaccaagaacaacaacgugacccugagcaagaagagaaagagaagauuccugggcuuccugcugggcgugggcagcgccaucgccagcggcaucgccgugagcaaggugcugcaccuggagggcgaggugaacaagaucaagaacgcccugcugagcaccaacaaggccguggugagccugagcaacggcgugagcgugcugaccagcaaggugcuggaccugaagaacuacaucgacaagcagcugcugcccaucgugaacaagcagagcugcagcaucagcaacaucgagaccgugaucgaguuccagcagaagaacaacagacugcuggagaucaccagagaguucagcgugaacgccggcgugaccacccccgugagcaccuacaugcugaccaacagcgagcugcugagccugaucaacgacaugcccaucaccaacgaccagaagaagcugaugagcaacaacgugcagaucgugagacagcagagcuacagcaucaugagcaucaucaaggaggaggugcuggccuacguggugcagcugccccuguacggcgugaucgacacccccugcuggaagcugcacaccagcccccugugcaccaccaacaccaaggagggcagcaacaucugccugaccagaaccgacagaggcugguacugcgacaacgccggcagcgugagcuucuucccccaggccgagaccugcaaggugcagagcaacagaguguucugcgacaccaugaacagccugacccugcccagcgaggugaaccugugcaacaucgacaucuucaaccccaaguacgacugcaagaucaugaccagcaagaccgacgugagcagcagcgugaucaccagccugggcgccaucgugagcugcuacggcaagaccaagugcaccgccagcaacaagaacagaggcaucaucaagaccuucagcaacggcugcgacuacgugagcaacaagggcguggacaccgugagcgugggcaacacccuguacuacgugaacaagcaggagggcaagagccuguacgugaagggcgagcccaucaucaacuucuacgacccccugguguuccccagcgacgaguucgacgccagcaucagccaggugaacgagaagaucaaccagagccuggccuucaucagaaagagcgacgagcugcugcacaacgugaacgugggcaagagcaccaccaacaucaugaucaccaccaucaucaucgugaucaucgugauccugcugcugcugaucgccgugggccuguuccuguacugcaaggccagaugaggacuagugcaucacauuuaaaagcaucucagccuaccaugagaauaagagaaagaaaaugaagaucaauagcuuauucaucucuuuuucuuuuucguugguguaaagccaacacccugucuaaaaaacauaaauuucuuuaaucauuuugccucuuuucucugugcuucaauuaauaaaaaauggaaagaaccuagaucuaaaaaaaaaaaaaaaaaaaaaaaaaaaaaaaaaaaaaaaaaaaaaaaaaaaaaaaaaaaaaaaaugcaucccccccccccccccccccccccccccccccaaaggcucuuuucagagccaccagaauu

SEQ ID NO: 12445 - RNA, 2048 nt, Artificial Sequence
  mRNA product Design i-2 comprising derived and/or modified sequence from HRSV(Memphis-37)__AIY60640.1__F-del (opt5)
gggagaggcgcugccuacggagguggcagccaucuccuucucggcaucaagcuuaccauggagcugcccauccucaagaccaacgccauuacaacgauccuggcugccgugacccuuugcuucgcgagcucccagaauauuacagaagaguuuuaccaaucuaccuguagcgcugucuccaaaggcuaucugucugcccucagaacagggugguacaccagcguuaucacaauugaacuguccaacaucaaggagaauaaaugcaacggaaccgacgccaaggugaaacuuaucaagcaggaacuggauaaguauaaaaaugcugugacggagcuccagcugcugaugcagucuaccccugccgcuaacaaucgggcccgcagagagcucccgcgguucaugaacuacacacugaauaacaccaagaauaacaaugucacacuuagcaaaaagcgcaaaagacgguuucugggcuuccuccugggggugggauccgcgauugccagcggcaucgcuguuucuaaggugcuucaccuggaaggggaggucaacaagauuaaaaaugcccuccuguccaccaacaaggcugugguuagccugucuaacggaguguccguccucacgagcaaagugcuggaccuuaagaauuauaucgauaaacaacugcuccccauugugaacaagcagucuuguuccaucagcaauauugaaacagucaucgaguuucagcagaaaaacaaucgccugcuugagaucaccagagaauuuuccguuaacgccggcgugacaaccccugugucuaccuacaugcugacaaauagcgagcuccugucccugauuaacgacaugcccaucacgaaugaucaaaagaagcucaugagcaacaauguccagauugugcggcagcagucuuauuccaucaugagcauuaucaaagaagagguucuggcguacgugguccaacuuccucuguacggcgugaucgacacccccugcuggaagcuccauacaucuccucuguguaccacaaacaccaaagaagggagcaauauuugccuuacgcgcacagauagaggaugguauugugacaacgccggcuccguuucuuucuucccgcaggcugagaccugcaaggugcagagcaaucgggucuuuugugauaccaugaacucccugacacuccccagcgaggugaaccugugcaauaucgacauuuucaacccuaaauacgauuguaagaucaugaccucuaagacagacgucuccagcucugugauuacgucccugggggccaucguuagcugcuauggaaaaaccaagugcacagcuuccaauaaaaaccgcggcaucauuaagaccuuuucuaaugggugugauuacgugagcaacaaaggagucgacacaguguccguuggcaauacccucuauuacgugaacaagcaagaaggcaagucucuguaugucaaaggggagcccaucauuaauuucuacgacccucuuguguuucccagcgaugaguucgacgccuccaucagccaggugaacgaaaagauuaaucagucucuggccuucaucagaaaauccgaugaacuccugcacaacguuaaugucggaaagagcacgaccaacauuaugaucacaaccaucauuaucgugauuaucgugauucugcuucuccugaucgcugucggccuguuucucuacugcaaagcgcggugaggacuagugcaucacauuuaaaagcaucucagccuaccaugagaauaagagaaagaaaaugaagaucaauagcuuauucaucucuuuuucuuuuucguugguguaaagccaacacccugucuaaaaaacauaaauuucuuuaaucauuuugccucuuuucucugugcuucaauuaauaaaaaauggaaagaaccuagaucuaaaaaaaaaaaaaaaaaaaaaaaaaaaaaaaaaaaaaaaaaaaaaaaaaaaaaaaaaaaaaaaaugcaucccccccccccccccccccccccccccccccaaaggcucuuuucagagccaccagaauu

SEQ ID NO: 12446 - RNA, 2048 nt, Artificial Sequence
  mRNA product Design i-2 comprising derived and/or modified sequence from HRSV(Memphis-37)__AIY60640.1__F-del (opt6)
gggagaggcgcugccuacggagguggcagccaucuccuucucggcaucaagcuuaccauggaacucccaauauuaaaaacuaacgcaaucacaaccauauuagcagccgucacucuaugcuuugccuccucacaaaauauaacagaagaauuuuaccaauccacaugcucagccguuagcaaaggauaucuaucagcccuaagaacaggcugguauacuucaguaauaacaauagaacuaucaaauauaaaagaaaacaaaugcaacggaaccgacgcuaaaguaaagcucauaaaacaagaauuagacaaauacaaaaaugcaguaacagaacuacaacuccuaaugcaaucaaccccagccgccaauaacagagcuagacgagaacuaccccgauucaugaauuacacacuaaacaacacaaaaaacaacaauguaacacucucaaaaaaaagaaaacgaagauucuuagguuuucuccugggaguaggaucagcaaucgcuuccggaaucgcagucaguaaaguccuucaccuugaaggcgaaguaaacaaaauaaaaaaugcacuacuaucuacaaauaaagcaguaguaucccuauccaauggcgucucaguauuaaccucaaaaguacucgaccuuaaaaauuauauagacaaacaauuacuacccauagucaauaaacaauccuguuccauaucaaacauagaaacaguaaucgaauuucaacaaaaaaacaacagauuacuagaaauaacacgcgaauuuucagucaacgccggaguaaccacacccgucucaacauacaugcuaaccaacuccgaacuacuaucacuuaucaacgacaugccaauaacaaaugaccaaaaaaaacucaugucaaacaacguacaaauaguccgccaacaaucauacucuauaaugucuauuaucaaagaagaaguucucgcauacguaguacaacuaccacuauauggugucauagacacaccauguuggaaacuccauacaucacccuuauguacaaccaauacaaaagaaggcucaaacaucugccuaacucgaacagaccgaggaugguacugcgacaaugcaggaucugucucauucuucccucaagcagaaacauguaaaguucaaucuaauagaguuuucugcgauacaaugaacucacuaacucuaccaucagaaguaaaucucuguaauauugacauauucaacccaaaauacgauugcaagaucaugacaucaaaaacugacguaucauccucagucaucaccucauuaggagcaaucguaagcuguuacgggaaaacaaaaugcaccgcuucuaacaaaaauagaggaauaauuaaaaccuucucaaacggaugcgauuacgucuccaauaaaggaguagauacaguaagcguaggaaauacucuauacuacgucaauaaacaagaaggaaaaucacuuuaugucaaaggagaacccauaauaaauuucuacgacccauuagucuucccaucagaugaauuugacgcauccauaucccaagucaacgaaaaaaucaaucaaucacuagcauucauacgaaaaucagacgaacuacuacacaacguuaacguaggaaaaucaacaaccaacaucaugauaaccacuauaauaaucgucauaauagucauccuauuauuacuaauagccguaggccuuuuccuauacuguaaagcuagauaaggacuagugcaucacauuuaaaagcaucucagccuaccaugagaauaagagaaagaaaaugaagaucaauagcuuauucaucucuuuuucuuuuucguugguguaaagccaacacccugucuaaaaaacauaaauuucuuuaaucauuuugccucuuuucucugugcuucaauuaauaaaaaauggaaagaaccuagaucuaaaaaaaaaaaaaaaaaaaaaaaaaaaaaaaaaaaaaaaaaaaaaaaaaaaaaaaaaaaaaaaaugcaucccccccccccccccccccccccccccccccaaaggcucuuuucagagccaccagaauu

SEQ ID NO: 12447 - RNA, 2048 nt, Artificial Sequence
  mRNA product Design i-2 comprising derived and/or modified sequence from HRSV(Memphis-37)__AIY60640.1__F-del (opt11)
gggagaggcgcugccuacggagguggcagccaucuccuucucggcaucaagcuuaccauggaacucccgauccucaaaaccaacgccaucaccacuauccucgccgccguaacccucugcuucgccucaucccaaaacaucaccgaagaauuuuaccaauccacaugcuccgccgucuccaaagguuaccucucagcccuccgcaccggcugguacaccuccguuaucaccaucgaacuuuccaacauaaaagagaacaagugcaacggcaccgacgcaaaaguaaaacuaaucaaacaagaacuagacaaauacaaaaacgccgucaccgaacuccagcuccucaugcaaucgacgcccgccgccaacaaccgagcaaggcgcgaacuuccacgcuucaugaacuacacccucaacaacacuaaaaacaacaacgugacccuauccaaaaagcguaaacgccgauuccuagguuuccuucucggugucggcuccgccauugccuccggcaucgcuguuuccaaaguccuccaccucgaaggcgaaguaaacaagauaaaaaacgcccuccucucuacaaacaaggccgugguaucgcucucuaacggcgucucuguacucaccuccaaaguccucgaccucaaaaacuacaucgacaagcaacuccucccuaucgucaauaaacaauccugcuccauuuccaacaucgaaacagugaucgaauuucaacaaaaaaacaaccgauuacuagaaaucacccgcgaauuuucagucaacgccggcgucacaacgccagucucaaccuacaugcucaccaacucagaacucuuaucacucaucaacgacaugcccaucacuaacgaccagaaaaaacugauguccaacaacgugcaaauaguccgccaacaguccuacuccaucauguccauaaucaaggaggaggugcucgccuacguaguccaacucccccucuacggagucauugacaccccuugcuggaaacuacacaccuccccucucugcaccaccaacaccaaagaaggcagcaacaucugccuaaccaggacggaccgaggaugguacugcgacaaugcaggcuccgucagcuucuucccacaagccgaaacaugcaaaguucaaucaaaccguguauucugcgacaccaugaacucacucacccuccccucagaaguaaaccuaugcaacauagauaucuucaaccccaaauacgacugcaaaauuaugaccuccaaaaccgaugucuccagcuccguuaucacgucacucggcgccaucgucuccugcuacggcaagaccaaaugcaccgccuccaacaaaaaccgcggaauaaucaaaacauucucuaacggcugcgacuacgucuccaauaaaggcgucgacaccgucuccgugggcaacacgcuguacuacgucaacaaacaagaaggcaaaucucuuuacgucaaaggugaaccaaucaucaacuucuacgacccccucguauuccccuccgacgaauuugacgcgagcaucucccaagucaacgaaaagaucaaccaaucccucgccuucauccgaaaaagcgacgaacuccuccacaacgucaacgucggcaaaaguaccacaaacauuaugaucaccaccaucaucauagucaucaucgucauccugcuccuacuaauagccgucggccucuucuuguacugcaaggcacgaugaggacuagugcaucacauuuaaaagcaucucagccuaccaugagaauaagagaaagaaaaugaagaucaauagcuuauucaucucuuuuucuuuuucguugguguaaagccaacacccugucuaaaaaacauaaauuucuuuaaucauuuugccucuuuucucugugcuucaauuaauaaaaaauggaaagaaccuagaucuaaaaaaaaaaaaaaaaaaaaaaaaaaaaaaaaaaaaaaaaaaaaaaaaaaaaaaaaaaaaaaaaugcaucccccccccccccccccccccccccccccccaaaggcucuuuucagagccaccagaauu

SEQ ID NO: 12448 - RNA, 2044 nt, Artificial Sequence
  mRNA product Design i-2 comprising derived and/or modified sequence from HRSV(Memphis-37)__AIY60640.1__F-del (wt)
ggggcgcugccuacggagguggcagccaucuccuucucggcaucaagcuuaccauggaguugccaauccucaaaacaaaugcaauuaccacaauccuugcugcagucacacucuguuucgcuuccagucaaaacaucacugaagaauuuuaucaaucaacaugcagugcaguuagcaaaggcuaucuuagugcuuuaagaacugguugguauacuaguguuauaacuauagaauuaaguaauaucaaggaaaauaaguguaauggaacagaugcuaagguaaaauugauaaaacaagaauuagauaaauauaaaaaugcuguaacagaauugcaguugcucaugcaaagcacaccagcagccaacaaucgagccagaagagaacuaccaagguuuaugaauuauacacucaacaauaccaaaaauaacaauguaacauuaagcaagaaaaggaaaagaagauuucuuggcuuuuuguuagguguuggaucugcaaucgccaguggcauugcuguaucuaaaguccugcaccuagaaggggaagugaacaaaaucaaaaaugcucuacuauccacaaacaaggcuguagucagcuuaucaaauggaguuagugucuuaaccagcaaaguguuagaccucaaaaacuauauagauaaacaguuguuacccauugugaacaagcaaagcugcagcauaucaaacauugaaacugugauagaauuccaacaaaagaacaacagacuacuagagauuaccagggaauuuaguguuaaugcagguguaacuacaccuguaagcacuuauauguuaacaaauagugaauuauuaucauuaaucaaugauaugccuauaacaaaugaucagaaaaaguuaauguccaacaauguucaaauaguuagacagcaaaguuacucuaucauguccauaauaaaggaggaagucuuagcauauguaguucaauuaccacuauaugguguaauagauacaccuuguuggaaacuacacacauccccucuaugcacaaccaacacaaaggaaggguccaacaucuguuuaacaagaaccgacagaggaugguacugugacaaugcaggaucagugucuuucuucccacaagcugaaacaugcaaaguucaaucgaaucgaguauuuugugacacaaugaacagucuaacauuaccaagugaaguaaaucucugcaacauugacauauucaacccuaaauaugauugcaaaauuaugacuucaaaaacagaugugagcagcuccguuaucacaucucuaggagccauugugucaugcuauggcaaaacuaaauguacagcauccaauaaaaaucguggaaucauaaagacauuuucuaacgggugugauuauguaucaaauaaggggguggacacuguaucuguagguaauacauuauauuauguaaauaagcaagaaggaaaaagccucuauguaaaaggugaaccaauaauaaauuucuaugacccauuaguguucccuucugaugaauuugaugcaucaauaucucaagucaaugagaagauuaaccagagccuagcauuuauucguaaauccgaugaauuauuacauaauguaaauguugguaaauccaccacaaauaucaugauaacuacuauaauuauagugauuauaguaauauuguuauuauuaauugcaguugggcuguuccuauacugcaaggccagaugaggacuagugcaucacauuuaaaagcaucucagccuaccaugagaauaagagaaagaaaaugaagaucaauagcuuauucaucucuuuuucuuuuucguugguguaaagccaacacccugucuaaaaaacauaaauuucuuuaaucauuuugccucuuuucucugugcuucaauuaauaaaaaauggaaagaaccuagaucuaaaaaaaaaaaaaaaaaaaaaaaaaaaaaaaaaaaaaaaaaaaaaaaaaaaaaaaaaaaaaaaaugcaucccccccccccccccccccccccccccccccaaaggcucuuuucagagccaccagaauu

SEQ ID NO: 12449 - RNA, 2044 nt, Artificial Sequence
  mRNA product Design i-2 comprising derived and/or modified sequence from HRSV(Memphis-37)__AIY60640.1__F-del (opt1)
ggggcgcugccuacggagguggcagccaucuccuucucggcaucaagcuuaccauggagcugcccauccucaagaccaacgccaucaccacgauccuggccgcggugacccugugcuucgccagcucccagaacaucaccgaggaguucuaccagagcacgugcuccgccgucagcaagggcuaccucuccgcccugcgcaccgggugguacaccagcgugaucaccaucgagcuguccaacaucaaggagaacaagugcaacggcaccgacgccaaggugaagcucaucaagcaggagcuggacaaguacaagaacgcggucacggagcugcagcuccugaugcagagcaccccggccgccaacaaccgggcccgccgggagcugccccgcuucaugaacuacacccucaacaacaccaagaacaacaacgugacgcuguccaagaagcggaagcgccgguuccugggguuccuccugggcguggggagcgcgaucgccuccggcaucgccgucagcaaggugcugcaccucgagggcgaggugaacaagaucaagaacgcccugcuguccaccaacaaggccgucgugagccucuccaacggggugagcguccugaccuccaaggugcuggaccucaagaacuacaucgacaagcagcugcugcccaucgugaacaagcagagcugcuccaucagcaacaucgagaccgucaucgaguuccagcagaagaacaaccgccuccuggagaucacgcgggaguucagcgugaacgcgggcgugaccacccccgucuccaccuacaugcugacgaacagcgagcuccugucccugaucaacgacaugccgaucaccaacgaccagaagaagcucaugagcaacaacgugcagaucgugcgccagcaguccuacagcaucauguccaucaucaaggaggagguccuggccuacguggugcagcugccccucuacggggucaucgacacccccugcuggaagcugcacaccagcccccugugcacgaccaacaccaaggagggcuccaacaucugccucacccggacggaccgcgggugguacugcgacaacgccggcagcguguccuucuucccgcaggccgagaccugcaagguccagagcaaccggguguucugcgacaccaugaacucccugacccugcccagcgaggugaaccucugcaacaucgacaucuucaaccccaaguacgacugcaagaucaugacguccaagaccgacgucagcuccagcgugaucaccucccugggcgccaucgugagcugcuacgggaagaccaagugcacggcgagcaacaagaaccgcggcaucaucaagaccuucuccaacgggugcgacuacgucagcaacaagggcguggacaccguguccgucggcaacacccuguacuacgugaacaagcaggagggcaagagccucuacgugaagggggagcccaucaucaacuucuacgacccgcuggucuuccccuccgacgaguucgacgccagcaucucccaggugaacgagaagaucaaccagagccuggccuucauccggaaguccgacgagcuccugcacaacgugaacgucggcaagagcaccacgaacaucaugaucaccaccaucaucaucgugaucaucgugauccugcugcuccugaucgccgucgggcuguuccucuacugcaaggcccgcugaggacuagugcaucacauuuaaaagcaucucagccuaccaugagaauaagagaaagaaaaugaagaucaauagcuuauucaucucuuuuucuuuuucguugguguaaagccaacacccugucuaaaaaacauaaauuucuuuaaucauuuugccucuuuucucugugcuucaauuaauaaaaaauggaaagaaccuagaucuaaaaaaaaaaaaaaaaaaaaaaaaaaaaaaaaaaaaaaaaaaaaaaaaaaaaaaaaaaaaaaaaugcaucccccccccccccccccccccccccccccccaaaggcucuuuucagagccaccagaauu

SEQ ID NO: 12450 - RNA, 2044 nt, Artificial Sequence
  mRNA product Design i-2 comprising derived and/or modified sequence from HRSV(Memphis-37)__AIY60640.1__F-del (opt2)
ggggcgcugccuacggagguggcagccaucuccuucucggcaucaagcuuaccauggagcuccccauccucaagaccaacgccaucaccaccauccucgccgccgucacccucugcuucgccuccucccagaacaucaccgaggaguucuaccaguccaccugcuccgccgucuccaagggcuaccucuccgcccuccgcaccggcugguacaccuccgucaucaccaucgagcucuccaacaucaaggagaacaagugcaacggcaccgacgccaaggucaagcucaucaagcaggagcucgacaaguacaagaacgccgucaccgagcuccagcuccucaugcaguccacccccgccgccaacaaccgcgcccgccgcgagcucccccgcuucaugaacuacacccucaacaacaccaagaacaacaacgucacccucuccaagaagcgcaagcgccgcuuccucggcuuccuccucggcgucggcuccgccaucgccuccggcaucgccgucuccaagguccuccaccucgagggcgaggucaacaagaucaagaacgcccuccucuccaccaacaaggccgucgucucccucuccaacggcgucuccguccucaccuccaagguccucgaccucaagaacuacaucgacaagcagcuccuccccaucgucaacaagcaguccugcuccaucuccaacaucgagaccgucaucgaguuccagcagaagaacaaccgccuccucgagaucacccgcgaguucuccgucaacgccggcgucaccacccccgucuccaccuacaugcucaccaacuccgagcuccucucccucaucaacgacaugcccaucaccaacgaccagaagaagcucauguccaacaacguccagaucguccgccagcaguccuacuccaucauguccaucaucaaggaggagguccucgccuacgucguccagcucccccucuacggcgucaucgacacccccugcuggaagcuccacaccuccccccucugcaccaccaacaccaaggagggcuccaacaucugccucacccgcaccgaccgcggcugguacugcgacaacgccggcuccgucuccuucuucccccaggccgagaccugcaagguccaguccaaccgcgucuucugcgacaccaugaacucccucacccuccccuccgaggucaaccucugcaacaucgacaucuucaaccccaaguacgacugcaagaucaugaccuccaagaccgacgucuccuccuccgucaucaccucccucggcgccaucgucuccugcuacggcaagaccaagugcaccgccuccaacaagaaccgcggcaucaucaagaccuucuccaacggcugcgacuacgucuccaacaagggcgucgacaccgucuccgucggcaacacccucuacuacgucaacaagcaggagggcaagucccucuacgucaagggcgagcccaucaucaacuucuacgacccccucgucuuccccuccgacgaguucgacgccuccaucucccaggucaacgagaagaucaaccagucccucgccuucauccgcaaguccgacgagcuccuccacaacgucaacgucggcaaguccaccaccaacaucaugaucaccaccaucaucaucgucaucaucgucauccuccuccuccucaucgccgucggccucuuccucuacugcaaggcccgcugaggacuagugcaucacauuuaaaagcaucucagccuaccaugagaauaagagaaagaaaaugaagaucaauagcuuauucaucucuuuuucuuuuucguugguguaaagccaacacccugucuaaaaaacauaaauuucuuuaaucauuuugccucuuuucucugugcuucaauuaauaaaaaauggaaagaaccuagaucuaaaaaaaaaaaaaaaaaaaaaaaaaaaaaaaaaaaaaaaaaaaaaaaaaaaaaaaaaaaaaaaaugcaucccccccccccccccccccccccccccccccaaaggcucuuuucagagccaccagaauu

SEQ ID NO: 12451 - RNA, 2044 nt, Artificial Sequence
  mRNA product Design i-2 comprising derived and/or modified sequence from HRSV(Memphis-37)__AIY60640.1__F-del (opt3)
ggggcgcugccuacggagguggcagccaucuccuucucggcaucaagcuuaccauggagcugcccauccucaagaccaacgccauuacaacuauacuugcugcagugacgcugugcuucgccagcucccagaauaucaccgaagaguuuuaccaaucuacauguucagcggucaguaaaggcuauuugagcgcuuuaagaacugggugguacaccuccguuauuacaaucgaacugucuaacauuaaggagaauaaaugcaacggaaccgacgccaaggugaaacuaaucaagcaggaacucgauaaguauaaaaaugcaguaacugagcugcagcuucugaugcagucgaccccugccgcuaacaauagggcacggcgcgaguugccacgauucaugaacuacacacucaauaacacgaagaauaacaaugugacucugagcaaaaagcguaaaagaagguuucuggguuuccucuuaggcgucgggucagccauagcuaguggaaucgccguguccaagguucugcaccuugaaggcgaggugaacaagauuaaaaaugcguugcugucuaccaacaaggcagucgugagccuauccaacgguguaucaguucucacaaguaaagugcuggaccuuaagaauuauaucgauaaacaacuguugccgauugucaacaagcagagcuguucuaucuccaauauagaaacugugauugaguuucagcagaaaaacaaucggcuccuggagaucacccgcgaguucucagugaacgccggggucacaacccccguuagcacguacauguuaacuaauagugaacugcucucucuuauuaacgacaugccuaucacaaaugaucaaaagaagcugauguccaacaaugugcagaucguaagacagcagagcuauucgauuaugucuauaaucaaagaagagguguuggcuuacgucgugcaacuaccacuguacggaguuauugacacccccugcuggaagcuccauacuuccccucuguguacaaccaacacgaaagaaggcucaaauaucugccuuaccaggacagaucggggcugguauugugacaacgccgggagugugagcuuuuucccacaggcagagacuugcaagguccaguccaaucgcguguuuugugauaccaugaacucucugacauugcccagcgagguaaaccucugcaauauagacauuuucaacccuaaauacgauuguaagaucaugacuucaaagaccgacguuaguuccagcgugaucacaucucugggagcuauugucucaugcuaugguaaaaccaagugcacugccaguaauaaaaaccgaggcaucauuaagacguuuagcaaugggugugauuacguguccaacaaaggagucgacacagugucuguuggcaauaccuuauauuacgugaacaagcaagaagguaagucgcuguauguaaaaggggagccaauaaucaauuucuacgacccgcuagucuuucccagcgaugaguucgacgcguccauuucacaggugaacgaaaagaucaaucagagucucgccuucaucagaaaaucugaugaacugcuucacaacguuaaugugggaaagagcacuaccaacauuaugauaacaaccaucauuaucgucauuaucgugauauugcugcuccugaucgcaguaggccuuuuucuguacugcaaagcuaggugaggacuagugcaucacauuuaaaagcaucucagccuaccaugagaauaagagaaagaaaaugaagaucaauagcuuauucaucucuuuuucuuuuucguugguguaaagccaacacccugucuaaaaaacauaaauuucuuuaaucauuuugccucuuuucucugugcuucaauuaauaaaaaauggaaagaaccuagaucuaaaaaaaaaaaaaaaaaaaaaaaaaaaaaaaaaaaaaaaaaaaaaaaaaaaaaaaaaaaaaaaaugcaucccccccccccccccccccccccccccccccaaaggcucuuuucagagccaccagaauu

SEQ ID NO: 12452 - RNA, 2044 nt, Artificial Sequence
  mRNA product Design i-2 comprising derived and/or modified sequence from HRSV(Memphis-37)__AIY60640.1__F-del (opt4)
ggggcgcugccuacggagguggcagccaucuccuucucggcaucaagcuuaccauggagcugcccauccugaagaccaacgccaucaccaccauccuggccgccgugacccugugcuucgccagcagccagaacaucaccgaggaguucuaccagagcaccugcagcgccgugagcaagggcuaccugagcgcccugagaaccggcugguacaccagcgugaucaccaucgagcugagcaacaucaaggagaacaagugcaacggcaccgacgccaaggugaagcugaucaagcaggagcuggacaaguacaagaacgccgugaccgagcugcagcugcugaugcagagcacccccgccgccaacaacagagccagaagagagcugcccagauucaugaacuacacccugaacaacaccaagaacaacaacgugacccugagcaagaagagaaagagaagauuccugggcuuccugcugggcgugggcagcgccaucgccagcggcaucgccgugagcaaggugcugcaccuggagggcgaggugaacaagaucaagaacgcccugcugagcaccaacaaggccguggugagccugagcaacggcgugagcgugcugaccagcaaggugcuggaccugaagaacuacaucgacaagcagcugcugcccaucgugaacaagcagagcugcagcaucagcaacaucgagaccgugaucgaguuccagcagaagaacaacagacugcuggagaucaccagagaguucagcgugaacgccggcgugaccacccccgugagcaccuacaugcugaccaacagcgagcugcugagccugaucaacgacaugcccaucaccaacgaccagaagaagcugaugagcaacaacgugcagaucgugagacagcagagcuacagcaucaugagcaucaucaaggaggaggugcuggccuacguggugcagcugccccuguacggcgugaucgacacccccugcuggaagcugcacaccagcccccugugcaccaccaacaccaaggagggcagcaacaucugccugaccagaaccgacagaggcugguacugcgacaacgccggcagcgugagcuucuucccccaggccgagaccugcaaggugcagagcaacagaguguucugcgacaccaugaacagccugacccugcccagcgaggugaaccugugcaacaucgacaucuucaaccccaaguacgacugcaagaucaugaccagcaagaccgacgugagcagcagcgugaucaccagccugggcgccaucgugagcugcuacggcaagaccaagugcaccgccagcaacaagaacagaggcaucaucaagaccuucagcaacggcugcgacuacgugagcaacaagggcguggacaccgugagcgugggcaacacccuguacuacgugaacaagcaggagggcaagagccuguacgugaagggcgagcccaucaucaacuucuacgacccccugguguuccccagcgacgaguucgacgccagcaucagccaggugaacgagaagaucaaccagagccuggccuucaucagaaagagcgacgagcugcugcacaacgugaacgugggcaagagcaccaccaacaucaugaucaccaccaucaucaucgugaucaucgugauccugcugcugcugaucgccgugggccuguuccuguacugcaaggccagaugaggacuagugcaucacauuuaaaagcaucucagccuaccaugagaauaagagaaagaaaaugaagaucaauagcuuauucaucucuuuuucuuuuucguugguguaaagccaacacccugucuaaaaaacauaaauuucuuuaaucauuuugccucuuuucucugugcuucaauuaauaaaaaauggaaagaaccuagaucuaaaaaaaaaaaaaaaaaaaaaaaaaaaaaaaaaaaaaaaaaaaaaaaaaaaaaaaaaaaaaaaaugcaucccccccccccccccccccccccccccccccaaaggcucuuuucagagccaccagaauu

SEQ ID NO: 12453 - RNA, 2044 nt, Artificial Sequence
  mRNA product Design i-2 comprising derived and/or modified sequence from HRSV(Memphis-37)__AIY60640.1__F-del (opt5)
ggggcgcugccuacggagguggcagccaucuccuucucggcaucaagcuuaccauggagcugcccauccucaagaccaacgccauuacaacgauccuggcugccgugacccuuugcuucgcgagcucccagaauauuacagaagaguuuuaccaaucuaccuguagcgcugucuccaaaggcuaucugucugcccucagaacagggugguacaccagcguuaucacaauugaacuguccaacaucaaggagaauaaaugcaacggaaccgacgccaaggugaaacuuaucaagcaggaacuggauaaguauaaaaaugcugugacggagcuccagcugcugaugcagucuaccccugccgcuaacaaucgggcccgcagagagcucccgcgguucaugaacuacacacugaauaacaccaagaauaacaaugucacacuuagcaaaaagcgcaaaagacgguuucugggcuuccuccugggggugggauccgcgauugccagcggcaucgcuguuucuaaggugcuucaccuggaaggggaggucaacaagauuaaaaaugcccuccuguccaccaacaaggcugugguuagccugucuaacggaguguccguccucacgagcaaagugcuggaccuuaagaauuauaucgauaaacaacugcuccccauugugaacaagcagucuuguuccaucagcaauauugaaacagucaucgaguuucagcagaaaaacaaucgccugcuugagaucaccagagaauuuuccguuaacgccggcgugacaaccccugugucuaccuacaugcugacaaauagcgagcuccugucccugauuaacgacaugcccaucacgaaugaucaaaagaagcucaugagcaacaauguccagauugugcggcagcagucuuauuccaucaugagcauuaucaaagaagagguucuggcguacgugguccaacuuccucuguacggcgugaucgacacccccugcuggaagcuccauacaucuccucuguguaccacaaacaccaaagaagggagcaauauuugccuuacgcgcacagauagaggaugguauugugacaacgccggcuccguuucuuucuucccgcaggcugagaccugcaaggugcagagcaaucgggucuuuugugauaccaugaacucccugacacuccccagcgaggugaaccugugcaauaucgacauuuucaacccuaaauacgauuguaagaucaugaccucuaagacagacgucuccagcucugugauuacgucccugggggccaucguuagcugcuauggaaaaaccaagugcacagcuuccaauaaaaaccgcggcaucauuaagaccuuuucuaaugggugugauuacgugagcaacaaaggagucgacacaguguccguuggcaauacccucuauuacgugaacaagcaagaaggcaagucucuguaugucaaaggggagcccaucauuaauuucuacgacccucuuguguuucccagcgaugaguucgacgccuccaucagccaggugaacgaaaagauuaaucagucucuggccuucaucagaaaauccgaugaacuccugcacaacguuaaugucggaaagagcacgaccaacauuaugaucacaaccaucauuaucgugauuaucgugauucugcuucuccugaucgcugucggccuguuucucuacugcaaagcgcggugaggacuagugcaucacauuuaaaagcaucucagccuaccaugagaauaagagaaagaaaaugaagaucaauagcuuauucaucucuuuuucuuuuucguugguguaaagccaacacccugucuaaaaaacauaaauuucuuuaaucauuuugccucuuuucucugugcuucaauuaauaaaaaauggaaagaaccuagaucuaaaaaaaaaaaaaaaaaaaaaaaaaaaaaaaaaaaaaaaaaaaaaaaaaaaaaaaaaaaaaaaaugcaucccccccccccccccccccccccccccccccaaaggcucuuuucagagccaccagaauu

SEQ ID NO: 12454 - RNA, 2044 nt, Artificial Sequence
  mRNA product Design i-2 comprising derived and/or modified sequence from HRSV(Memphis-37)__AIY60640.1__F-del (opt6)
ggggcgcugccuacggagguggcagccaucuccuucucggcaucaagcuuaccauggaacucccaauauuaaaaacuaacgcaaucacaaccauauuagcagccgucacucuaugcuuugccuccucacaaaauauaacagaagaauuuuaccaauccacaugcucagccguuagcaaaggauaucuaucagcccuaagaacaggcugguauacuucaguaauaacaauagaacuaucaaauauaaaagaaaacaaaugcaacggaaccgacgcuaaaguaaagcucauaaaacaagaauuagacaaauacaaaaaugcaguaacagaacuacaacuccuaaugcaaucaaccccagccgccaauaacagagcuagacgagaacuaccccgauucaugaauuacacacuaaacaacacaaaaaacaacaauguaacacucucaaaaaaaagaaaacgaagauucuuagguuuucuccugggaguaggaucagcaaucgcuuccggaaucgcagucaguaaaguccuucaccuugaaggcgaaguaaacaaaauaaaaaaugcacuacuaucuacaaauaaagcaguaguaucccuauccaauggcgucucaguauuaaccucaaaaguacucgaccuuaaaaauuauauagacaaacaauuacuacccauagucaauaaacaauccuguuccauaucaaacauagaaacaguaaucgaauuucaacaaaaaaacaacagauuacuagaaauaacacgcgaauuuucagucaacgccggaguaaccacacccgucucaacauacaugcuaaccaacuccgaacuacuaucacuuaucaacgacaugccaauaacaaaugaccaaaaaaaacucaugucaaacaacguacaaauaguccgccaacaaucauacucuauaaugucuauuaucaaagaagaaguucucgcauacguaguacaacuaccacuauauggugucauagacacaccauguuggaaacuccauacaucacccuuauguacaaccaauacaaaagaaggcucaaacaucugccuaacucgaacagaccgaggaugguacugcgacaaugcaggaucugucucauucuucccucaagcagaaacauguaaaguucaaucuaauagaguuuucugcgauacaaugaacucacuaacucuaccaucagaaguaaaucucuguaauauugacauauucaacccaaaauacgauugcaagaucaugacaucaaaaacugacguaucauccucagucaucaccucauuaggagcaaucguaagcuguuacgggaaaacaaaaugcaccgcuucuaacaaaaauagaggaauaauuaaaaccuucucaaacggaugcgauuacgucuccaauaaaggaguagauacaguaagcguaggaaauacucuauacuacgucaauaaacaagaaggaaaaucacuuuaugucaaaggagaacccauaauaaauuucuacgacccauuagucuucccaucagaugaauuugacgcauccauaucccaagucaacgaaaaaaucaaucaaucacuagcauucauacgaaaaucagacgaacuacuacacaacguuaacguaggaaaaucaacaaccaacaucaugauaaccacuauaauaaucgucauaauagucauccuauuauuacuaauagccguaggccuuuuccuauacuguaaagcuagauaaggacuagugcaucacauuuaaaagcaucucagccuaccaugagaauaagagaaagaaaaugaagaucaauagcuuauucaucucuuuuucuuuuucguugguguaaagccaacacccugucuaaaaaacauaaauuucuuuaaucauuuugccucuuuucucugugcuucaauuaauaaaaaauggaaagaaccuagaucuaaaaaaaaaaaaaaaaaaaaaaaaaaaaaaaaaaaaaaaaaaaaaaaaaaaaaaaaaaaaaaaaugcaucccccccccccccccccccccccccccccccaaaggcucuuuucagagccaccagaauu

SEQ ID NO: 12455 - RNA, 2044 nt, Artificial Sequence
  mRNA product Design i-2 comprising derived and/or modified sequence from HRSV(Memphis-37)__AIY60640.1__F-del (opt11)
ggggcgcugccuacggagguggcagccaucuccuucucggcaucaagcuuaccauggaacucccgauccucaaaaccaacgccaucaccacuauccucgccgccguaacccucugcuucgccucaucccaaaacaucaccgaagaauuuuaccaauccacaugcuccgccgucuccaaagguuaccucucagcccuccgcaccggcugguacaccuccguuaucaccaucgaacuuuccaacauaaaagagaacaagugcaacggcaccgacgcaaaaguaaaacuaaucaaacaagaacuagacaaauacaaaaacgccgucaccgaacuccagcuccucaugcaaucgacgcccgccgccaacaaccgagcaaggcgcgaacuuccacgcuucaugaacuacacccucaacaacacuaaaaacaacaacgugacccuauccaaaaagcguaaacgccgauuccuagguuuccuucucggugucggcuccgccauugccuccggcaucgcuguuuccaaaguccuccaccucgaaggcgaaguaaacaagauaaaaaacgcccuccucucuacaaacaaggccgugguaucgcucucuaacggcgucucuguacucaccuccaaaguccucgaccucaaaaacuacaucgacaagcaacuccucccuaucgucaauaaacaauccugcuccauuuccaacaucgaaacagugaucgaauuucaacaaaaaaacaaccgauuacuagaaaucacccgcgaauuuucagucaacgccggcgucacaacgccagucucaaccuacaugcucaccaacucagaacucuuaucacucaucaacgacaugcccaucacuaacgaccagaaaaaacugauguccaacaacgugcaaauaguccgccaacaguccuacuccaucauguccauaaucaaggaggaggugcucgccuacguaguccaacucccccucuacggagucauugacaccccuugcuggaaacuacacaccuccccucucugcaccaccaacaccaaagaaggcagcaacaucugccuaaccaggacggaccgaggaugguacugcgacaaugcaggcuccgucagcuucuucccacaagccgaaacaugcaaaguucaaucaaaccguguauucugcgacaccaugaacucacucacccuccccucagaaguaaaccuaugcaacauagauaucuucaaccccaaauacgacugcaaaauuaugaccuccaaaaccgaugucuccagcuccguuaucacgucacucggcgccaucgucuccugcuacggcaagaccaaaugcaccgccuccaacaaaaaccgcggaauaaucaaaacauucucuaacggcugcgacuacgucuccaauaaaggcgucgacaccgucuccgugggcaacacgcuguacuacgucaacaaacaagaaggcaaaucucuuuacgucaaaggugaaccaaucaucaacuucuacgacccccucguauuccccuccgacgaauuugacgcgagcaucucccaagucaacgaaaagaucaaccaaucccucgccuucauccgaaaaagcgacgaacuccuccacaacgucaacgucggcaaaaguaccacaaacauuaugaucaccaccaucaucauagucaucaucgucauccugcuccuacuaauagccgucggccucuucuuguacugcaaggcacgaugaggacuagugcaucacauuuaaaagcaucucagccuaccaugagaauaagagaaagaaaaugaagaucaauagcuuauucaucucuuuuucuuuuucguugguguaaagccaacacccugucuaaaaaacauaaauuucuuuaaucauuuugccucuuuucucugugcuucaauuaauaaaaaauggaaagaaccuagaucuaaaaaaaaaaaaaaaaaaaaaaaaaaaaaaaaaaaaaaaaaaaaaaaaaaaaaaaaaaaaaaaaugcaucccccccccccccccccccccccccccccccaaaggcucuuuucagagccaccagaauu

SEQ ID NO: 12456 - RNA, 1879 nt, Artificial Sequence
  mRNA product Design i-3 comprising derived and/or modified sequence from HRSV(Memphis-37)__AIY60640.1__F-del (wt)
gggagaaagcuuaccauggaguugccaauccucaaaacaaaugcaauuaccacaauccuugcugcagucacacucuguuucgcuuccagucaaaacaucacugaagaauuuuaucaaucaacaugcagugcaguuagcaaaggcuaucuuagugcuuuaagaacugguugguauacuaguguuauaacuauagaauuaaguaauaucaaggaaaauaaguguaauggaacagaugcuaagguaaaauugauaaaacaagaauuagauaaauauaaaaaugcuguaacagaauugcaguugcucaugcaaagcacaccagcagccaacaaucgagccagaagagaacuaccaagguuuaugaauuauacacucaacaauaccaaaaauaacaauguaacauuaagcaagaaaaggaaaagaagauuucuuggcuuuuuguuagguguuggaucugcaaucgccaguggcauugcuguaucuaaaguccugcaccuagaaggggaagugaacaaaaucaaaaaugcucuacuauccacaaacaaggcuguagucagcuuaucaaauggaguuagugucuuaaccagcaaaguguuagaccucaaaaacuauauagauaaacaguuguuacccauugugaacaagcaaagcugcagcauaucaaacauugaaacugugauagaauuccaacaaaagaacaacagacuacuagagauuaccagggaauuuaguguuaaugcagguguaacuacaccuguaagcacuuauauguuaacaaauagugaauuauuaucauuaaucaaugauaugccuauaacaaaugaucagaaaaaguuaauguccaacaauguucaaauaguuagacagcaaaguuacucuaucauguccauaauaaaggaggaagucuuagcauauguaguucaauuaccacuauaugguguaauagauacaccuuguuggaaacuacacacauccccucuaugcacaaccaacacaaaggaaggguccaacaucuguuuaacaagaaccgacagaggaugguacugugacaaugcaggaucagugucuuucuucccacaagcugaaacaugcaaaguucaaucgaaucgaguauuuugugacacaaugaacagucuaacauuaccaagugaaguaaaucucugcaacauugacauauucaacccuaaauaugauugcaaaauuaugacuucaaaaacagaugugagcagcuccguuaucacaucucuaggagccauugugucaugcuauggcaaaacuaaauguacagcauccaauaaaaaucguggaaucauaaagacauuuucuaacgggugugauuauguaucaaauaaggggguggacacuguaucuguagguaauacauuauauuauguaaauaagcaagaaggaaaaagccucuauguaaaaggugaaccaauaauaaauuucuaugacccauuaguguucccuucugaugaauuugaugcaucaauaucucaagucaaugagaagauuaaccagagccuagcauuuauucguaaauccgaugaauuauuacauaauguaaauguugguaaauccaccacaaauaucaugauaacuacuauaauuauagugauuauaguaauauuguuauuauuaauugcaguugggcuguuccuauacugcaaggccagaugaggacuaguuauaagacugacuagcccgaugggccucccaacgggcccuccuccccuccuugcaccgagauuaauaaaaaaaaaaaaaaaaaaaaaaaaaaaaaaaaaaaaaaaaaaaaaaaaaaaaaaaaaaaaaaaaugcaucccccccccccccccccccccccccccccccaaaggcucuuuucagagccaccagaauu

SEQ ID NO: 12457 - RNA, 1879 nt, Artificial Sequence
  mRNA product Design i-3 comprising derived and/or modified sequence from HRSV(Memphis-37)__AIY60640.1__F-del (opt1)
gggagaaagcuuaccauggagcugcccauccucaagaccaacgccaucaccacgauccuggccgcggugacccugugcuucgccagcucccagaacaucaccgaggaguucuaccagagcacgugcuccgccgucagcaagggcuaccucuccgcccugcgcaccgggugguacaccagcgugaucaccaucgagcuguccaacaucaaggagaacaagugcaacggcaccgacgccaaggugaagcucaucaagcaggagcuggacaaguacaagaacgcggucacggagcugcagcuccugaugcagagcaccccggccgccaacaaccgggcccgccgggagcugccccgcuucaugaacuacacccucaacaacaccaagaacaacaacgugacgcuguccaagaagcggaagcgccgguuccugggguuccuccugggcguggggagcgcgaucgccuccggcaucgccgucagcaaggugcugcaccucgagggcgaggugaacaagaucaagaacgcccugcuguccaccaacaaggccgucgugagccucuccaacggggugagcguccugaccuccaaggugcuggaccucaagaacuacaucgacaagcagcugcugcccaucgugaacaagcagagcugcuccaucagcaacaucgagaccgucaucgaguuccagcagaagaacaaccgccuccuggagaucacgcgggaguucagcgugaacgcgggcgugaccacccccgucuccaccuacaugcugacgaacagcgagcuccugucccugaucaacgacaugccgaucaccaacgaccagaagaagcucaugagcaacaacgugcagaucgugcgccagcaguccuacagcaucauguccaucaucaaggaggagguccuggccuacguggugcagcugccccucuacggggucaucgacacccccugcuggaagcugcacaccagcccccugugcacgaccaacaccaaggagggcuccaacaucugccucacccggacggaccgcgggugguacugcgacaacgccggcagcguguccuucuucccgcaggccgagaccugcaagguccagagcaaccggguguucugcgacaccaugaacucccugacccugcccagcgaggugaaccucugcaacaucgacaucuucaaccccaaguacgacugcaagaucaugacguccaagaccgacgucagcuccagcgugaucaccucccugggcgccaucgugagcugcuacgggaagaccaagugcacggcgagcaacaagaaccgcggcaucaucaagaccuucuccaacgggugcgacuacgucagcaacaagggcguggacaccguguccgucggcaacacccuguacuacgugaacaagcaggagggcaagagccucuacgugaagggggagcccaucaucaacuucuacgacccgcuggucuuccccuccgacgaguucgacgccagcaucucccaggugaacgagaagaucaaccagagccuggccuucauccggaaguccgacgagcuccugcacaacgugaacgucggcaagagcaccacgaacaucaugaucaccaccaucaucaucgugaucaucgugauccugcugcuccugaucgccgucgggcuguuccucuacugcaaggcccgcugaggacuaguuauaagacugacuagcccgaugggccucccaacgggcccuccuccccuccuugcaccgagauuaauaaaaaaaaaaaaaaaaaaaaaaaaaaaaaaaaaaaaaaaaaaaaaaaaaaaaaaaaaaaaaaaaugcaucccccccccccccccccccccccccccccccaaaggcucuuuucagagccaccagaauu

SEQ ID NO: 12458 - RNA, 1879 nt, Artificial Sequence
  mRNA product Design i-3 comprising derived and/or modified sequence from HRSV(Memphis-37)__AIY60640.1__F-del (opt2)
gggagaaagcuuaccauggagcuccccauccucaagaccaacgccaucaccaccauccucgccgccgucacccucugcuucgccuccucccagaacaucaccgaggaguucuaccaguccaccugcuccgccgucuccaagggcuaccucuccgcccuccgcaccggcugguacaccuccgucaucaccaucgagcucuccaacaucaaggagaacaagugcaacggcaccgacgccaaggucaagcucaucaagcaggagcucgacaaguacaagaacgccgucaccgagcuccagcuccucaugcaguccacccccgccgccaacaaccgcgcccgccgcgagcucccccgcuucaugaacuacacccucaacaacaccaagaacaacaacgucacccucuccaagaagcgcaagcgccgcuuccucggcuuccuccucggcgucggcuccgccaucgccuccggcaucgccgucuccaagguccuccaccucgagggcgaggucaacaagaucaagaacgcccuccucuccaccaacaaggccgucgucucccucuccaacggcgucuccguccucaccuccaagguccucgaccucaagaacuacaucgacaagcagcuccuccccaucgucaacaagcaguccugcuccaucuccaacaucgagaccgucaucgaguuccagcagaagaacaaccgccuccucgagaucacccgcgaguucuccgucaacgccggcgucaccacccccgucuccaccuacaugcucaccaacuccgagcuccucucccucaucaacgacaugcccaucaccaacgaccagaagaagcucauguccaacaacguccagaucguccgccagcaguccuacuccaucauguccaucaucaaggaggagguccucgccuacgucguccagcucccccucuacggcgucaucgacacccccugcuggaagcuccacaccuccccccucugcaccaccaacaccaaggagggcuccaacaucugccucacccgcaccgaccgcggcugguacugcgacaacgccggcuccgucuccuucuucccccaggccgagaccugcaagguccaguccaaccgcgucuucugcgacaccaugaacucccucacccuccccuccgaggucaaccucugcaacaucgacaucuucaaccccaaguacgacugcaagaucaugaccuccaagaccgacgucuccuccuccgucaucaccucccucggcgccaucgucuccugcuacggcaagaccaagugcaccgccuccaacaagaaccgcggcaucaucaagaccuucuccaacggcugcgacuacgucuccaacaagggcgucgacaccgucuccgucggcaacacccucuacuacgucaacaagcaggagggcaagucccucuacgucaagggcgagcccaucaucaacuucuacgacccccucgucuuccccuccgacgaguucgacgccuccaucucccaggucaacgagaagaucaaccagucccucgccuucauccgcaaguccgacgagcuccuccacaacgucaacgucggcaaguccaccaccaacaucaugaucaccaccaucaucaucgucaucaucgucauccuccuccuccucaucgccgucggccucuuccucuacugcaaggcccgcugaggacuaguuauaagacugacuagcccgaugggccucccaacgggcccuccuccccuccuugcaccgagauuaauaaaaaaaaaaaaaaaaaaaaaaaaaaaaaaaaaaaaaaaaaaaaaaaaaaaaaaaaaaaaaaaaugcaucccccccccccccccccccccccccccccccaaaggcucuuuucagagccaccagaauu

SEQ ID NO: 12459 - RNA, 1879 nt, Artificial Sequence
  mRNA product Design i-3 comprising derived and/or modified sequence from HRSV(Memphis-37)__AIY60640.1__F-del (opt3)
gggagaaagcuuaccauggagcugcccauccucaagaccaacgccauuacaacuauacuugcugcagugacgcugugcuucgccagcucccagaauaucaccgaagaguuuuaccaaucuacauguucagcggucaguaaaggcuauuugagcgcuuuaagaacugggugguacaccuccguuauuacaaucgaacugucuaacauuaaggagaauaaaugcaacggaaccgacgccaaggugaaacuaaucaagcaggaacucgauaaguauaaaaaugcaguaacugagcugcagcuucugaugcagucgaccccugccgcuaacaauagggcacggcgcgaguugccacgauucaugaacuacacacucaauaacacgaagaauaacaaugugacucugagcaaaaagcguaaaagaagguuucuggguuuccucuuaggcgucgggucagccauagcuaguggaaucgccguguccaagguucugcaccuugaaggcgaggugaacaagauuaaaaaugcguugcugucuaccaacaaggcagucgugagccuauccaacgguguaucaguucucacaaguaaagugcuggaccuuaagaauuauaucgauaaacaacuguugccgauugucaacaagcagagcuguucuaucuccaauauagaaacugugauugaguuucagcagaaaaacaaucggcuccuggagaucacccgcgaguucucagugaacgccggggucacaacccccguuagcacguacauguuaacuaauagugaacugcucucucuuauuaacgacaugccuaucacaaaugaucaaaagaagcugauguccaacaaugugcagaucguaagacagcagagcuauucgauuaugucuauaaucaaagaagagguguuggcuuacgucgugcaacuaccacuguacggaguuauugacacccccugcuggaagcuccauacuuccccucuguguacaaccaacacgaaagaaggcucaaauaucugccuuaccaggacagaucggggcugguauugugacaacgccgggagugugagcuuuuucccacaggcagagacuugcaagguccaguccaaucgcguguuuugugauaccaugaacucucugacauugcccagcgagguaaaccucugcaauauagacauuuucaacccuaaauacgauuguaagaucaugacuucaaagaccgacguuaguuccagcgugaucacaucucugggagcuauugucucaugcuaugguaaaaccaagugcacugccaguaauaaaaaccgaggcaucauuaagacguuuagcaaugggugugauuacguguccaacaaaggagucgacacagugucuguuggcaauaccuuauauuacgugaacaagcaagaagguaagucgcuguauguaaaaggggagccaauaaucaauuucuacgacccgcuagucuuucccagcgaugaguucgacgcguccauuucacaggugaacgaaaagaucaaucagagucucgccuucaucagaaaaucugaugaacugcuucacaacguuaaugugggaaagagcacuaccaacauuaugauaacaaccaucauuaucgucauuaucgugauauugcugcuccugaucgcaguaggccuuuuucuguacugcaaagcuaggugaggacuaguuauaagacugacuagcccgaugggccucccaacgggcccuccuccccuccuugcaccgagauuaauaaaaaaaaaaaaaaaaaaaaaaaaaaaaaaaaaaaaaaaaaaaaaaaaaaaaaaaaaaaaaaaaugcaucccccccccccccccccccccccccccccccaaaggcucuuuucagagccaccagaauu

SEQ ID NO: 12460 - RNA, 1879 nt, Artificial Sequence
  mRNA product Design i-3 comprising derived and/or modified sequence from HRSV(Memphis-37)__AIY60640.1__F-del (opt4)
gggagaaagcuuaccauggagcugcccauccugaagaccaacgccaucaccaccauccuggccgccgugacccugugcuucgccagcagccagaacaucaccgaggaguucuaccagagcaccugcagcgccgugagcaagggcuaccugagcgcccugagaaccggcugguacaccagcgugaucaccaucgagcugagcaacaucaaggagaacaagugcaacggcaccgacgccaaggugaagcugaucaagcaggagcuggacaaguacaagaacgccgugaccgagcugcagcugcugaugcagagcacccccgccgccaacaacagagccagaagagagcugcccagauucaugaacuacacccugaacaacaccaagaacaacaacgugacccugagcaagaagagaaagagaagauuccugggcuuccugcugggcgugggcagcgccaucgccagcggcaucgccgugagcaaggugcugcaccuggagggcgaggugaacaagaucaagaacgcccugcugagcaccaacaaggccguggugagccugagcaacggcgugagcgugcugaccagcaaggugcuggaccugaagaacuacaucgacaagcagcugcugcccaucgugaacaagcagagcugcagcaucagcaacaucgagaccgugaucgaguuccagcagaagaacaacagacugcuggagaucaccagagaguucagcgugaacgccggcgugaccacccccgugagcaccuacaugcugaccaacagcgagcugcugagccugaucaacgacaugcccaucaccaacgaccagaagaagcugaugagcaacaacgugcagaucgugagacagcagagcuacagcaucaugagcaucaucaaggaggaggugcuggccuacguggugcagcugccccuguacggcgugaucgacacccccugcuggaagcugcacaccagcccccugugcaccaccaacaccaaggagggcagcaacaucugccugaccagaaccgacagaggcugguacugcgacaacgccggcagcgugagcuucuucccccaggccgagaccugcaaggugcagagcaacagaguguucugcgacaccaugaacagccugacccugcccagcgaggugaaccugugcaacaucgacaucuucaaccccaaguacgacugcaagaucaugaccagcaagaccgacgugagcagcagcgugaucaccagccugggcgccaucgugagcugcuacggcaagaccaagugcaccgccagcaacaagaacagaggcaucaucaagaccuucagcaacggcugcgacuacgugagcaacaagggcguggacaccgugagcgugggcaacacccuguacuacgugaacaagcaggagggcaagagccuguacgugaagggcgagcccaucaucaacuucuacgacccccugguguuccccagcgacgaguucgacgccagcaucagccaggugaacgagaagaucaaccagagccuggccuucaucagaaagagcgacgagcugcugcacaacgugaacgugggcaagagcaccaccaacaucaugaucaccaccaucaucaucgugaucaucgugauccugcugcugcugaucgccgugggccuguuccuguacugcaaggccagaugaggacuaguuauaagacugacuagcccgaugggccucccaacgggcccuccuccccuccuugcaccgagauuaauaaaaaaaaaaaaaaaaaaaaaaaaaaaaaaaaaaaaaaaaaaaaaaaaaaaaaaaaaaaaaaaaugcaucccccccccccccccccccccccccccccccaaaggcucuuuucagagccaccagaauu

SEQ ID NO: 12461 - RNA, 1879 nt, Artificial Sequence
  mRNA product Design i-3 comprising derived and/or modified sequence from HRSV(Memphis-37)__AIY60640.1__F-del (opt5)
gggagaaagcuuaccauggagcugcccauccucaagaccaacgccauuacaacgauccuggcugccgugacccuuugcuucgcgagcucccagaauauuacagaagaguuuuaccaaucuaccuguagcgcugucuccaaaggcuaucugucugcccucagaacagggugguacaccagcguuaucacaauugaacuguccaacaucaaggagaauaaaugcaacggaaccgacgccaaggugaaacuuaucaagcaggaacuggauaaguauaaaaaugcugugacggagcuccagcugcugaugcagucuaccccugccgcuaacaaucgggcccgcagagagcucccgcgguucaugaacuacacacugaauaacaccaagaauaacaaugucacacuuagcaaaaagcgcaaaagacgguuucugggcuuccuccugggggugggauccgcgauugccagcggcaucgcuguuucuaaggugcuucaccuggaaggggaggucaacaagauuaaaaaugcccuccuguccaccaacaaggcugugguuagccugucuaacggaguguccguccucacgagcaaagugcuggaccuuaagaauuauaucgauaaacaacugcuccccauugugaacaagcagucuuguuccaucagcaauauugaaacagucaucgaguuucagcagaaaaacaaucgccugcuugagaucaccagagaauuuuccguuaacgccggcgugacaaccccugugucuaccuacaugcugacaaauagcgagcuccugucccugauuaacgacaugcccaucacgaaugaucaaaagaagcucaugagcaacaauguccagauugugcggcagcagucuuauuccaucaugagcauuaucaaagaagagguucuggcguacgugguccaacuuccucuguacggcgugaucgacacccccugcuggaagcuccauacaucuccucuguguaccacaaacaccaaagaagggagcaauauuugccuuacgcgcacagauagaggaugguauugugacaacgccggcuccguuucuuucuucccgcaggcugagaccugcaaggugcagagcaaucgggucuuuugugauaccaugaacucccugacacuccccagcgaggugaaccugugcaauaucgacauuuucaacccuaaauacgauuguaagaucaugaccucuaagacagacgucuccagcucugugauuacgucccugggggccaucguuagcugcuauggaaaaaccaagugcacagcuuccaauaaaaaccgcggcaucauuaagaccuuuucuaaugggugugauuacgugagcaacaaaggagucgacacaguguccguuggcaauacccucuauuacgugaacaagcaagaaggcaagucucuguaugucaaaggggagcccaucauuaauuucuacgacccucuuguguuucccagcgaugaguucgacgccuccaucagccaggugaacgaaaagauuaaucagucucuggccuucaucagaaaauccgaugaacuccugcacaacguuaaugucggaaagagcacgaccaacauuaugaucacaaccaucauuaucgugauuaucgugauucugcuucuccugaucgcugucggccuguuucucuacugcaaagcgcggugaggacuaguuauaagacugacuagcccgaugggccucccaacgggcccuccuccccuccuugcaccgagauuaauaaaaaaaaaaaaaaaaaaaaaaaaaaaaaaaaaaaaaaaaaaaaaaaaaaaaaaaaaaaaaaaaugcaucccccccccccccccccccccccccccccccaaaggcucuuuucagagccaccagaauu

SEQ ID NO: 12462 - RNA, 1879 nt, Artificial Sequence
  mRNA product Design i-3 comprising derived and/or modified sequence from HRSV(Memphis-37)__AIY60640.1__F-del (opt6)
gggagaaagcuuaccauggaacucccaauauuaaaaacuaacgcaaucacaaccauauuagcagccgucacucuaugcuuugccuccucacaaaauauaacagaagaauuuuaccaauccacaugcucagccguuagcaaaggauaucuaucagcccuaagaacaggcugguauacuucaguaauaacaauagaacuaucaaauauaaaagaaaacaaaugcaacggaaccgacgcuaaaguaaagcucauaaaacaagaauuagacaaauacaaaaaugcaguaacagaacuacaacuccuaaugcaaucaaccccagccgccaauaacagagcuagacgagaacuaccccgauucaugaauuacacacuaaacaacacaaaaaacaacaauguaacacucucaaaaaaaagaaaacgaagauucuuagguuuucuccugggaguaggaucagcaaucgcuuccggaaucgcagucaguaaaguccuucaccuugaaggcgaaguaaacaaaauaaaaaaugcacuacuaucuacaaauaaagcaguaguaucccuauccaauggcgucucaguauuaaccucaaaaguacucgaccuuaaaaauuauauagacaaacaauuacuacccauagucaauaaacaauccuguuccauaucaaacauagaaacaguaaucgaauuucaacaaaaaaacaacagauuacuagaaauaacacgcgaauuuucagucaacgccggaguaaccacacccgucucaacauacaugcuaaccaacuccgaacuacuaucacuuaucaacgacaugccaauaacaaaugaccaaaaaaaacucaugucaaacaacguacaaauaguccgccaacaaucauacucuauaaugucuauuaucaaagaagaaguucucgcauacguaguacaacuaccacuauauggugucauagacacaccauguuggaaacuccauacaucacccuuauguacaaccaauacaaaagaaggcucaaacaucugccuaacucgaacagaccgaggaugguacugcgacaaugcaggaucugucucauucuucccucaagcagaaacauguaaaguucaaucuaauagaguuuucugcgauacaaugaacucacuaacucuaccaucagaaguaaaucucuguaauauugacauauucaacccaaaauacgauugcaagaucaugacaucaaaaacugacguaucauccucagucaucaccucauuaggagcaaucguaagcuguuacgggaaaacaaaaugcaccgcuucuaacaaaaauagaggaauaauuaaaaccuucucaaacggaugcgauuacgucuccaauaaaggaguagauacaguaagcguaggaaauacucuauacuacgucaauaaacaagaaggaaaaucacuuuaugucaaaggagaacccauaauaaauuucuacgacccauuagucuucccaucagaugaauuugacgcauccauaucccaagucaacgaaaaaaucaaucaaucacuagcauucauacgaaaaucagacgaacuacuacacaacguuaacguaggaaaaucaacaaccaacaucaugauaaccacuauaauaaucgucauaauagucauccuauuauuacuaauagccguaggccuuuuccuauacuguaaagcuagauaaggacuaguuauaagacugacuagcccgaugggccucccaacgggcccuccuccccuccuugcaccgagauuaauaaaaaaaaaaaaaaaaaaaaaaaaaaaaaaaaaaaaaaaaaaaaaaaaaaaaaaaaaaaaaaaaugcaucccccccccccccccccccccccccccccccaaaggcucuuuucagagccaccagaauu

SEQ ID NO: 12463 - RNA, 1879 nt, Artificial Sequence
  mRNA product Design i-3 comprising derived and/or modified sequence from HRSV(Memphis-37)__AIY60640.1__F-del (opt11)
gggagaaagcuuaccauggaacucccgauccucaaaaccaacgccaucaccacuauccucgccgccguaacccucugcuucgccucaucccaaaacaucaccgaagaauuuuaccaauccacaugcuccgccgucuccaaagguuaccucucagcccuccgcaccggcugguacaccuccguuaucaccaucgaacuuuccaacauaaaagagaacaagugcaacggcaccgacgcaaaaguaaaacuaaucaaacaagaacuagacaaauacaaaaacgccgucaccgaacuccagcuccucaugcaaucgacgcccgccgccaacaaccgagcaaggcgcgaacuuccacgcuucaugaacuacacccucaacaacacuaaaaacaacaacgugacccuauccaaaaagcguaaacgccgauuccuagguuuccuucucggugucggcuccgccauugccuccggcaucgcuguuuccaaaguccuccaccucgaaggcgaaguaaacaagauaaaaaacgcccuccucucuacaaacaaggccgugguaucgcucucuaacggcgucucuguacucaccuccaaaguccucgaccucaaaaacuacaucgacaagcaacuccucccuaucgucaauaaacaauccugcuccauuuccaacaucgaaacagugaucgaauuucaacaaaaaaacaaccgauuacuagaaaucacccgcgaauuuucagucaacgccggcgucacaacgccagucucaaccuacaugcucaccaacucagaacucuuaucacucaucaacgacaugcccaucacuaacgaccagaaaaaacugauguccaacaacgugcaaauaguccgccaacaguccuacuccaucauguccauaaucaaggaggaggugcucgccuacguaguccaacucccccucuacggagucauugacaccccuugcuggaaacuacacaccuccccucucugcaccaccaacaccaaagaaggcagcaacaucugccuaaccaggacggaccgaggaugguacugcgacaaugcaggcuccgucagcuucuucccacaagccgaaacaugcaaaguucaaucaaaccguguauucugcgacaccaugaacucacucacccuccccucagaaguaaaccuaugcaacauagauaucuucaaccccaaauacgacugcaaaauuaugaccuccaaaaccgaugucuccagcuccguuaucacgucacucggcgccaucgucuccugcuacggcaagaccaaaugcaccgccuccaacaaaaaccgcggaauaaucaaaacauucucuaacggcugcgacuacgucuccaauaaaggcgucgacaccgucuccgugggcaacacgcuguacuacgucaacaaacaagaaggcaaaucucuuuacgucaaaggugaaccaaucaucaacuucuacgacccccucguauuccccuccgacgaauuugacgcgagcaucucccaagucaacgaaaagaucaaccaaucccucgccuucauccgaaaaagcgacgaacuccuccacaacgucaacgucggcaaaaguaccacaaacauuaugaucaccaccaucaucauagucaucaucgucauccugcuccuacuaauagccgucggccucuucuuguacugcaaggcacgaugaggacuaguuauaagacugacuagcccgaugggccucccaacgggcccuccuccccuccuugcaccgagauuaauaaaaaaaaaaaaaaaaaaaaaaaaaaaaaaaaaaaaaaaaaaaaaaaaaaaaaaaaaaaaaaaaugcaucccccccccccccccccccccccccccccccaaaggcucuuuucagagccaccagaauu

SEQ ID NO: 12464 - protein, 574 aa, Artificial Sequence
  derived and/or modified protein sequence (artificial) from HRSV(Memphis-37)__AIY60640.1__F0_DSCav1
MELPILKTNAITTILAAVTLCFASSQNITEEFYQSTCSAVSKGYLSALRTGWYTSVITIELSNIKENKCNGTDAKVKLIKQELDKYKNAVTELQLLMQSTPAANNRARRELPRFMNYTLNNTKNNNVTLSKKRKRRFLGFLLGVGSAIASGIAVCKVLHLEGEVNKIKNALLSTNKAVVSLSNGVSVLTFKVLDLKNYIDKQLLPILNKQSCSISNIETVIEFQQKNNRLLEITREFSVNAGVTTPVSTYMLTNSELLSLINDMPITNDQKKLMSNNVQIVRQQSYSIMCIIKEEVLAYVVQLPLYGVIDTPCWKLHTSPLCTTNTKEGSNICLTRTDRGWYCDNAGSVSFFPQAETCKVQSNRVFCDTMNSLTLPSEVNLCNIDIFNPKYDCKIMTSKTDVSSSVITSLGAIVSCYGKTKCTASNKNRGIIKTFSNGCDYVSNKGVDTVSVGNTLYYVNKQEGKSLYVKGEPIINFYDPLVFPSDEFDASISQVNEKINQSLAFIRKSDELLHNVNVGKSTTNIMITTIIIVIIVILLLLIAVGLFLYCKARSTPVTLSKDQLSGINNIAFSN

SEQ ID NO: 12465 - RNA, 1725 nt, Artificial Sequence
  derived and/or modified CDS sequence (opt1) from HRSV(Memphis-37)__AIY60640.1__F0_DSCav1
auggagcugcccauccucaagaccaacgccaucaccacgauccuggccgcggugacccugugcuucgccagcucccagaacaucaccgaggaguucuaccagagcacgugcuccgccgucagcaagggcuaccucuccgcccugcgcaccgggugguacaccagcgugaucaccaucgagcuguccaacaucaaggagaacaagugcaacggcaccgacgccaaggugaagcucaucaagcaggagcuggacaaguacaagaacgcggucacggagcugcagcuccugaugcagagcaccccggccgccaacaaccgggcccgccgggagcugccccgcuucaugaacuacacccucaacaacaccaagaacaacaacgugacgcuguccaagaagcggaagcgccgguuccugggguuccuccugggcguggggagcgcgaucgccuccggcaucgccgucugcaaggugcugcaccucgagggcgaggugaacaagaucaagaacgcccugcuguccaccaacaaggccgucgugagccucuccaacggggugagcguccugaccuucaaggugcuggaccucaagaacuacaucgacaagcagcugcugcccauccugaacaagcagagcugcuccaucagcaacaucgagaccgucaucgaguuccagcagaagaacaaccgccuccuggagaucacgcgggaguucagcgugaacgcgggcgugaccacccccgucuccaccuacaugcugacgaacagcgagcuccugucccugaucaacgacaugccgaucaccaacgaccagaagaagcucaugagcaacaacgugcagaucgugcgccagcaguccuacagcaucaugugcaucaucaaggaggagguccuggccuacguggugcagcugccccucuacggggucaucgacacccccugcuggaagcugcacaccagcccccugugcacgaccaacaccaaggagggcuccaacaucugccucacccggacggaccgcgggugguacugcgacaacgccggcagcguguccuucuucccgcaggccgagaccugcaagguccagagcaaccggguguucugcgacaccaugaacucccugacccugcccagcgaggugaaccucugcaacaucgacaucuucaaccccaaguacgacugcaagaucaugacguccaagaccgacgucagcuccagcgugaucaccucccugggcgccaucgugagcugcuacgggaagaccaagugcacggcgagcaacaagaaccgcggcaucaucaagaccuucuccaacgggugcgacuacgucagcaacaagggcguggacaccguguccgucggcaacacccuguacuacgugaacaagcaggagggcaagagccucuacgugaagggggagcccaucaucaacuucuacgacccgcuggucuuccccuccgacgaguucgacgccagcaucucccaggugaacgagaagaucaaccagagccuggccuucauccggaaguccgacgagcuccugcacaacgugaacgucggcaagagcaccacgaacaucaugaucaccaccaucaucaucgugaucaucgugauccugcugcuccugaucgccgucgggcuguuccucuacugcaaggcccgcuccacccccgugacgcugagcaaggaccagcuguccgggaucaacaacaucgcguucagcaacuga

SEQ ID NO: 12466 - RNA, 1725 nt, Artificial Sequence
  derived and/or modified CDS sequence (opt1) from HRSV(Memphis-37)__AIY60640.1__F0_DSCav1
auggagcugcccauccucaagaccaacgccaucaccacgauccuggccgcggugacccugugcuucgccagcucccagaacaucaccgaggaguucuaccagagcacgugcuccgccgucagcaagggcuaccucuccgcccugcgcaccgggugguacaccagcgugaucaccaucgagcuguccaacaucaaggagaacaagugcaacggcaccgacgccaaggugaagcucaucaagcaggagcuggacaaguacaagaacgcggucacggagcugcagcuccugaugcagagcaccccggccgccaacaaccgggcccgccgggagcugccccgcuucaugaacuacacccucaacaacaccaagaacaacaacgugacgcuguccaagaagcggaagcgccgguuccugggguuccuccugggcguggggagcgcgaucgccuccggcaucgccgucugcaaggugcugcaccucgagggcgaggugaacaagaucaagaacgcccugcugagcaccaacaaggccgucgugucccucagcaacgggguguccguccugaccuucaaggugcuggaccucaagaacuacaucgacaagcagcugcugcccauccucaacaagcagagcugcuccaucagcaacaucgagaccgugaucgaguuccagcagaagaacaaccgccugcuggagaucacgcgggaguucuccgucaacgcgggcgugaccacccccgugagcaccuacaugcucacgaacagcgagcugcugucccucaucaacgacaugccgaucaccaacgaccagaagaagcugaugagcaacaacguccagaucgugcgccagcaguccuacagcaucaugugcaucaucaaggaggaggugcuggccuacgucgugcagcucccccuguacggggugaucgacacccccugcuggaagcugcacaccagcccccucugcacgaccaacaccaaggagggcagcaacaucugccugacccggacggaccgcgggugguacugcgacaacgccggcuccgucagcuucuucccgcaggccgagaccugcaaggugcaguccaaccgggucuucugcgacaccaugaacagccugacccuccccuccgaggugaaccugugcaacaucgacaucuucaaccccaaguacgacugcaagaucaugacgagcaagaccgacguguccagcuccgucaucaccagccugggcgccaucguguccugcuacgggaagaccaagugcacggcgagcaacaagaaccgcggcaucaucaagaccuucuccaacgggugcgacuacgugagcaacaagggcgucgacaccgugagcgugggcaacacccucuacuacgucaacaagcaggaggggaagucccuguacgugaagggcgagcccaucaucaacuucuacgacccgcugguguuccccagcgacgaguucgacgccuccaucagccaggucaacgagaagaucaaccagucccucgccuucauccggaaguccgacgagcugcugcacaacgugaacguggggaaguccaccacgaacaucaugaucaccaccaucaucaucgucaucaucgugauccugcuccugcugaucgccgugggccucuuccuguacugcaaggcccgcagcacccccgucacgcuguccaaggaccagcucagcgggaucaacaacaucgcguucuccaacuga

SEQ ID NO: 12467 - RNA, 1725 nt, Artificial Sequence
  derived and/or modified CDS sequence (opt2) from HRSV(Memphis-37)__AIY60640.1__F0_DSCav1
auggagcuccccauccucaagaccaacgccaucaccaccauccucgccgccgucacccucugcuucgccuccucccagaacaucaccgaggaguucuaccaguccaccugcuccgccgucuccaagggcuaccucuccgcccuccgcaccggcugguacaccuccgucaucaccaucgagcucuccaacaucaaggagaacaagugcaacggcaccgacgccaaggucaagcucaucaagcaggagcucgacaaguacaagaacgccgucaccgagcuccagcuccucaugcaguccacccccgccgccaacaaccgcgcccgccgcgagcucccccgcuucaugaacuacacccucaacaacaccaagaacaacaacgucacccucuccaagaagcgcaagcgccgcuuccucggcuuccuccucggcgucggcuccgccaucgccuccggcaucgccgucugcaagguccuccaccucgagggcgaggucaacaagaucaagaacgcccuccucuccaccaacaaggccgucgucucccucuccaacggcgucuccguccucaccuucaagguccucgaccucaagaacuacaucgacaagcagcuccuccccauccucaacaagcaguccugcuccaucuccaacaucgagaccgucaucgaguuccagcagaagaacaaccgccuccucgagaucacccgcgaguucuccgucaacgccggcgucaccacccccgucuccaccuacaugcucaccaacuccgagcuccucucccucaucaacgacaugcccaucaccaacgaccagaagaagcucauguccaacaacguccagaucguccgccagcaguccuacuccaucaugugcaucaucaaggaggagguccucgccuacgucguccagcucccccucuacggcgucaucgacacccccugcuggaagcuccacaccuccccccucugcaccaccaacaccaaggagggcuccaacaucugccucacccgcaccgaccgcggcugguacugcgacaacgccggcuccgucuccuucuucccccaggccgagaccugcaagguccaguccaaccgcgucuucugcgacaccaugaacucccucacccuccccuccgaggucaaccucugcaacaucgacaucuucaaccccaaguacgacugcaagaucaugaccuccaagaccgacgucuccuccuccgucaucaccucccucggcgccaucgucuccugcuacggcaagaccaagugcaccgccuccaacaagaaccgcggcaucaucaagaccuucuccaacggcugcgacuacgucuccaacaagggcgucgacaccgucuccgucggcaacacccucuacuacgucaacaagcaggagggcaagucccucuacgucaagggcgagcccaucaucaacuucuacgacccccucgucuuccccuccgacgaguucgacgccuccaucucccaggucaacgagaagaucaaccagucccucgccuucauccgcaaguccgacgagcuccuccacaacgucaacgucggcaaguccaccaccaacaucaugaucaccaccaucaucaucgucaucaucgucauccuccuccuccucaucgccgucggccucuuccucuacugcaaggcccgcuccacccccgucacccucuccaaggaccagcucuccggcaucaacaacaucgccuucuccaacuga

SEQ ID NO: 12468 - RNA, 1725 nt, Artificial Sequence
  derived and/or modified CDS sequence (opt3) from HRSV(Memphis-37)__AIY60640.1__F0_DSCav1
auggagcugcccauccucaagaccaacgccauuacaacuauacuugcugcagugacgcugugcuucgccagcucccagaauaucaccgaagaguuuuaccaaucuacauguucagcggucaguaaaggcuauuugagcgcuuuaagaacugggugguacaccuccguuauuacaaucgaacugucuaacauuaaggagaauaaaugcaacggaaccgacgccaaggugaaacuaaucaagcaggaacucgauaaguauaaaaaugcaguaacugagcugcagcuucugaugcagucgaccccugccgcuaacaauagggcacggcgcgaguugccacgauucaugaacuacacacucaauaacacgaagaauaacaaugugacucugagcaaaaagcguaaaagaagguuucuggguuuccucuuaggcgucgggucagccauagcuaguggaaucgccguguguaagguucugcaccuugaaggcgaggugaacaagauuaaaaaugcguugcuguccaccaacaaggcagucgugucucuaagcaacgguguauccguucucacauuuaaagugcuggaccuuaagaauuauaucgauaaacaacuguugccgauucucaacaagcagucaugcaguaucagcaauauagaaacugucauugaguuccagcagaaaaacaaucggcuguuagagaucacccgcgaauuuucugugaacgccggggugacaacccccgucuccacguacaugcugacuaauucagagcuccuuagccugauuaacgacaugccuaucacaaaugaucaaaagaaguugaugaguaacaauguucagaucgugagacagcagucuuauuccauuauguguauaaucaaagaagagguacuagcuuacgugguccaacugccacucuacggagugauugacacccccugcuggaagcugcauacuagcccucuuuguacaaccaacacgaaagaaggcucgaauaucugccugaccaggacagaucggggcugguauugugacaacgccgggucuguuuccuucuuuccacaggcagagacuugcaaggugcagucaaaucgcgucuucugugauaccaugaacaguuugacacuccccagcgaggugaaccugugcaauauagacauuuuuaacccuaaauacgauugcaagaucaugacuuccaagaccgacguaucuagcucaguuaucacaaguuuaggagcuauuguguccuguuaugguaaaaccaagugcacugccagcaauaaaaaccgaggcaucauuaagacguucucuaaugggugugauuacgucucaaacaaaggaguggacacagucagugugggcaauacccuguauuacguuaacaagcaagaagguaagagccuauaugugaaaggggagccaauaaucaauuuuuacgacccgcucguauuccccuccgaugaguucgacgcgucuauuucgcaggucaacgaaaagaucaaucagagccuggccuuuaucagaaaauccgaugaacuuuugcacaacgugaauguuggaaagucaacuaccaacauuaugauaacaaccaucauuaucgugauuaucgucauacugcuccugcuuaucgcagugggccuguucuuguacugcaaagcuaggaguacuccuguaacacucucuaaggaccagcugagcggcauuaauaacaucgccuuuuccaacuga

SEQ ID NO: 12469 - RNA, 1725 nt, Artificial Sequence
  derived and/or modified CDS sequence (opt4) from HRSV(Memphis-37)__AIY60640.1__F0_DSCav1
auggagcugcccauccugaagaccaacgccaucaccaccauccuggccgccgugacccugugcuucgccagcagccagaacaucaccgaggaguucuaccagagcaccugcagcgccgugagcaagggcuaccugagcgcccugagaaccggcugguacaccagcgugaucaccaucgagcugagcaacaucaaggagaacaagugcaacggcaccgacgccaaggugaagcugaucaagcaggagcuggacaaguacaagaacgccgugaccgagcugcagcugcugaugcagagcacccccgccgccaacaacagagccagaagagagcugcccagauucaugaacuacacccugaacaacaccaagaacaacaacgugacccugagcaagaagagaaagagaagauuccugggcuuccugcugggcgugggcagcgccaucgccagcggcaucgccgugugcaaggugcugcaccuggagggcgaggugaacaagaucaagaacgcccugcugagcaccaacaaggccguggugagccugagcaacggcgugagcgugcugaccuucaaggugcuggaccugaagaacuacaucgacaagcagcugcugcccauccugaacaagcagagcugcagcaucagcaacaucgagaccgugaucgaguuccagcagaagaacaacagacugcuggagaucaccagagaguucagcgugaacgccggcgugaccacccccgugagcaccuacaugcugaccaacagcgagcugcugagccugaucaacgacaugcccaucaccaacgaccagaagaagcugaugagcaacaacgugcagaucgugagacagcagagcuacagcaucaugugcaucaucaaggaggaggugcuggccuacguggugcagcugccccuguacggcgugaucgacacccccugcuggaagcugcacaccagcccccugugcaccaccaacaccaaggagggcagcaacaucugccugaccagaaccgacagaggcugguacugcgacaacgccggcagcgugagcuucuucccccaggccgagaccugcaaggugcagagcaacagaguguucugcgacaccaugaacagccugacccugcccagcgaggugaaccugugcaacaucgacaucuucaaccccaaguacgacugcaagaucaugaccagcaagaccgacgugagcagcagcgugaucaccagccugggcgccaucgugagcugcuacggcaagaccaagugcaccgccagcaacaagaacagaggcaucaucaagaccuucagcaacggcugcgacuacgugagcaacaagggcguggacaccgugagcgugggcaacacccuguacuacgugaacaagcaggagggcaagagccuguacgugaagggcgagcccaucaucaacuucuacgacccccugguguuccccagcgacgaguucgacgccagcaucagccaggugaacgagaagaucaaccagagccuggccuucaucagaaagagcgacgagcugcugcacaacgugaacgugggcaagagcaccaccaacaucaugaucaccaccaucaucaucgugaucaucgugauccugcugcugcugaucgccgugggccuguuccuguacugcaaggccagaagcacccccgugacccugagcaaggaccagcugagcggcaucaacaacaucgccuucagcaacuga

SEQ ID NO: 12470 - RNA, 1725 nt, Artificial Sequence
  derived and/or modified CDS sequence (opt5) from HRSV(Memphis-37)__AIY60640.1__F0_DSCav1
auggagcugcccauccucaagaccaacgccauuacaacgauccuggcugccgugacccuuugcuucgcgagcucccagaauauuacagaagaguuuuaccaaucuaccuguagcgcugucuccaaaggcuaucugucugcccucagaacagggugguacaccagcguuaucacaauugaacuguccaacaucaaggagaauaaaugcaacggaaccgacgccaaggugaaacuuaucaagcaggaacuggauaaguauaaaaaugcugugacggagcuccagcugcugaugcagucuaccccugccgcuaacaaucgggcccgcagagagcucccgcgguucaugaacuacacacugaauaacaccaagaauaacaaugucacacuuagcaaaaagcgcaaaagacgguuucugggcuuccuccugggggugggauccgcgauugccagcggcaucgcuguuuguaaggugcuucaccuggaaggggaggucaacaagauuaaaaaugcccuccugucuaccaacaaggcugugguuucccugagcaacggagugucuguccucacguuuaaagugcuggaccuuaagaauuauaucgauaaacaacugcuccccauucugaacaagcaguccugcagcaucucuaauauugaaacagugaucgaguuccagcagaaaaacaaucgccuucuggagaucaccagagaauuuuccgucaacgccggcguuacaaccccugugagcaccuacaugcucacaaauuccgagcugcugucucucauuaacgacaugcccaucacgaaugaucaaaagaagcugaugagcaacaaugugcagauuguccggcagcaguccuauagcaucauguguauuaucaaagaagaggugcuugcguacguugugcaacugccucucuacggcgucaucgacacccccugcuggaagcugcauacaucuccucuuuguaccacaaacaccaaagaaggguccaauauuugccugacgcgcacagauagaggaugguauugugacaacgccggcagcgugucuuucuuuccgcaggcugagaccugcaagguucagagcaaucggguguucugugauaccaugaacucccucacacugcccucugaggucaaccugugcaauaucgacauuuuuaacccuaaauacgauugcaagaucaugaccagcaagacagacguguccagcucugucauuacgucccucggggccaucgugagcuguuauggaaaaaccaagugcacagcuucuaauaaaaaccgcggcaucauuaagaccuucuccaaugggugugauuacguuagcaacaaaggaguggacacagucuccgugggcaauacccuguauuacguuaacaagcaagaaggcaagucucuuuaugugaaaggggagcccaucauuaauuuuuacgacccucuggucuuccccagcgaugaguucgacgccuccaucucucaggugaacgaaaagauuaaucagagccucgccuuuaucagaaaauccgaugaacugcugcacaacgugaauguuggaaagagcacgaccaacauuaugaucacaaccaucauuaucgucauuaucgugauucuucuccugcugaucgcugugggccucuuccuguacugcaaagcgcggucuacaccggucacccuuuccaaggaccagcugagcgggaucaauaacauugccuuuucuaacuga

SEQ ID NO: 12471 - RNA, 1725 nt, Artificial Sequence
  derived and/or modified CDS sequence (opt6) from HRSV(Memphis-37)__AIY60640.1__F0_DSCav1
auggaacucccaauccucaaaaccaaugccauaacaaccauacucgcugcaguaaccuuauguuucgcaaguagccaaaacauaaccgaagaauuuuaucaauccacaugcuccgcaguuucuaaaggauaucuaucagcauuaagaacuggaugguacacaucuguaauaacuauagaacuaagcaauauaaaagaaaacaaauguaacggaacugacgcuaaaguaaaacuuauaaaacaagaacuagauaaauacaaaaacgccguuaccgaacuacaacuauuaaugcaaucaacaccagccgcaaauaacagagcaagacgcgaauuaccaagauucaugaauuacacacuaaacaauacaaaaaauaacaauguaacacuaucaaaaaaaagaaaacgacgauucuuaggcuuccuacuaggagucggcucagcaauagcuuccggaauagccgucuguaaaguccuacaccuugaaggcgaaguaaacaaaaucaaaaacgcacuauuaucaacaaacaaagcagucguaucuuuauccaacggagucucaguccuaacauucaaaguacucgauuuaaaaaacuacaucgauaaacaacuccuucccauucuaaacaaacaauccugcucaauauccaacaucgaaacagucauagaauuucaacaaaaaaacaaccgccugcuagaaauaacaagagaauuuuccguaaaugccggcgucaccacaccaguaucaacauacaugcuaacaaacuccgaacuacucucccuaauaaacgauaugccaaucaccaacgaccaaaaaaaacuaaugucaaauaacguucaaauagucagacaacaaucauacagcauaaugugcauaauaaaagaagaagucuuagccuacguuguacaacucccauuauacggaguuaucgauacaccaugcuggaaauuacacacaucacccuuaugcaccacaaacacaaaagaaggauccaauauuugucuaacacgaacagacagaggaugguacugugauaacgcaggaucagugucauucuuuccacaagcagaaacauguaaaguucaaucuaacagaguauucugcgacaccaugaacucccuaaccuuacccucagaaguaaaucuaugcaacauagauaucuuuaacccaaaauacgacugcaaaaucaugacaucaaaaacugacguuucuucauccguuauaacuucccucggcgcuauaguguccugcuacggaaaaacuaaaugcacagcauccaacaaaaauagaggaauaauaaaaacauuuuccaacggcugcgacuauguuucaaacaaaggaguagauaccguaucagucggcaauacauuauauuauguuaacaaacaagaaggaaaaucccuauacguaaaaggagaaccuauaaucaacuucuacgacccacucguauuccccucagacgaauuugacgcaucuauaucucaaguaaaugaaaaaauaaaccaaucacucgcauuuauccgcaaaucugacgaauuacuccauaacgucaacgucggcaaaucaaccaccaacauaaugauaacaacaauuauaauaguaauaauugucauacuacuacuccuaauagcaguaggucuauuccuauacugcaaagcaagauccacccccguaacccuuuccaaagaucaacucucaggaauaaauaacauagccuuuucaaacuaa

SEQ ID NO: 12472 - RNA, 1725 nt, Artificial Sequence
  derived and/or modified CDS sequence (opt11) from HRSV(Memphis-37)__AIY60640.1__F0_DSCav1
auggaacuccccauacucaagacuaaugccaucaccaccauccucgccgccgugacccucugcuucgcaucgucccaaaacauaacagaagaguucuaccaaagcacaugcuccgcagucuccaaaggauaccucuccgcacuacguaccggcugguacaccagcgucaucaccaucgaacuuuccaacaucaaagagaacaaaugcaacggcaccgacgccaaaguaaaacucauaaaacaagagcuagacaaauacaaaaacgccgucacagaacuccaacuacugaugcaauccacaccggccgccaacaaccgcgcucgacgugaacucccacgcuucaugaacuacacucuuaacaacaccaaaaauaacaacgucacccuauccaaaaagcgaaagcgcagauuccucggcuuccuacuuggcgucggcucggcgauagccucuggaaucgccguuugcaagguccuccaccuagaaggcgaaguaaacaaaaucaaaaacgcacuccuaagcaccaacaaagccgucgucucacuuuccaacggcgucucaguccucacauucaaaguucucgaccuaaagaacuacaucgacaagcaacuacuacccauacucaauaaacaauccugcuccaucagcaacaucgagacagucaucgaauuucaacaaaagaacaaccgccuccucgaaauuacacgcgaguucucagucaacgccggagucaccaccccagucucaacauacaugcucaccaacagcgaacuccugucucuaaucaacgacaugcccaucacuaacgaccagaagaaacucauguccaacaacguccaaaucgugcgacaacaaucauacucuaucaugugcaucaucaaagaagaaguccucgcauacgucguccagcucccacucuacggcguaaucgacacacccugcuggaaacuccacacaucaccccuaugcaccaccaacacaaaagaaggcuccaacaucugccuaacccgaaccgacagagguugguauugcgacaacgccggcucagucucauucuucccacaagccgaaaccuguaaaguccaaucaaaccgcgucuucugcgauaccaugaacucucucacacuccccuccgaagucaaucucugcaacauagacaucuucaauccaaaguacgacugcaaaauaaugaccucgaaaaccgacguaagcuccagcgucaucaccuccuuaggcgcaaucguauccugcuacggcaaaaccaaaugcaccgccucaaacaaaaacagaggcaucaucaaaacguucucgaacggaugcgacuacguuuccaauaaaggcguagauaccgucuccgucggcaacacacucuauuacgucaacaaacaagaaggcaaaucccucuacgucaaaggugaaccuaucaucaacuucuacgacccccucgucuuccccagcgacgaguucgaugccucaaucagccaagucaacgagaaaaucaaccaaucacuggcuuucauacgcaaauccgacgaacuccuccacaacgugaacgucggcaaauccacaaccaacaucaugauaaccacaauaaucaucgucauaaucguaauccuacuccuccuuauugccguaggacuauuccuauacugcaaagcccgauccacccccgucacccucucaaaagaccaacucuccggcaucaacaauauagccuucucuaacuaa

SEQ ID NO: 12473 - RNA, 2001 nt, Artificial Sequence
  mRNA product Design a-1 comprising derived and/or modified sequence from HRSV(Memphis-37)__AIY60640.1__F0_DSCav1 (opt1)
gggagagucccgcagucggcguccagcggcucugcuuguucgugugugugucguugcaggccuuauucaagcuuaccauggagcugcccauccucaagaccaacgccaucaccacgauccuggccgcggugacccugugcuucgccagcucccagaacaucaccgaggaguucuaccagagcacgugcuccgccgucagcaagggcuaccucuccgcccugcgcaccgggugguacaccagcgugaucaccaucgagcuguccaacaucaaggagaacaagugcaacggcaccgacgccaaggugaagcucaucaagcaggagcuggacaaguacaagaacgcggucacggagcugcagcuccugaugcagagcaccccggccgccaacaaccgggcccgccgggagcugccccgcuucaugaacuacacccucaacaacaccaagaacaacaacgugacgcuguccaagaagcggaagcgccgguuccugggguuccuccugggcguggggagcgcgaucgccuccggcaucgccgucugcaaggugcugcaccucgagggcgaggugaacaagaucaagaacgcccugcuguccaccaacaaggccgucgugagccucuccaacggggugagcguccugaccuucaaggugcuggaccucaagaacuacaucgacaagcagcugcugcccauccugaacaagcagagcugcuccaucagcaacaucgagaccgucaucgaguuccagcagaagaacaaccgccuccuggagaucacgcgggaguucagcgugaacgcgggcgugaccacccccgucuccaccuacaugcugacgaacagcgagcuccugucccugaucaacgacaugccgaucaccaacgaccagaagaagcucaugagcaacaacgugcagaucgugcgccagcaguccuacagcaucaugugcaucaucaaggaggagguccuggccuacguggugcagcugccccucuacggggucaucgacacccccugcuggaagcugcacaccagcccccugugcacgaccaacaccaaggagggcuccaacaucugccucacccggacggaccgcgggugguacugcgacaacgccggcagcguguccuucuucccgcaggccgagaccugcaagguccagagcaaccggguguucugcgacaccaugaacucccugacccugcccagcgaggugaaccucugcaacaucgacaucuucaaccccaaguacgacugcaagaucaugacguccaagaccgacgucagcuccagcgugaucaccucccugggcgccaucgugagcugcuacgggaagaccaagugcacggcgagcaacaagaaccgcggcaucaucaagaccuucuccaacgggugcgacuacgucagcaacaagggcguggacaccguguccgucggcaacacccuguacuacgugaacaagcaggagggcaagagccucuacgugaagggggagcccaucaucaacuucuacgacccgcuggucuuccccuccgacgaguucgacgccagcaucucccaggugaacgagaagaucaaccagagccuggccuucauccggaaguccgacgagcuccugcacaacgugaacgucggcaagagcaccacgaacaucaugaucaccaccaucaucaucgugaucaucgugauccugcugcuccugaucgccgucgggcuguuccucuacugcaaggcccgcuccacccccgugacgcugagcaaggaccagcuguccgggaucaacaacaucgcguucagcaacugaggacuagucccuguucccagagcccacuuuuuuuucuuuuuuugaaauaaaauagccugucuuucagaucuaaaaaaaaaaaaaaaaaaaaaaaaaaaaaaaaaaaaaaaaaaaaaaaaaaaaaaaaaaaaaaaaugcaucccccccccccccccccccccccccccccccaaaggcucuuuucagagccaccagaauu

SEQ ID NO: 12474 - RNA, 2001 nt, Artificial Sequence
  mRNA product Design a-1 comprising derived and/or modified sequence from HRSV(Memphis-37)__AIY60640.1__F0_DSCav1 (opt1)
gggagagucccgcagucggcguccagcggcucugcuuguucgugugugugucguugcaggccuuauucaagcuuaccauggagcugcccauccucaagaccaacgccaucaccacgauccuggccgcggugacccugugcuucgccagcucccagaacaucaccgaggaguucuaccagagcacgugcuccgccgucagcaagggcuaccucuccgcccugcgcaccgggugguacaccagcgugaucaccaucgagcuguccaacaucaaggagaacaagugcaacggcaccgacgccaaggugaagcucaucaagcaggagcuggacaaguacaagaacgcggucacggagcugcagcuccugaugcagagcaccccggccgccaacaaccgggcccgccgggagcugccccgcuucaugaacuacacccucaacaacaccaagaacaacaacgugacgcuguccaagaagcggaagcgccgguuccugggguuccuccugggcguggggagcgcgaucgccuccggcaucgccgucugcaaggugcugcaccucgagggcgaggugaacaagaucaagaacgcccugcugagcaccaacaaggccgucgugucccucagcaacgggguguccguccugaccuucaaggugcuggaccucaagaacuacaucgacaagcagcugcugcccauccucaacaagcagagcugcuccaucagcaacaucgagaccgugaucgaguuccagcagaagaacaaccgccugcuggagaucacgcgggaguucuccgucaacgcgggcgugaccacccccgugagcaccuacaugcucacgaacagcgagcugcugucccucaucaacgacaugccgaucaccaacgaccagaagaagcugaugagcaacaacguccagaucgugcgccagcaguccuacagcaucaugugcaucaucaaggaggaggugcuggccuacgucgugcagcucccccuguacggggugaucgacacccccugcuggaagcugcacaccagcccccucugcacgaccaacaccaaggagggcagcaacaucugccugacccggacggaccgcgggugguacugcgacaacgccggcuccgucagcuucuucccgcaggccgagaccugcaaggugcaguccaaccgggucuucugcgacaccaugaacagccugacccuccccuccgaggugaaccugugcaacaucgacaucuucaaccccaaguacgacugcaagaucaugacgagcaagaccgacguguccagcuccgucaucaccagccugggcgccaucguguccugcuacgggaagaccaagugcacggcgagcaacaagaaccgcggcaucaucaagaccuucuccaacgggugcgacuacgugagcaacaagggcgucgacaccgugagcgugggcaacacccucuacuacgucaacaagcaggaggggaagucccuguacgugaagggcgagcccaucaucaacuucuacgacccgcugguguuccccagcgacgaguucgacgccuccaucagccaggucaacgagaagaucaaccagucccucgccuucauccggaaguccgacgagcugcugcacaacgugaacguggggaaguccaccacgaacaucaugaucaccaccaucaucaucgucaucaucgugauccugcuccugcugaucgccgugggccucuuccuguacugcaaggcccgcagcacccccgucacgcuguccaaggaccagcucagcgggaucaacaacaucgcguucuccaacugaggacuagucccuguucccagagcccacuuuuuuuucuuuuuuugaaauaaaauagccugucuuucagaucuaaaaaaaaaaaaaaaaaaaaaaaaaaaaaaaaaaaaaaaaaaaaaaaaaaaaaaaaaaaaaaaaugcaucccccccccccccccccccccccccccccccaaaggcucuuuucagagccaccagaauu

SEQ ID NO: 12475 - RNA, 2001 nt, Artificial Sequence
  mRNA product Design a-1 comprising derived and/or modified sequence from HRSV(Memphis-37)__AIY60640.1__F0_DSCav1 (opt2)
gggagagucccgcagucggcguccagcggcucugcuuguucgugugugugucguugcaggccuuauucaagcuuaccauggagcuccccauccucaagaccaacgccaucaccaccauccucgccgccgucacccucugcuucgccuccucccagaacaucaccgaggaguucuaccaguccaccugcuccgccgucuccaagggcuaccucuccgcccuccgcaccggcugguacaccuccgucaucaccaucgagcucuccaacaucaaggagaacaagugcaacggcaccgacgccaaggucaagcucaucaagcaggagcucgacaaguacaagaacgccgucaccgagcuccagcuccucaugcaguccacccccgccgccaacaaccgcgcccgccgcgagcucccccgcuucaugaacuacacccucaacaacaccaagaacaacaacgucacccucuccaagaagcgcaagcgccgcuuccucggcuuccuccucggcgucggcuccgccaucgccuccggcaucgccgucugcaagguccuccaccucgagggcgaggucaacaagaucaagaacgcccuccucuccaccaacaaggccgucgucucccucuccaacggcgucuccguccucaccuucaagguccucgaccucaagaacuacaucgacaagcagcuccuccccauccucaacaagcaguccugcuccaucuccaacaucgagaccgucaucgaguuccagcagaagaacaaccgccuccucgagaucacccgcgaguucuccgucaacgccggcgucaccacccccgucuccaccuacaugcucaccaacuccgagcuccucucccucaucaacgacaugcccaucaccaacgaccagaagaagcucauguccaacaacguccagaucguccgccagcaguccuacuccaucaugugcaucaucaaggaggagguccucgccuacgucguccagcucccccucuacggcgucaucgacacccccugcuggaagcuccacaccuccccccucugcaccaccaacaccaaggagggcuccaacaucugccucacccgcaccgaccgcggcugguacugcgacaacgccggcuccgucuccuucuucccccaggccgagaccugcaagguccaguccaaccgcgucuucugcgacaccaugaacucccucacccuccccuccgaggucaaccucugcaacaucgacaucuucaaccccaaguacgacugcaagaucaugaccuccaagaccgacgucuccuccuccgucaucaccucccucggcgccaucgucuccugcuacggcaagaccaagugcaccgccuccaacaagaaccgcggcaucaucaagaccuucuccaacggcugcgacuacgucuccaacaagggcgucgacaccgucuccgucggcaacacccucuacuacgucaacaagcaggagggcaagucccucuacgucaagggcgagcccaucaucaacuucuacgacccccucgucuuccccuccgacgaguucgacgccuccaucucccaggucaacgagaagaucaaccagucccucgccuucauccgcaaguccgacgagcuccuccacaacgucaacgucggcaaguccaccaccaacaucaugaucaccaccaucaucaucgucaucaucgucauccuccuccuccucaucgccgucggccucuuccucuacugcaaggcccgcuccacccccgucacccucuccaaggaccagcucuccggcaucaacaacaucgccuucuccaacugaggacuagucccuguucccagagcccacuuuuuuuucuuuuuuugaaauaaaauagccugucuuucagaucuaaaaaaaaaaaaaaaaaaaaaaaaaaaaaaaaaaaaaaaaaaaaaaaaaaaaaaaaaaaaaaaaugcaucccccccccccccccccccccccccccccccaaaggcucuuuucagagccaccagaauu

SEQ ID NO: 12476 - RNA, 2001 nt, Artificial Sequence
  mRNA product Design a-1 comprising derived and/or modified sequence from HRSV(Memphis-37)__AIY60640.1__F0_DSCav1 (opt3)
gggagagucccgcagucggcguccagcggcucugcuuguucgugugugugucguugcaggccuuauucaagcuuaccauggagcugcccauccucaagaccaacgccauuacaacuauacuugcugcagugacgcugugcuucgccagcucccagaauaucaccgaagaguuuuaccaaucuacauguucagcggucaguaaaggcuauuugagcgcuuuaagaacugggugguacaccuccguuauuacaaucgaacugucuaacauuaaggagaauaaaugcaacggaaccgacgccaaggugaaacuaaucaagcaggaacucgauaaguauaaaaaugcaguaacugagcugcagcuucugaugcagucgaccccugccgcuaacaauagggcacggcgcgaguugccacgauucaugaacuacacacucaauaacacgaagaauaacaaugugacucugagcaaaaagcguaaaagaagguuucuggguuuccucuuaggcgucgggucagccauagcuaguggaaucgccguguguaagguucugcaccuugaaggcgaggugaacaagauuaaaaaugcguugcuguccaccaacaaggcagucgugucucuaagcaacgguguauccguucucacauuuaaagugcuggaccuuaagaauuauaucgauaaacaacuguugccgauucucaacaagcagucaugcaguaucagcaauauagaaacugucauugaguuccagcagaaaaacaaucggcuguuagagaucacccgcgaauuuucugugaacgccggggugacaacccccgucuccacguacaugcugacuaauucagagcuccuuagccugauuaacgacaugccuaucacaaaugaucaaaagaaguugaugaguaacaauguucagaucgugagacagcagucuuauuccauuauguguauaaucaaagaagagguacuagcuuacgugguccaacugccacucuacggagugauugacacccccugcuggaagcugcauacuagcccucuuuguacaaccaacacgaaagaaggcucgaauaucugccugaccaggacagaucggggcugguauugugacaacgccgggucuguuuccuucuuuccacaggcagagacuugcaaggugcagucaaaucgcgucuucugugauaccaugaacaguuugacacuccccagcgaggugaaccugugcaauauagacauuuuuaacccuaaauacgauugcaagaucaugacuuccaagaccgacguaucuagcucaguuaucacaaguuuaggagcuauuguguccuguuaugguaaaaccaagugcacugccagcaauaaaaaccgaggcaucauuaagacguucucuaaugggugugauuacgucucaaacaaaggaguggacacagucagugugggcaauacccuguauuacguuaacaagcaagaagguaagagccuauaugugaaaggggagccaauaaucaauuuuuacgacccgcucguauuccccuccgaugaguucgacgcgucuauuucgcaggucaacgaaaagaucaaucagagccuggccuuuaucagaaaauccgaugaacuuuugcacaacgugaauguuggaaagucaacuaccaacauuaugauaacaaccaucauuaucgugauuaucgucauacugcuccugcuuaucgcagugggccuguucuuguacugcaaagcuaggaguacuccuguaacacucucuaaggaccagcugagcggcauuaauaacaucgccuuuuccaacugaggacuagucccuguucccagagcccacuuuuuuuucuuuuuuugaaauaaaauagccugucuuucagaucuaaaaaaaaaaaaaaaaaaaaaaaaaaaaaaaaaaaaaaaaaaaaaaaaaaaaaaaaaaaaaaaaugcaucccccccccccccccccccccccccccccccaaaggcucuuuucagagccaccagaauu

SEQ ID NO: 12477 - RNA, 2001 nt, Artificial Sequence
  mRNA product Design a-1 comprising derived and/or modified sequence from HRSV(Memphis-37)__AIY60640.1__F0_DSCav1 (opt4)
gggagagucccgcagucggcguccagcggcucugcuuguucgugugugugucguugcaggccuuauucaagcuuaccauggagcugcccauccugaagaccaacgccaucaccaccauccuggccgccgugacccugugcuucgccagcagccagaacaucaccgaggaguucuaccagagcaccugcagcgccgugagcaagggcuaccugagcgcccugagaaccggcugguacaccagcgugaucaccaucgagcugagcaacaucaaggagaacaagugcaacggcaccgacgccaaggugaagcugaucaagcaggagcuggacaaguacaagaacgccgugaccgagcugcagcugcugaugcagagcacccccgccgccaacaacagagccagaagagagcugcccagauucaugaacuacacccugaacaacaccaagaacaacaacgugacccugagcaagaagagaaagagaagauuccugggcuuccugcugggcgugggcagcgccaucgccagcggcaucgccgugugcaaggugcugcaccuggagggcgaggugaacaagaucaagaacgcccugcugagcaccaacaaggccguggugagccugagcaacggcgugagcgugcugaccuucaaggugcuggaccugaagaacuacaucgacaagcagcugcugcccauccugaacaagcagagcugcagcaucagcaacaucgagaccgugaucgaguuccagcagaagaacaacagacugcuggagaucaccagagaguucagcgugaacgccggcgugaccacccccgugagcaccuacaugcugaccaacagcgagcugcugagccugaucaacgacaugcccaucaccaacgaccagaagaagcugaugagcaacaacgugcagaucgugagacagcagagcuacagcaucaugugcaucaucaaggaggaggugcuggccuacguggugcagcugccccuguacggcgugaucgacacccccugcuggaagcugcacaccagcccccugugcaccaccaacaccaaggagggcagcaacaucugccugaccagaaccgacagaggcugguacugcgacaacgccggcagcgugagcuucuucccccaggccgagaccugcaaggugcagagcaacagaguguucugcgacaccaugaacagccugacccugcccagcgaggugaaccugugcaacaucgacaucuucaaccccaaguacgacugcaagaucaugaccagcaagaccgacgugagcagcagcgugaucaccagccugggcgccaucgugagcugcuacggcaagaccaagugcaccgccagcaacaagaacagaggcaucaucaagaccuucagcaacggcugcgacuacgugagcaacaagggcguggacaccgugagcgugggcaacacccuguacuacgugaacaagcaggagggcaagagccuguacgugaagggcgagcccaucaucaacuucuacgacccccugguguuccccagcgacgaguucgacgccagcaucagccaggugaacgagaagaucaaccagagccuggccuucaucagaaagagcgacgagcugcugcacaacgugaacgugggcaagagcaccaccaacaucaugaucaccaccaucaucaucgugaucaucgugauccugcugcugcugaucgccgugggccuguuccuguacugcaaggccagaagcacccccgugacccugagcaaggaccagcugagcggcaucaacaacaucgccuucagcaacugaggacuagucccuguucccagagcccacuuuuuuuucuuuuuuugaaauaaaauagccugucuuucagaucuaaaaaaaaaaaaaaaaaaaaaaaaaaaaaaaaaaaaaaaaaaaaaaaaaaaaaaaaaaaaaaaaugcaucccccccccccccccccccccccccccccccaaaggcucuuuucagagccaccagaauu

SEQ ID NO: 12478 - RNA, 2001 nt, Artificial Sequence
  mRNA product Design a-1 comprising derived and/or modified sequence from HRSV(Memphis-37)__AIY60640.1__F0_DSCav1 (opt5)
gggagagucccgcagucggcguccagcggcucugcuuguucgugugugugucguugcaggccuuauucaagcuuaccauggagcugcccauccucaagaccaacgccauuacaacgauccuggcugccgugacccuuugcuucgcgagcucccagaauauuacagaagaguuuuaccaaucuaccuguagcgcugucuccaaaggcuaucugucugcccucagaacagggugguacaccagcguuaucacaauugaacuguccaacaucaaggagaauaaaugcaacggaaccgacgccaaggugaaacuuaucaagcaggaacuggauaaguauaaaaaugcugugacggagcuccagcugcugaugcagucuaccccugccgcuaacaaucgggcccgcagagagcucccgcgguucaugaacuacacacugaauaacaccaagaauaacaaugucacacuuagcaaaaagcgcaaaagacgguuucugggcuuccuccugggggugggauccgcgauugccagcggcaucgcuguuuguaaggugcuucaccuggaaggggaggucaacaagauuaaaaaugcccuccugucuaccaacaaggcugugguuucccugagcaacggagugucuguccucacguuuaaagugcuggaccuuaagaauuauaucgauaaacaacugcuccccauucugaacaagcaguccugcagcaucucuaauauugaaacagugaucgaguuccagcagaaaaacaaucgccuucuggagaucaccagagaauuuuccgucaacgccggcguuacaaccccugugagcaccuacaugcucacaaauuccgagcugcugucucucauuaacgacaugcccaucacgaaugaucaaaagaagcugaugagcaacaaugugcagauuguccggcagcaguccuauagcaucauguguauuaucaaagaagaggugcuugcguacguugugcaacugccucucuacggcgucaucgacacccccugcuggaagcugcauacaucuccucuuuguaccacaaacaccaaagaaggguccaauauuugccugacgcgcacagauagaggaugguauugugacaacgccggcagcgugucuuucuuuccgcaggcugagaccugcaagguucagagcaaucggguguucugugauaccaugaacucccucacacugcccucugaggucaaccugugcaauaucgacauuuuuaacccuaaauacgauugcaagaucaugaccagcaagacagacguguccagcucugucauuacgucccucggggccaucgugagcuguuauggaaaaaccaagugcacagcuucuaauaaaaaccgcggcaucauuaagaccuucuccaaugggugugauuacguuagcaacaaaggaguggacacagucuccgugggcaauacccuguauuacguuaacaagcaagaaggcaagucucuuuaugugaaaggggagcccaucauuaauuuuuacgacccucuggucuuccccagcgaugaguucgacgccuccaucucucaggugaacgaaaagauuaaucagagccucgccuuuaucagaaaauccgaugaacugcugcacaacgugaauguuggaaagagcacgaccaacauuaugaucacaaccaucauuaucgucauuaucgugauucuucuccugcugaucgcugugggccucuuccuguacugcaaagcgcggucuacaccggucacccuuuccaaggaccagcugagcgggaucaauaacauugccuuuucuaacugaggacuagucccuguucccagagcccacuuuuuuuucuuuuuuugaaauaaaauagccugucuuucagaucuaaaaaaaaaaaaaaaaaaaaaaaaaaaaaaaaaaaaaaaaaaaaaaaaaaaaaaaaaaaaaaaaugcaucccccccccccccccccccccccccccccccaaaggcucuuuucagagccaccagaauu

SEQ ID NO: 12479 - RNA, 2001 nt, Artificial Sequence
  mRNA product Design a-1 comprising derived and/or modified sequence from HRSV(Memphis-37)__AIY60640.1__F0_DSCav1 (opt6)
gggagagucccgcagucggcguccagcggcucugcuuguucgugugugugucguugcaggccuuauucaagcuuaccauggaacucccaauccucaaaaccaaugccauaacaaccauacucgcugcaguaaccuuauguuucgcaaguagccaaaacauaaccgaagaauuuuaucaauccacaugcuccgcaguuucuaaaggauaucuaucagcauuaagaacuggaugguacacaucuguaauaacuauagaacuaagcaauauaaaagaaaacaaauguaacggaacugacgcuaaaguaaaacuuauaaaacaagaacuagauaaauacaaaaacgccguuaccgaacuacaacuauuaaugcaaucaacaccagccgcaaauaacagagcaagacgcgaauuaccaagauucaugaauuacacacuaaacaauacaaaaaauaacaauguaacacuaucaaaaaaaagaaaacgacgauucuuaggcuuccuacuaggagucggcucagcaauagcuuccggaauagccgucuguaaaguccuacaccuugaaggcgaaguaaacaaaaucaaaaacgcacuauuaucaacaaacaaagcagucguaucuuuauccaacggagucucaguccuaacauucaaaguacucgauuuaaaaaacuacaucgauaaacaacuccuucccauucuaaacaaacaauccugcucaauauccaacaucgaaacagucauagaauuucaacaaaaaaacaaccgccugcuagaaauaacaagagaauuuuccguaaaugccggcgucaccacaccaguaucaacauacaugcuaacaaacuccgaacuacucucccuaauaaacgauaugccaaucaccaacgaccaaaaaaaacuaaugucaaauaacguucaaauagucagacaacaaucauacagcauaaugugcauaauaaaagaagaagucuuagccuacguuguacaacucccauuauacggaguuaucgauacaccaugcuggaaauuacacacaucacccuuaugcaccacaaacacaaaagaaggauccaauauuugucuaacacgaacagacagaggaugguacugugauaacgcaggaucagugucauucuuuccacaagcagaaacauguaaaguucaaucuaacagaguauucugcgacaccaugaacucccuaaccuuacccucagaaguaaaucuaugcaacauagauaucuuuaacccaaaauacgacugcaaaaucaugacaucaaaaacugacguuucuucauccguuauaacuucccucggcgcuauaguguccugcuacggaaaaacuaaaugcacagcauccaacaaaaauagaggaauaauaaaaacauuuuccaacggcugcgacuauguuucaaacaaaggaguagauaccguaucagucggcaauacauuauauuauguuaacaaacaagaaggaaaaucccuauacguaaaaggagaaccuauaaucaacuucuacgacccacucguauuccccucagacgaauuugacgcaucuauaucucaaguaaaugaaaaaauaaaccaaucacucgcauuuauccgcaaaucugacgaauuacuccauaacgucaacgucggcaaaucaaccaccaacauaaugauaacaacaauuauaauaguaauaauugucauacuacuacuccuaauagcaguaggucuauuccuauacugcaaagcaagauccacccccguaacccuuuccaaagaucaacucucaggaauaaauaacauagccuuuucaaacuaaggacuagucccuguucccagagcccacuuuuuuuucuuuuuuugaaauaaaauagccugucuuucagaucuaaaaaaaaaaaaaaaaaaaaaaaaaaaaaaaaaaaaaaaaaaaaaaaaaaaaaaaaaaaaaaaaugcaucccccccccccccccccccccccccccccccaaaggcucuuuucagagccaccagaauu

SEQ ID NO: 12480 - RNA, 2001 nt, Artificial Sequence
  mRNA product Design a-1 comprising derived and/or modified sequence from HRSV(Memphis-37)__AIY60640.1__F0_DSCav1 (opt11)
gggagagucccgcagucggcguccagcggcucugcuuguucgugugugugucguugcaggccuuauucaagcuuaccauggaacuccccauacucaagacuaaugccaucaccaccauccucgccgccgugacccucugcuucgcaucgucccaaaacauaacagaagaguucuaccaaagcacaugcuccgcagucuccaaaggauaccucuccgcacuacguaccggcugguacaccagcgucaucaccaucgaacuuuccaacaucaaagagaacaaaugcaacggcaccgacgccaaaguaaaacucauaaaacaagagcuagacaaauacaaaaacgccgucacagaacuccaacuacugaugcaauccacaccggccgccaacaaccgcgcucgacgugaacucccacgcuucaugaacuacacucuuaacaacaccaaaaauaacaacgucacccuauccaaaaagcgaaagcgcagauuccucggcuuccuacuuggcgucggcucggcgauagccucuggaaucgccguuugcaagguccuccaccuagaaggcgaaguaaacaaaaucaaaaacgcacuccuaagcaccaacaaagccgucgucucacuuuccaacggcgucucaguccucacauucaaaguucucgaccuaaagaacuacaucgacaagcaacuacuacccauacucaauaaacaauccugcuccaucagcaacaucgagacagucaucgaauuucaacaaaagaacaaccgccuccucgaaauuacacgcgaguucucagucaacgccggagucaccaccccagucucaacauacaugcucaccaacagcgaacuccugucucuaaucaacgacaugcccaucacuaacgaccagaagaaacucauguccaacaacguccaaaucgugcgacaacaaucauacucuaucaugugcaucaucaaagaagaaguccucgcauacgucguccagcucccacucuacggcguaaucgacacacccugcuggaaacuccacacaucaccccuaugcaccaccaacacaaaagaaggcuccaacaucugccuaacccgaaccgacagagguugguauugcgacaacgccggcucagucucauucuucccacaagccgaaaccuguaaaguccaaucaaaccgcgucuucugcgauaccaugaacucucucacacuccccuccgaagucaaucucugcaacauagacaucuucaauccaaaguacgacugcaaaauaaugaccucgaaaaccgacguaagcuccagcgucaucaccuccuuaggcgcaaucguauccugcuacggcaaaaccaaaugcaccgccucaaacaaaaacagaggcaucaucaaaacguucucgaacggaugcgacuacguuuccaauaaaggcguagauaccgucuccgucggcaacacacucuauuacgucaacaaacaagaaggcaaaucccucuacgucaaaggugaaccuaucaucaacuucuacgacccccucgucuuccccagcgacgaguucgaugccucaaucagccaagucaacgagaaaaucaaccaaucacuggcuuucauacgcaaauccgacgaacuccuccacaacgugaacgucggcaaauccacaaccaacaucaugauaaccacaauaaucaucgucauaaucguaauccuacuccuccuuauugccguaggacuauuccuauacugcaaagcccgauccacccccgucacccucucaaaagaccaacucuccggcaucaacaauauagccuucucuaacuaaggacuagucccuguucccagagcccacuuuuuuuucuuuuuuugaaauaaaauagccugucuuucagaucuaaaaaaaaaaaaaaaaaaaaaaaaaaaaaaaaaaaaaaaaaaaaaaaaaaaaaaaaaaaaaaaaugcaucccccccccccccccccccccccccccccccaaaggcucuuuucagagccaccagaauu

SEQ ID NO: 12481 - RNA, 2020 nt, Artificial Sequence
  mRNA product Design a-2 comprising derived and/or modified sequence from HRSV(Memphis-37)__AIY60640.1__F0_DSCav1 (opt1)
gggagaguccgcucagccagguugcagaagcggcuuagcguguguccuaaucuucucucugcguguagguaggccugugccgcaaacaagcuuaccauggagcugcccauccucaagaccaacgccaucaccacgauccuggccgcggugacccugugcuucgccagcucccagaacaucaccgaggaguucuaccagagcacgugcuccgccgucagcaagggcuaccucuccgcccugcgcaccgggugguacaccagcgugaucaccaucgagcuguccaacaucaaggagaacaagugcaacggcaccgacgccaaggugaagcucaucaagcaggagcuggacaaguacaagaacgcggucacggagcugcagcuccugaugcagagcaccccggccgccaacaaccgggcccgccgggagcugccccgcuucaugaacuacacccucaacaacaccaagaacaacaacgugacgcuguccaagaagcggaagcgccgguuccugggguuccuccugggcguggggagcgcgaucgccuccggcaucgccgucugcaaggugcugcaccucgagggcgaggugaacaagaucaagaacgcccugcuguccaccaacaaggccgucgugagccucuccaacggggugagcguccugaccuucaaggugcuggaccucaagaacuacaucgacaagcagcugcugcccauccugaacaagcagagcugcuccaucagcaacaucgagaccgucaucgaguuccagcagaagaacaaccgccuccuggagaucacgcgggaguucagcgugaacgcgggcgugaccacccccgucuccaccuacaugcugacgaacagcgagcuccugucccugaucaacgacaugccgaucaccaacgaccagaagaagcucaugagcaacaacgugcagaucgugcgccagcaguccuacagcaucaugugcaucaucaaggaggagguccuggccuacguggugcagcugccccucuacggggucaucgacacccccugcuggaagcugcacaccagcccccugugcacgaccaacaccaaggagggcuccaacaucugccucacccggacggaccgcgggugguacugcgacaacgccggcagcguguccuucuucccgcaggccgagaccugcaagguccagagcaaccggguguucugcgacaccaugaacucccugacccugcccagcgaggugaaccucugcaacaucgacaucuucaaccccaaguacgacugcaagaucaugacguccaagaccgacgucagcuccagcgugaucaccucccugggcgccaucgugagcugcuacgggaagaccaagugcacggcgagcaacaagaaccgcggcaucaucaagaccuucuccaacgggugcgacuacgucagcaacaagggcguggacaccguguccgucggcaacacccuguacuacgugaacaagcaggagggcaagagccucuacgugaagggggagcccaucaucaacuucuacgacccgcuggucuuccccuccgacgaguucgacgccagcaucucccaggugaacgagaagaucaaccagagccuggccuucauccggaaguccgacgagcuccugcacaacgugaacgucggcaagagcaccacgaacaucaugaucaccaccaucaucaucgugaucaucgugauccugcugcuccugaucgccgucgggcuguuccucuacugcaaggcccgcuccacccccgugacgcugagcaaggaccagcuguccgggaucaacaacaucgcguucagcaacugaggacuagucccuguucccagagcccacuuuuuuuucuuuuuuugaaauaaaauagccugucuuucagaucuaaaaaaaaaaaaaaaaaaaaaaaaaaaaaaaaaaaaaaaaaaaaaaaaaaaaaaaaaaaaaaaaugcaucccccccccccccccccccccccccccccccaaaggcucuuuucagagccaccagaauu

SEQ ID NO: 12482 - RNA, 2020 nt, Artificial Sequence
  mRNA product Design a-2 comprising derived and/or modified sequence from HRSV(Memphis-37)__AIY60640.1__F0_DSCav1 (opt1)
gggagaguccgcucagccagguugcagaagcggcuuagcguguguccuaaucuucucucugcguguagguaggccugugccgcaaacaagcuuaccauggagcugcccauccucaagaccaacgccaucaccacgauccuggccgcggugacccugugcuucgccagcucccagaacaucaccgaggaguucuaccagagcacgugcuccgccgucagcaagggcuaccucuccgcccugcgcaccgggugguacaccagcgugaucaccaucgagcuguccaacaucaaggagaacaagugcaacggcaccgacgccaaggugaagcucaucaagcaggagcuggacaaguacaagaacgcggucacggagcugcagcuccugaugcagagcaccccggccgccaacaaccgggcccgccgggagcugccccgcuucaugaacuacacccucaacaacaccaagaacaacaacgugacgcuguccaagaagcggaagcgccgguuccugggguuccuccugggcguggggagcgcgaucgccuccggcaucgccgucugcaaggugcugcaccucgagggcgaggugaacaagaucaagaacgcccugcugagcaccaacaaggccgucgugucccucagcaacgggguguccguccugaccuucaaggugcuggaccucaagaacuacaucgacaagcagcugcugcccauccucaacaagcagagcugcuccaucagcaacaucgagaccgugaucgaguuccagcagaagaacaaccgccugcuggagaucacgcgggaguucuccgucaacgcgggcgugaccacccccgugagcaccuacaugcucacgaacagcgagcugcugucccucaucaacgacaugccgaucaccaacgaccagaagaagcugaugagcaacaacguccagaucgugcgccagcaguccuacagcaucaugugcaucaucaaggaggaggugcuggccuacgucgugcagcucccccuguacggggugaucgacacccccugcuggaagcugcacaccagcccccucugcacgaccaacaccaaggagggcagcaacaucugccugacccggacggaccgcgggugguacugcgacaacgccggcuccgucagcuucuucccgcaggccgagaccugcaaggugcaguccaaccgggucuucugcgacaccaugaacagccugacccuccccuccgaggugaaccugugcaacaucgacaucuucaaccccaaguacgacugcaagaucaugacgagcaagaccgacguguccagcuccgucaucaccagccugggcgccaucguguccugcuacgggaagaccaagugcacggcgagcaacaagaaccgcggcaucaucaagaccuucuccaacgggugcgacuacgugagcaacaagggcgucgacaccgugagcgugggcaacacccucuacuacgucaacaagcaggaggggaagucccuguacgugaagggcgagcccaucaucaacuucuacgacccgcugguguuccccagcgacgaguucgacgccuccaucagccaggucaacgagaagaucaaccagucccucgccuucauccggaaguccgacgagcugcugcacaacgugaacguggggaaguccaccacgaacaucaugaucaccaccaucaucaucgucaucaucgugauccugcuccugcugaucgccgugggccucuuccuguacugcaaggcccgcagcacccccgucacgcuguccaaggaccagcucagcgggaucaacaacaucgcguucuccaacugaggacuagucccuguucccagagcccacuuuuuuuucuuuuuuugaaauaaaauagccugucuuucagaucuaaaaaaaaaaaaaaaaaaaaaaaaaaaaaaaaaaaaaaaaaaaaaaaaaaaaaaaaaaaaaaaaugcaucccccccccccccccccccccccccccccccaaaggcucuuuucagagccaccagaauu

SEQ ID NO: 12483 - RNA, 2020 nt, Artificial Sequence
  mRNA product Design a-2 comprising derived and/or modified sequence from HRSV(Memphis-37)__AIY60640.1__F0_DSCav1 (opt2)
gggagaguccgcucagccagguugcagaagcggcuuagcguguguccuaaucuucucucugcguguagguaggccugugccgcaaacaagcuuaccauggagcuccccauccucaagaccaacgccaucaccaccauccucgccgccgucacccucugcuucgccuccucccagaacaucaccgaggaguucuaccaguccaccugcuccgccgucuccaagggcuaccucuccgcccuccgcaccggcugguacaccuccgucaucaccaucgagcucuccaacaucaaggagaacaagugcaacggcaccgacgccaaggucaagcucaucaagcaggagcucgacaaguacaagaacgccgucaccgagcuccagcuccucaugcaguccacccccgccgccaacaaccgcgcccgccgcgagcucccccgcuucaugaacuacacccucaacaacaccaagaacaacaacgucacccucuccaagaagcgcaagcgccgcuuccucggcuuccuccucggcgucggcuccgccaucgccuccggcaucgccgucugcaagguccuccaccucgagggcgaggucaacaagaucaagaacgcccuccucuccaccaacaaggccgucgucucccucuccaacggcgucuccguccucaccuucaagguccucgaccucaagaacuacaucgacaagcagcuccuccccauccucaacaagcaguccugcuccaucuccaacaucgagaccgucaucgaguuccagcagaagaacaaccgccuccucgagaucacccgcgaguucuccgucaacgccggcgucaccacccccgucuccaccuacaugcucaccaacuccgagcuccucucccucaucaacgacaugcccaucaccaacgaccagaagaagcucauguccaacaacguccagaucguccgccagcaguccuacuccaucaugugcaucaucaaggaggagguccucgccuacgucguccagcucccccucuacggcgucaucgacacccccugcuggaagcuccacaccuccccccucugcaccaccaacaccaaggagggcuccaacaucugccucacccgcaccgaccgcggcugguacugcgacaacgccggcuccgucuccuucuucccccaggccgagaccugcaagguccaguccaaccgcgucuucugcgacaccaugaacucccucacccuccccuccgaggucaaccucugcaacaucgacaucuucaaccccaaguacgacugcaagaucaugaccuccaagaccgacgucuccuccuccgucaucaccucccucggcgccaucgucuccugcuacggcaagaccaagugcaccgccuccaacaagaaccgcggcaucaucaagaccuucuccaacggcugcgacuacgucuccaacaagggcgucgacaccgucuccgucggcaacacccucuacuacgucaacaagcaggagggcaagucccucuacgucaagggcgagcccaucaucaacuucuacgacccccucgucuuccccuccgacgaguucgacgccuccaucucccaggucaacgagaagaucaaccagucccucgccuucauccgcaaguccgacgagcuccuccacaacgucaacgucggcaaguccaccaccaacaucaugaucaccaccaucaucaucgucaucaucgucauccuccuccuccucaucgccgucggccucuuccucuacugcaaggcccgcuccacccccgucacccucuccaaggaccagcucuccggcaucaacaacaucgccuucuccaacugaggacuagucccuguucccagagcccacuuuuuuuucuuuuuuugaaauaaaauagccugucuuucagaucuaaaaaaaaaaaaaaaaaaaaaaaaaaaaaaaaaaaaaaaaaaaaaaaaaaaaaaaaaaaaaaaaugcaucccccccccccccccccccccccccccccccaaaggcucuuuucagagccaccagaauu

SEQ ID NO: 12484 - RNA, 2020 nt, Artificial Sequence
  mRNA product Design a-2 comprising derived and/or modified sequence from HRSV(Memphis-37)__AIY60640.1__F0_DSCav1 (opt3)
gggagaguccgcucagccagguugcagaagcggcuuagcguguguccuaaucuucucucugcguguagguaggccugugccgcaaacaagcuuaccauggagcugcccauccucaagaccaacgccauuacaacuauacuugcugcagugacgcugugcuucgccagcucccagaauaucaccgaagaguuuuaccaaucuacauguucagcggucaguaaaggcuauuugagcgcuuuaagaacugggugguacaccuccguuauuacaaucgaacugucuaacauuaaggagaauaaaugcaacggaaccgacgccaaggugaaacuaaucaagcaggaacucgauaaguauaaaaaugcaguaacugagcugcagcuucugaugcagucgaccccugccgcuaacaauagggcacggcgcgaguugccacgauucaugaacuacacacucaauaacacgaagaauaacaaugugacucugagcaaaaagcguaaaagaagguuucuggguuuccucuuaggcgucgggucagccauagcuaguggaaucgccguguguaagguucugcaccuugaaggcgaggugaacaagauuaaaaaugcguugcuguccaccaacaaggcagucgugucucuaagcaacgguguauccguucucacauuuaaagugcuggaccuuaagaauuauaucgauaaacaacuguugccgauucucaacaagcagucaugcaguaucagcaauauagaaacugucauugaguuccagcagaaaaacaaucggcuguuagagaucacccgcgaauuuucugugaacgccggggugacaacccccgucuccacguacaugcugacuaauucagagcuccuuagccugauuaacgacaugccuaucacaaaugaucaaaagaaguugaugaguaacaauguucagaucgugagacagcagucuuauuccauuauguguauaaucaaagaagagguacuagcuuacgugguccaacugccacucuacggagugauugacacccccugcuggaagcugcauacuagcccucuuuguacaaccaacacgaaagaaggcucgaauaucugccugaccaggacagaucggggcugguauugugacaacgccgggucuguuuccuucuuuccacaggcagagacuugcaaggugcagucaaaucgcgucuucugugauaccaugaacaguuugacacuccccagcgaggugaaccugugcaauauagacauuuuuaacccuaaauacgauugcaagaucaugacuuccaagaccgacguaucuagcucaguuaucacaaguuuaggagcuauuguguccuguuaugguaaaaccaagugcacugccagcaauaaaaaccgaggcaucauuaagacguucucuaaugggugugauuacgucucaaacaaaggaguggacacagucagugugggcaauacccuguauuacguuaacaagcaagaagguaagagccuauaugugaaaggggagccaauaaucaauuuuuacgacccgcucguauuccccuccgaugaguucgacgcgucuauuucgcaggucaacgaaaagaucaaucagagccuggccuuuaucagaaaauccgaugaacuuuugcacaacgugaauguuggaaagucaacuaccaacauuaugauaacaaccaucauuaucgugauuaucgucauacugcuccugcuuaucgcagugggccuguucuuguacugcaaagcuaggaguacuccuguaacacucucuaaggaccagcugagcggcauuaauaacaucgccuuuuccaacugaggacuagucccuguucccagagcccacuuuuuuuucuuuuuuugaaauaaaauagccugucuuucagaucuaaaaaaaaaaaaaaaaaaaaaaaaaaaaaaaaaaaaaaaaaaaaaaaaaaaaaaaaaaaaaaaaugcaucccccccccccccccccccccccccccccccaaaggcucuuuucagagccaccagaauu

SEQ ID NO: 12485 - RNA, 2020 nt, Artificial Sequence
  mRNA product Design a-2 comprising derived and/or modified sequence from HRSV(Memphis-37)__AIY60640.1__F0_DSCav1 (opt4)
gggagaguccgcucagccagguugcagaagcggcuuagcguguguccuaaucuucucucugcguguagguaggccugugccgcaaacaagcuuaccauggagcugcccauccugaagaccaacgccaucaccaccauccuggccgccgugacccugugcuucgccagcagccagaacaucaccgaggaguucuaccagagcaccugcagcgccgugagcaagggcuaccugagcgcccugagaaccggcugguacaccagcgugaucaccaucgagcugagcaacaucaaggagaacaagugcaacggcaccgacgccaaggugaagcugaucaagcaggagcuggacaaguacaagaacgccgugaccgagcugcagcugcugaugcagagcacccccgccgccaacaacagagccagaagagagcugcccagauucaugaacuacacccugaacaacaccaagaacaacaacgugacccugagcaagaagagaaagagaagauuccugggcuuccugcugggcgugggcagcgccaucgccagcggcaucgccgugugcaaggugcugcaccuggagggcgaggugaacaagaucaagaacgcccugcugagcaccaacaaggccguggugagccugagcaacggcgugagcgugcugaccuucaaggugcuggaccugaagaacuacaucgacaagcagcugcugcccauccugaacaagcagagcugcagcaucagcaacaucgagaccgugaucgaguuccagcagaagaacaacagacugcuggagaucaccagagaguucagcgugaacgccggcgugaccacccccgugagcaccuacaugcugaccaacagcgagcugcugagccugaucaacgacaugcccaucaccaacgaccagaagaagcugaugagcaacaacgugcagaucgugagacagcagagcuacagcaucaugugcaucaucaaggaggaggugcuggccuacguggugcagcugccccuguacggcgugaucgacacccccugcuggaagcugcacaccagcccccugugcaccaccaacaccaaggagggcagcaacaucugccugaccagaaccgacagaggcugguacugcgacaacgccggcagcgugagcuucuucccccaggccgagaccugcaaggugcagagcaacagaguguucugcgacaccaugaacagccugacccugcccagcgaggugaaccugugcaacaucgacaucuucaaccccaaguacgacugcaagaucaugaccagcaagaccgacgugagcagcagcgugaucaccagccugggcgccaucgugagcugcuacggcaagaccaagugcaccgccagcaacaagaacagaggcaucaucaagaccuucagcaacggcugcgacuacgugagcaacaagggcguggacaccgugagcgugggcaacacccuguacuacgugaacaagcaggagggcaagagccuguacgugaagggcgagcccaucaucaacuucuacgacccccugguguuccccagcgacgaguucgacgccagcaucagccaggugaacgagaagaucaaccagagccuggccuucaucagaaagagcgacgagcugcugcacaacgugaacgugggcaagagcaccaccaacaucaugaucaccaccaucaucaucgugaucaucgugauccugcugcugcugaucgccgugggccuguuccuguacugcaaggccagaagcacccccgugacccugagcaaggaccagcugagcggcaucaacaacaucgccuucagcaacugaggacuagucccuguucccagagcccacuuuuuuuucuuuuuuugaaauaaaauagccugucuuucagaucuaaaaaaaaaaaaaaaaaaaaaaaaaaaaaaaaaaaaaaaaaaaaaaaaaaaaaaaaaaaaaaaaugcaucccccccccccccccccccccccccccccccaaaggcucuuuucagagccaccagaauu

SEQ ID NO: 12486 - RNA, 2020 nt, Artificial Sequence
  mRNA product Design a-2 comprising derived and/or modified sequence from HRSV(Memphis-37)__AIY60640.1__F0_DSCav1 (opt5)
gggagaguccgcucagccagguugcagaagcggcuuagcguguguccuaaucuucucucugcguguagguaggccugugccgcaaacaagcuuaccauggagcugcccauccucaagaccaacgccauuacaacgauccuggcugccgugacccuuugcuucgcgagcucccagaauauuacagaagaguuuuaccaaucuaccuguagcgcugucuccaaaggcuaucugucugcccucagaacagggugguacaccagcguuaucacaauugaacuguccaacaucaaggagaauaaaugcaacggaaccgacgccaaggugaaacuuaucaagcaggaacuggauaaguauaaaaaugcugugacggagcuccagcugcugaugcagucuaccccugccgcuaacaaucgggcccgcagagagcucccgcgguucaugaacuacacacugaauaacaccaagaauaacaaugucacacuuagcaaaaagcgcaaaagacgguuucugggcuuccuccugggggugggauccgcgauugccagcggcaucgcuguuuguaaggugcuucaccuggaaggggaggucaacaagauuaaaaaugcccuccugucuaccaacaaggcugugguuucccugagcaacggagugucuguccucacguuuaaagugcuggaccuuaagaauuauaucgauaaacaacugcuccccauucugaacaagcaguccugcagcaucucuaauauugaaacagugaucgaguuccagcagaaaaacaaucgccuucuggagaucaccagagaauuuuccgucaacgccggcguuacaaccccugugagcaccuacaugcucacaaauuccgagcugcugucucucauuaacgacaugcccaucacgaaugaucaaaagaagcugaugagcaacaaugugcagauuguccggcagcaguccuauagcaucauguguauuaucaaagaagaggugcuugcguacguugugcaacugccucucuacggcgucaucgacacccccugcuggaagcugcauacaucuccucuuuguaccacaaacaccaaagaaggguccaauauuugccugacgcgcacagauagaggaugguauugugacaacgccggcagcgugucuuucuuuccgcaggcugagaccugcaagguucagagcaaucggguguucugugauaccaugaacucccucacacugcccucugaggucaaccugugcaauaucgacauuuuuaacccuaaauacgauugcaagaucaugaccagcaagacagacguguccagcucugucauuacgucccucggggccaucgugagcuguuauggaaaaaccaagugcacagcuucuaauaaaaaccgcggcaucauuaagaccuucuccaaugggugugauuacguuagcaacaaaggaguggacacagucuccgugggcaauacccuguauuacguuaacaagcaagaaggcaagucucuuuaugugaaaggggagcccaucauuaauuuuuacgacccucuggucuuccccagcgaugaguucgacgccuccaucucucaggugaacgaaaagauuaaucagagccucgccuuuaucagaaaauccgaugaacugcugcacaacgugaauguuggaaagagcacgaccaacauuaugaucacaaccaucauuaucgucauuaucgugauucuucuccugcugaucgcugugggccucuuccuguacugcaaagcgcggucuacaccggucacccuuuccaaggaccagcugagcgggaucaauaacauugccuuuucuaacugaggacuagucccuguucccagagcccacuuuuuuuucuuuuuuugaaauaaaauagccugucuuucagaucuaaaaaaaaaaaaaaaaaaaaaaaaaaaaaaaaaaaaaaaaaaaaaaaaaaaaaaaaaaaaaaaaugcaucccccccccccccccccccccccccccccccaaaggcucuuuucagagccaccagaauu

SEQ ID NO: 12487 - RNA, 2020 nt, Artificial Sequence
  mRNA product Design a-2 comprising derived and/or modified sequence from HRSV(Memphis-37)__AIY60640.1__F0_DSCav1 (opt6)
gggagaguccgcucagccagguugcagaagcggcuuagcguguguccuaaucuucucucugcguguagguaggccugugccgcaaacaagcuuaccauggaacucccaauccucaaaaccaaugccauaacaaccauacucgcugcaguaaccuuauguuucgcaaguagccaaaacauaaccgaagaauuuuaucaauccacaugcuccgcaguuucuaaaggauaucuaucagcauuaagaacuggaugguacacaucuguaauaacuauagaacuaagcaauauaaaagaaaacaaauguaacggaacugacgcuaaaguaaaacuuauaaaacaagaacuagauaaauacaaaaacgccguuaccgaacuacaacuauuaaugcaaucaacaccagccgcaaauaacagagcaagacgcgaauuaccaagauucaugaauuacacacuaaacaauacaaaaaauaacaauguaacacuaucaaaaaaaagaaaacgacgauucuuaggcuuccuacuaggagucggcucagcaauagcuuccggaauagccgucuguaaaguccuacaccuugaaggcgaaguaaacaaaaucaaaaacgcacuauuaucaacaaacaaagcagucguaucuuuauccaacggagucucaguccuaacauucaaaguacucgauuuaaaaaacuacaucgauaaacaacuccuucccauucuaaacaaacaauccugcucaauauccaacaucgaaacagucauagaauuucaacaaaaaaacaaccgccugcuagaaauaacaagagaauuuuccguaaaugccggcgucaccacaccaguaucaacauacaugcuaacaaacuccgaacuacucucccuaauaaacgauaugccaaucaccaacgaccaaaaaaaacuaaugucaaauaacguucaaauagucagacaacaaucauacagcauaaugugcauaauaaaagaagaagucuuagccuacguuguacaacucccauuauacggaguuaucgauacaccaugcuggaaauuacacacaucacccuuaugcaccacaaacacaaaagaaggauccaauauuugucuaacacgaacagacagaggaugguacugugauaacgcaggaucagugucauucuuuccacaagcagaaacauguaaaguucaaucuaacagaguauucugcgacaccaugaacucccuaaccuuacccucagaaguaaaucuaugcaacauagauaucuuuaacccaaaauacgacugcaaaaucaugacaucaaaaacugacguuucuucauccguuauaacuucccucggcgcuauaguguccugcuacggaaaaacuaaaugcacagcauccaacaaaaauagaggaauaauaaaaacauuuuccaacggcugcgacuauguuucaaacaaaggaguagauaccguaucagucggcaauacauuauauuauguuaacaaacaagaaggaaaaucccuauacguaaaaggagaaccuauaaucaacuucuacgacccacucguauuccccucagacgaauuugacgcaucuauaucucaaguaaaugaaaaaauaaaccaaucacucgcauuuauccgcaaaucugacgaauuacuccauaacgucaacgucggcaaaucaaccaccaacauaaugauaacaacaauuauaauaguaauaauugucauacuacuacuccuaauagcaguaggucuauuccuauacugcaaagcaagauccacccccguaacccuuuccaaagaucaacucucaggaauaaauaacauagccuuuucaaacuaaggacuagucccuguucccagagcccacuuuuuuuucuuuuuuugaaauaaaauagccugucuuucagaucuaaaaaaaaaaaaaaaaaaaaaaaaaaaaaaaaaaaaaaaaaaaaaaaaaaaaaaaaaaaaaaaaugcaucccccccccccccccccccccccccccccccaaaggcucuuuucagagccaccagaauu

SEQ ID NO: 12488 - RNA, 2020 nt, Artificial Sequence
  mRNA product Design a-2 comprising derived and/or modified sequence from HRSV(Memphis-37)__AIY60640.1__F0_DSCav1 (opt11)
gggagaguccgcucagccagguugcagaagcggcuuagcguguguccuaaucuucucucugcguguagguaggccugugccgcaaacaagcuuaccauggaacuccccauacucaagacuaaugccaucaccaccauccucgccgccgugacccucugcuucgcaucgucccaaaacauaacagaagaguucuaccaaagcacaugcuccgcagucuccaaaggauaccucuccgcacuacguaccggcugguacaccagcgucaucaccaucgaacuuuccaacaucaaagagaacaaaugcaacggcaccgacgccaaaguaaaacucauaaaacaagagcuagacaaauacaaaaacgccgucacagaacuccaacuacugaugcaauccacaccggccgccaacaaccgcgcucgacgugaacucccacgcuucaugaacuacacucuuaacaacaccaaaaauaacaacgucacccuauccaaaaagcgaaagcgcagauuccucggcuuccuacuuggcgucggcucggcgauagccucuggaaucgccguuugcaagguccuccaccuagaaggcgaaguaaacaaaaucaaaaacgcacuccuaagcaccaacaaagccgucgucucacuuuccaacggcgucucaguccucacauucaaaguucucgaccuaaagaacuacaucgacaagcaacuacuacccauacucaauaaacaauccugcuccaucagcaacaucgagacagucaucgaauuucaacaaaagaacaaccgccuccucgaaauuacacgcgaguucucagucaacgccggagucaccaccccagucucaacauacaugcucaccaacagcgaacuccugucucuaaucaacgacaugcccaucacuaacgaccagaagaaacucauguccaacaacguccaaaucgugcgacaacaaucauacucuaucaugugcaucaucaaagaagaaguccucgcauacgucguccagcucccacucuacggcguaaucgacacacccugcuggaaacuccacacaucaccccuaugcaccaccaacacaaaagaaggcuccaacaucugccuaacccgaaccgacagagguugguauugcgacaacgccggcucagucucauucuucccacaagccgaaaccuguaaaguccaaucaaaccgcgucuucugcgauaccaugaacucucucacacuccccuccgaagucaaucucugcaacauagacaucuucaauccaaaguacgacugcaaaauaaugaccucgaaaaccgacguaagcuccagcgucaucaccuccuuaggcgcaaucguauccugcuacggcaaaaccaaaugcaccgccucaaacaaaaacagaggcaucaucaaaacguucucgaacggaugcgacuacguuuccaauaaaggcguagauaccgucuccgucggcaacacacucuauuacgucaacaaacaagaaggcaaaucccucuacgucaaaggugaaccuaucaucaacuucuacgacccccucgucuuccccagcgacgaguucgaugccucaaucagccaagucaacgagaaaaucaaccaaucacuggcuuucauacgcaaauccgacgaacuccuccacaacgugaacgucggcaaauccacaaccaacaucaugauaaccacaauaaucaucgucauaaucguaauccuacuccuccuuauugccguaggacuauuccuauacugcaaagcccgauccacccccgucacccucucaaaagaccaacucuccggcaucaacaauauagccuucucuaacuaaggacuagucccuguucccagagcccacuuuuuuuucuuuuuuugaaauaaaauagccugucuuucagaucuaaaaaaaaaaaaaaaaaaaaaaaaaaaaaaaaaaaaaaaaaaaaaaaaaaaaaaaaaaaaaaaaugcaucccccccccccccccccccccccccccccccaaaggcucuuuucagagccaccagaauu

SEQ ID NO: 12489 - RNA, 2098 nt, Artificial Sequence
  mRNA product Design a-3 comprising derived and/or modified sequence from HRSV(Memphis-37)__AIY60640.1__F0_DSCav1 (opt1)
gggagagggcgcuuggcuugcaaggacccugagcugcggcauugaagcacacccaacccaacucgacugaagucagccucacugaaccggaucugagaaucuucucucucugggcuugccagggcucuccgaaccuagcuagcauccucuucaauuccaacuagaaagcuuaccauggagcugcccauccucaagaccaacgccaucaccacgauccuggccgcggugacccugugcuucgccagcucccagaacaucaccgaggaguucuaccagagcacgugcuccgccgucagcaagggcuaccucuccgcccugcgcaccgggugguacaccagcgugaucaccaucgagcuguccaacaucaaggagaacaagugcaacggcaccgacgccaaggugaagcucaucaagcaggagcuggacaaguacaagaacgcggucacggagcugcagcuccugaugcagagcaccccggccgccaacaaccgggcccgccgggagcugccccgcuucaugaacuacacccucaacaacaccaagaacaacaacgugacgcuguccaagaagcggaagcgccgguuccugggguuccuccugggcguggggagcgcgaucgccuccggcaucgccgucugcaaggugcugcaccucgagggcgaggugaacaagaucaagaacgcccugcuguccaccaacaaggccgucgugagccucuccaacggggugagcguccugaccuucaaggugcuggaccucaagaacuacaucgacaagcagcugcugcccauccugaacaagcagagcugcuccaucagcaacaucgagaccgucaucgaguuccagcagaagaacaaccgccuccuggagaucacgcgggaguucagcgugaacgcgggcgugaccacccccgucuccaccuacaugcugacgaacagcgagcuccugucccugaucaacgacaugccgaucaccaacgaccagaagaagcucaugagcaacaacgugcagaucgugcgccagcaguccuacagcaucaugugcaucaucaaggaggagguccuggccuacguggugcagcugccccucuacggggucaucgacacccccugcuggaagcugcacaccagcccccugugcacgaccaacaccaaggagggcuccaacaucugccucacccggacggaccgcgggugguacugcgacaacgccggcagcguguccuucuucccgcaggccgagaccugcaagguccagagcaaccggguguucugcgacaccaugaacucccugacccugcccagcgaggugaaccucugcaacaucgacaucuucaaccccaaguacgacugcaagaucaugacguccaagaccgacgucagcuccagcgugaucaccucccugggcgccaucgugagcugcuacgggaagaccaagugcacggcgagcaacaagaaccgcggcaucaucaagaccuucuccaacgggugcgacuacgucagcaacaagggcguggacaccguguccgucggcaacacccuguacuacgugaacaagcaggagggcaagagccucuacgugaagggggagcccaucaucaacuucuacgacccgcuggucuuccccuccgacgaguucgacgccagcaucucccaggugaacgagaagaucaaccagagccuggccuucauccggaaguccgacgagcuccugcacaacgugaacgucggcaagagcaccacgaacaucaugaucaccaccaucaucaucgugaucaucgugauccugcugcuccugaucgccgucgggcuguuccucuacugcaaggcccgcuccacccccgugacgcugagcaaggaccagcuguccgggaucaacaacaucgcguucagcaacugaggacuagucccuguucccagagcccacuuuuuuuucuuuuuuugaaauaaaauagccugucuuucagaucuaaaaaaaaaaaaaaaaaaaaaaaaaaaaaaaaaaaaaaaaaaaaaaaaaaaaaaaaaaaaaaaaugcaucccccccccccccccccccccccccccccccaaaggcucuuuucagagccaccagaauu

SEQ ID NO: 12490 - RNA, 2098 nt, Artificial Sequence
  mRNA product Design a-3 comprising derived and/or modified sequence from HRSV(Memphis-37)__AIY60640.1__F0_DSCav1 (opt1)
gggagagggcgcuuggcuugcaaggacccugagcugcggcauugaagcacacccaacccaacucgacugaagucagccucacugaaccggaucugagaaucuucucucucugggcuugccagggcucuccgaaccuagcuagcauccucuucaauuccaacuagaaagcuuaccauggagcugcccauccucaagaccaacgccaucaccacgauccuggccgcggugacccugugcuucgccagcucccagaacaucaccgaggaguucuaccagagcacgugcuccgccgucagcaagggcuaccucuccgcccugcgcaccgggugguacaccagcgugaucaccaucgagcuguccaacaucaaggagaacaagugcaacggcaccgacgccaaggugaagcucaucaagcaggagcuggacaaguacaagaacgcggucacggagcugcagcuccugaugcagagcaccccggccgccaacaaccgggcccgccgggagcugccccgcuucaugaacuacacccucaacaacaccaagaacaacaacgugacgcuguccaagaagcggaagcgccgguuccugggguuccuccugggcguggggagcgcgaucgccuccggcaucgccgucugcaaggugcugcaccucgagggcgaggugaacaagaucaagaacgcccugcugagcaccaacaaggccgucgugucccucagcaacgggguguccguccugaccuucaaggugcuggaccucaagaacuacaucgacaagcagcugcugcccauccucaacaagcagagcugcuccaucagcaacaucgagaccgugaucgaguuccagcagaagaacaaccgccugcuggagaucacgcgggaguucuccgucaacgcgggcgugaccacccccgugagcaccuacaugcucacgaacagcgagcugcugucccucaucaacgacaugccgaucaccaacgaccagaagaagcugaugagcaacaacguccagaucgugcgccagcaguccuacagcaucaugugcaucaucaaggaggaggugcuggccuacgucgugcagcucccccuguacggggugaucgacacccccugcuggaagcugcacaccagcccccucugcacgaccaacaccaaggagggcagcaacaucugccugacccggacggaccgcgggugguacugcgacaacgccggcuccgucagcuucuucccgcaggccgagaccugcaaggugcaguccaaccgggucuucugcgacaccaugaacagccugacccuccccuccgaggugaaccugugcaacaucgacaucuucaaccccaaguacgacugcaagaucaugacgagcaagaccgacguguccagcuccgucaucaccagccugggcgccaucguguccugcuacgggaagaccaagugcacggcgagcaacaagaaccgcggcaucaucaagaccuucuccaacgggugcgacuacgugagcaacaagggcgucgacaccgugagcgugggcaacacccucuacuacgucaacaagcaggaggggaagucccuguacgugaagggcgagcccaucaucaacuucuacgacccgcugguguuccccagcgacgaguucgacgccuccaucagccaggucaacgagaagaucaaccagucccucgccuucauccggaaguccgacgagcugcugcacaacgugaacguggggaaguccaccacgaacaucaugaucaccaccaucaucaucgucaucaucgugauccugcuccugcugaucgccgugggccucuuccuguacugcaaggcccgcagcacccccgucacgcuguccaaggaccagcucagcgggaucaacaacaucgcguucuccaacugaggacuagucccuguucccagagcccacuuuuuuuucuuuuuuugaaauaaaauagccugucuuucagaucuaaaaaaaaaaaaaaaaaaaaaaaaaaaaaaaaaaaaaaaaaaaaaaaaaaaaaaaaaaaaaaaaugcaucccccccccccccccccccccccccccccccaaaggcucuuuucagagccaccagaauu

SEQ ID NO: 12491 - RNA, 2098 nt, Artificial Sequence
  mRNA product Design a-3 comprising derived and/or modified sequence from HRSV(Memphis-37)__AIY60640.1__F0_DSCav1 (opt2)
gggagagggcgcuuggcuugcaaggacccugagcugcggcauugaagcacacccaacccaacucgacugaagucagccucacugaaccggaucugagaaucuucucucucugggcuugccagggcucuccgaaccuagcuagcauccucuucaauuccaacuagaaagcuuaccauggagcuccccauccucaagaccaacgccaucaccaccauccucgccgccgucacccucugcuucgccuccucccagaacaucaccgaggaguucuaccaguccaccugcuccgccgucuccaagggcuaccucuccgcccuccgcaccggcugguacaccuccgucaucaccaucgagcucuccaacaucaaggagaacaagugcaacggcaccgacgccaaggucaagcucaucaagcaggagcucgacaaguacaagaacgccgucaccgagcuccagcuccucaugcaguccacccccgccgccaacaaccgcgcccgccgcgagcucccccgcuucaugaacuacacccucaacaacaccaagaacaacaacgucacccucuccaagaagcgcaagcgccgcuuccucggcuuccuccucggcgucggcuccgccaucgccuccggcaucgccgucugcaagguccuccaccucgagggcgaggucaacaagaucaagaacgcccuccucuccaccaacaaggccgucgucucccucuccaacggcgucuccguccucaccuucaagguccucgaccucaagaacuacaucgacaagcagcuccuccccauccucaacaagcaguccugcuccaucuccaacaucgagaccgucaucgaguuccagcagaagaacaaccgccuccucgagaucacccgcgaguucuccgucaacgccggcgucaccacccccgucuccaccuacaugcucaccaacuccgagcuccucucccucaucaacgacaugcccaucaccaacgaccagaagaagcucauguccaacaacguccagaucguccgccagcaguccuacuccaucaugugcaucaucaaggaggagguccucgccuacgucguccagcucccccucuacggcgucaucgacacccccugcuggaagcuccacaccuccccccucugcaccaccaacaccaaggagggcuccaacaucugccucacccgcaccgaccgcggcugguacugcgacaacgccggcuccgucuccuucuucccccaggccgagaccugcaagguccaguccaaccgcgucuucugcgacaccaugaacucccucacccuccccuccgaggucaaccucugcaacaucgacaucuucaaccccaaguacgacugcaagaucaugaccuccaagaccgacgucuccuccuccgucaucaccucccucggcgccaucgucuccugcuacggcaagaccaagugcaccgccuccaacaagaaccgcggcaucaucaagaccuucuccaacggcugcgacuacgucuccaacaagggcgucgacaccgucuccgucggcaacacccucuacuacgucaacaagcaggagggcaagucccucuacgucaagggcgagcccaucaucaacuucuacgacccccucgucuuccccuccgacgaguucgacgccuccaucucccaggucaacgagaagaucaaccagucccucgccuucauccgcaaguccgacgagcuccuccacaacgucaacgucggcaaguccaccaccaacaucaugaucaccaccaucaucaucgucaucaucgucauccuccuccuccucaucgccgucggccucuuccucuacugcaaggcccgcuccacccccgucacccucuccaaggaccagcucuccggcaucaacaacaucgccuucuccaacugaggacuagucccuguucccagagcccacuuuuuuuucuuuuuuugaaauaaaauagccugucuuucagaucuaaaaaaaaaaaaaaaaaaaaaaaaaaaaaaaaaaaaaaaaaaaaaaaaaaaaaaaaaaaaaaaaugcaucccccccccccccccccccccccccccccccaaaggcucuuuucagagccaccagaauu

SEQ ID NO: 12492 - RNA, 2098 nt, Artificial Sequence
  mRNA product Design a-3 comprising derived and/or modified sequence from HRSV(Memphis-37)__AIY60640.1__F0_DSCav1 (opt3)
gggagagggcgcuuggcuugcaaggacccugagcugcggcauugaagcacacccaacccaacucgacugaagucagccucacugaaccggaucugagaaucuucucucucugggcuugccagggcucuccgaaccuagcuagcauccucuucaauuccaacuagaaagcuuaccauggagcugcccauccucaagaccaacgccauuacaacuauacuugcugcagugacgcugugcuucgccagcucccagaauaucaccgaagaguuuuaccaaucuacauguucagcggucaguaaaggcuauuugagcgcuuuaagaacugggugguacaccuccguuauuacaaucgaacugucuaacauuaaggagaauaaaugcaacggaaccgacgccaaggugaaacuaaucaagcaggaacucgauaaguauaaaaaugcaguaacugagcugcagcuucugaugcagucgaccccugccgcuaacaauagggcacggcgcgaguugccacgauucaugaacuacacacucaauaacacgaagaauaacaaugugacucugagcaaaaagcguaaaagaagguuucuggguuuccucuuaggcgucgggucagccauagcuaguggaaucgccguguguaagguucugcaccuugaaggcgaggugaacaagauuaaaaaugcguugcuguccaccaacaaggcagucgugucucuaagcaacgguguauccguucucacauuuaaagugcuggaccuuaagaauuauaucgauaaacaacuguugccgauucucaacaagcagucaugcaguaucagcaauauagaaacugucauugaguuccagcagaaaaacaaucggcuguuagagaucacccgcgaauuuucugugaacgccggggugacaacccccgucuccacguacaugcugacuaauucagagcuccuuagccugauuaacgacaugccuaucacaaaugaucaaaagaaguugaugaguaacaauguucagaucgugagacagcagucuuauuccauuauguguauaaucaaagaagagguacuagcuuacgugguccaacugccacucuacggagugauugacacccccugcuggaagcugcauacuagcccucuuuguacaaccaacacgaaagaaggcucgaauaucugccugaccaggacagaucggggcugguauugugacaacgccgggucuguuuccuucuuuccacaggcagagacuugcaaggugcagucaaaucgcgucuucugugauaccaugaacaguuugacacuccccagcgaggugaaccugugcaauauagacauuuuuaacccuaaauacgauugcaagaucaugacuuccaagaccgacguaucuagcucaguuaucacaaguuuaggagcuauuguguccuguuaugguaaaaccaagugcacugccagcaauaaaaaccgaggcaucauuaagacguucucuaaugggugugauuacgucucaaacaaaggaguggacacagucagugugggcaauacccuguauuacguuaacaagcaagaagguaagagccuauaugugaaaggggagccaauaaucaauuuuuacgacccgcucguauuccccuccgaugaguucgacgcgucuauuucgcaggucaacgaaaagaucaaucagagccuggccuuuaucagaaaauccgaugaacuuuugcacaacgugaauguuggaaagucaacuaccaacauuaugauaacaaccaucauuaucgugauuaucgucauacugcuccugcuuaucgcagugggccuguucuuguacugcaaagcuaggaguacuccuguaacacucucuaaggaccagcugagcggcauuaauaacaucgccuuuuccaacugaggacuagucccuguucccagagcccacuuuuuuuucuuuuuuugaaauaaaauagccugucuuucagaucuaaaaaaaaaaaaaaaaaaaaaaaaaaaaaaaaaaaaaaaaaaaaaaaaaaaaaaaaaaaaaaaaugcaucccccccccccccccccccccccccccccccaaaggcucuuuucagagccaccagaauu

SEQ ID NO: 12493 - RNA, 2098 nt, Artificial Sequence
  mRNA product Design a-3 comprising derived and/or modified sequence from HRSV(Memphis-37)__AIY60640.1__F0_DSCav1 (opt4)
gggagagggcgcuuggcuugcaaggacccugagcugcggcauugaagcacacccaacccaacucgacugaagucagccucacugaaccggaucugagaaucuucucucucugggcuugccagggcucuccgaaccuagcuagcauccucuucaauuccaacuagaaagcuuaccauggagcugcccauccugaagaccaacgccaucaccaccauccuggccgccgugacccugugcuucgccagcagccagaacaucaccgaggaguucuaccagagcaccugcagcgccgugagcaagggcuaccugagcgcccugagaaccggcugguacaccagcgugaucaccaucgagcugagcaacaucaaggagaacaagugcaacggcaccgacgccaaggugaagcugaucaagcaggagcuggacaaguacaagaacgccgugaccgagcugcagcugcugaugcagagcacccccgccgccaacaacagagccagaagagagcugcccagauucaugaacuacacccugaacaacaccaagaacaacaacgugacccugagcaagaagagaaagagaagauuccugggcuuccugcugggcgugggcagcgccaucgccagcggcaucgccgugugcaaggugcugcaccuggagggcgaggugaacaagaucaagaacgcccugcugagcaccaacaaggccguggugagccugagcaacggcgugagcgugcugaccuucaaggugcuggaccugaagaacuacaucgacaagcagcugcugcccauccugaacaagcagagcugcagcaucagcaacaucgagaccgugaucgaguuccagcagaagaacaacagacugcuggagaucaccagagaguucagcgugaacgccggcgugaccacccccgugagcaccuacaugcugaccaacagcgagcugcugagccugaucaacgacaugcccaucaccaacgaccagaagaagcugaugagcaacaacgugcagaucgugagacagcagagcuacagcaucaugugcaucaucaaggaggaggugcuggccuacguggugcagcugccccuguacggcgugaucgacacccccugcuggaagcugcacaccagcccccugugcaccaccaacaccaaggagggcagcaacaucugccugaccagaaccgacagaggcugguacugcgacaacgccggcagcgugagcuucuucccccaggccgagaccugcaaggugcagagcaacagaguguucugcgacaccaugaacagccugacccugcccagcgaggugaaccugugcaacaucgacaucuucaaccccaaguacgacugcaagaucaugaccagcaagaccgacgugagcagcagcgugaucaccagccugggcgccaucgugagcugcuacggcaagaccaagugcaccgccagcaacaagaacagaggcaucaucaagaccuucagcaacggcugcgacuacgugagcaacaagggcguggacaccgugagcgugggcaacacccuguacuacgugaacaagcaggagggcaagagccuguacgugaagggcgagcccaucaucaacuucuacgacccccugguguuccccagcgacgaguucgacgccagcaucagccaggugaacgagaagaucaaccagagccuggccuucaucagaaagagcgacgagcugcugcacaacgugaacgugggcaagagcaccaccaacaucaugaucaccaccaucaucaucgugaucaucgugauccugcugcugcugaucgccgugggccuguuccuguacugcaaggccagaagcacccccgugacccugagcaaggaccagcugagcggcaucaacaacaucgccuucagcaacugaggacuagucccuguucccagagcccacuuuuuuuucuuuuuuugaaauaaaauagccugucuuucagaucuaaaaaaaaaaaaaaaaaaaaaaaaaaaaaaaaaaaaaaaaaaaaaaaaaaaaaaaaaaaaaaaaugcaucccccccccccccccccccccccccccccccaaaggcucuuuucagagccaccagaauu

SEQ ID NO: 12494 - RNA, 2098 nt, Artificial Sequence
  mRNA product Design a-3 comprising derived and/or modified sequence from HRSV(Memphis-37)__AIY60640.1__F0_DSCav1 (opt5)
gggagagggcgcuuggcuugcaaggacccugagcugcggcauugaagcacacccaacccaacucgacugaagucagccucacugaaccggaucugagaaucuucucucucugggcuugccagggcucuccgaaccuagcuagcauccucuucaauuccaacuagaaagcuuaccauggagcugcccauccucaagaccaacgccauuacaacgauccuggcugccgugacccuuugcuucgcgagcucccagaauauuacagaagaguuuuaccaaucuaccuguagcgcugucuccaaaggcuaucugucugcccucagaacagggugguacaccagcguuaucacaauugaacuguccaacaucaaggagaauaaaugcaacggaaccgacgccaaggugaaacuuaucaagcaggaacuggauaaguauaaaaaugcugugacggagcuccagcugcugaugcagucuaccccugccgcuaacaaucgggcccgcagagagcucccgcgguucaugaacuacacacugaauaacaccaagaauaacaaugucacacuuagcaaaaagcgcaaaagacgguuucugggcuuccuccugggggugggauccgcgauugccagcggcaucgcuguuuguaaggugcuucaccuggaaggggaggucaacaagauuaaaaaugcccuccugucuaccaacaaggcugugguuucccugagcaacggagugucuguccucacguuuaaagugcuggaccuuaagaauuauaucgauaaacaacugcuccccauucugaacaagcaguccugcagcaucucuaauauugaaacagugaucgaguuccagcagaaaaacaaucgccuucuggagaucaccagagaauuuuccgucaacgccggcguuacaaccccugugagcaccuacaugcucacaaauuccgagcugcugucucucauuaacgacaugcccaucacgaaugaucaaaagaagcugaugagcaacaaugugcagauuguccggcagcaguccuauagcaucauguguauuaucaaagaagaggugcuugcguacguugugcaacugccucucuacggcgucaucgacacccccugcuggaagcugcauacaucuccucuuuguaccacaaacaccaaagaaggguccaauauuugccugacgcgcacagauagaggaugguauugugacaacgccggcagcgugucuuucuuuccgcaggcugagaccugcaagguucagagcaaucggguguucugugauaccaugaacucccucacacugcccucugaggucaaccugugcaauaucgacauuuuuaacccuaaauacgauugcaagaucaugaccagcaagacagacguguccagcucugucauuacgucccucggggccaucgugagcuguuauggaaaaaccaagugcacagcuucuaauaaaaaccgcggcaucauuaagaccuucuccaaugggugugauuacguuagcaacaaaggaguggacacagucuccgugggcaauacccuguauuacguuaacaagcaagaaggcaagucucuuuaugugaaaggggagcccaucauuaauuuuuacgacccucuggucuuccccagcgaugaguucgacgccuccaucucucaggugaacgaaaagauuaaucagagccucgccuuuaucagaaaauccgaugaacugcugcacaacgugaauguuggaaagagcacgaccaacauuaugaucacaaccaucauuaucgucauuaucgugauucuucuccugcugaucgcugugggccucuuccuguacugcaaagcgcggucuacaccggucacccuuuccaaggaccagcugagcgggaucaauaacauugccuuuucuaacugaggacuagucccuguucccagagcccacuuuuuuuucuuuuuuugaaauaaaauagccugucuuucagaucuaaaaaaaaaaaaaaaaaaaaaaaaaaaaaaaaaaaaaaaaaaaaaaaaaaaaaaaaaaaaaaaaugcaucccccccccccccccccccccccccccccccaaaggcucuuuucagagccaccagaauu

SEQ ID NO: 12495 - RNA, 2098 nt, Artificial Sequence
  mRNA product Design a-3 comprising derived and/or modified sequence from HRSV(Memphis-37)__AIY60640.1__F0_DSCav1 (opt6)
gggagagggcgcuuggcuugcaaggacccugagcugcggcauugaagcacacccaacccaacucgacugaagucagccucacugaaccggaucugagaaucuucucucucugggcuugccagggcucuccgaaccuagcuagcauccucuucaauuccaacuagaaagcuuaccauggaacucccaauccucaaaaccaaugccauaacaaccauacucgcugcaguaaccuuauguuucgcaaguagccaaaacauaaccgaagaauuuuaucaauccacaugcuccgcaguuucuaaaggauaucuaucagcauuaagaacuggaugguacacaucuguaauaacuauagaacuaagcaauauaaaagaaaacaaauguaacggaacugacgcuaaaguaaaacuuauaaaacaagaacuagauaaauacaaaaacgccguuaccgaacuacaacuauuaaugcaaucaacaccagccgcaaauaacagagcaagacgcgaauuaccaagauucaugaauuacacacuaaacaauacaaaaaauaacaauguaacacuaucaaaaaaaagaaaacgacgauucuuaggcuuccuacuaggagucggcucagcaauagcuuccggaauagccgucuguaaaguccuacaccuugaaggcgaaguaaacaaaaucaaaaacgcacuauuaucaacaaacaaagcagucguaucuuuauccaacggagucucaguccuaacauucaaaguacucgauuuaaaaaacuacaucgauaaacaacuccuucccauucuaaacaaacaauccugcucaauauccaacaucgaaacagucauagaauuucaacaaaaaaacaaccgccugcuagaaauaacaagagaauuuuccguaaaugccggcgucaccacaccaguaucaacauacaugcuaacaaacuccgaacuacucucccuaauaaacgauaugccaaucaccaacgaccaaaaaaaacuaaugucaaauaacguucaaauagucagacaacaaucauacagcauaaugugcauaauaaaagaagaagucuuagccuacguuguacaacucccauuauacggaguuaucgauacaccaugcuggaaauuacacacaucacccuuaugcaccacaaacacaaaagaaggauccaauauuugucuaacacgaacagacagaggaugguacugugauaacgcaggaucagugucauucuuuccacaagcagaaacauguaaaguucaaucuaacagaguauucugcgacaccaugaacucccuaaccuuacccucagaaguaaaucuaugcaacauagauaucuuuaacccaaaauacgacugcaaaaucaugacaucaaaaacugacguuucuucauccguuauaacuucccucggcgcuauaguguccugcuacggaaaaacuaaaugcacagcauccaacaaaaauagaggaauaauaaaaacauuuuccaacggcugcgacuauguuucaaacaaaggaguagauaccguaucagucggcaauacauuauauuauguuaacaaacaagaaggaaaaucccuauacguaaaaggagaaccuauaaucaacuucuacgacccacucguauuccccucagacgaauuugacgcaucuauaucucaaguaaaugaaaaaauaaaccaaucacucgcauuuauccgcaaaucugacgaauuacuccauaacgucaacgucggcaaaucaaccaccaacauaaugauaacaacaauuauaauaguaauaauugucauacuacuacuccuaauagcaguaggucuauuccuauacugcaaagcaagauccacccccguaacccuuuccaaagaucaacucucaggaauaaauaacauagccuuuucaaacuaaggacuagucccuguucccagagcccacuuuuuuuucuuuuuuugaaauaaaauagccugucuuucagaucuaaaaaaaaaaaaaaaaaaaaaaaaaaaaaaaaaaaaaaaaaaaaaaaaaaaaaaaaaaaaaaaaugcaucccccccccccccccccccccccccccccccaaaggcucuuuucagagccaccagaauu

SEQ ID NO: 12496 - RNA, 2098 nt, Artificial Sequence
  mRNA product Design a-3 comprising derived and/or modified sequence from HRSV(Memphis-37)__AIY60640.1__F0_DSCav1 (opt11)
gggagagggcgcuuggcuugcaaggacccugagcugcggcauugaagcacacccaacccaacucgacugaagucagccucacugaaccggaucugagaaucuucucucucugggcuugccagggcucuccgaaccuagcuagcauccucuucaauuccaacuagaaagcuuaccauggaacuccccauacucaagacuaaugccaucaccaccauccucgccgccgugacccucugcuucgcaucgucccaaaacauaacagaagaguucuaccaaagcacaugcuccgcagucuccaaaggauaccucuccgcacuacguaccggcugguacaccagcgucaucaccaucgaacuuuccaacaucaaagagaacaaaugcaacggcaccgacgccaaaguaaaacucauaaaacaagagcuagacaaauacaaaaacgccgucacagaacuccaacuacugaugcaauccacaccggccgccaacaaccgcgcucgacgugaacucccacgcuucaugaacuacacucuuaacaacaccaaaaauaacaacgucacccuauccaaaaagcgaaagcgcagauuccucggcuuccuacuuggcgucggcucggcgauagccucuggaaucgccguuugcaagguccuccaccuagaaggcgaaguaaacaaaaucaaaaacgcacuccuaagcaccaacaaagccgucgucucacuuuccaacggcgucucaguccucacauucaaaguucucgaccuaaagaacuacaucgacaagcaacuacuacccauacucaauaaacaauccugcuccaucagcaacaucgagacagucaucgaauuucaacaaaagaacaaccgccuccucgaaauuacacgcgaguucucagucaacgccggagucaccaccccagucucaacauacaugcucaccaacagcgaacuccugucucuaaucaacgacaugcccaucacuaacgaccagaagaaacucauguccaacaacguccaaaucgugcgacaacaaucauacucuaucaugugcaucaucaaagaagaaguccucgcauacgucguccagcucccacucuacggcguaaucgacacacccugcuggaaacuccacacaucaccccuaugcaccaccaacacaaaagaaggcuccaacaucugccuaacccgaaccgacagagguugguauugcgacaacgccggcucagucucauucuucccacaagccgaaaccuguaaaguccaaucaaaccgcgucuucugcgauaccaugaacucucucacacuccccuccgaagucaaucucugcaacauagacaucuucaauccaaaguacgacugcaaaauaaugaccucgaaaaccgacguaagcuccagcgucaucaccuccuuaggcgcaaucguauccugcuacggcaaaaccaaaugcaccgccucaaacaaaaacagaggcaucaucaaaacguucucgaacggaugcgacuacguuuccaauaaaggcguagauaccgucuccgucggcaacacacucuauuacgucaacaaacaagaaggcaaaucccucuacgucaaaggugaaccuaucaucaacuucuacgacccccucgucuuccccagcgacgaguucgaugccucaaucagccaagucaacgagaaaaucaaccaaucacuggcuuucauacgcaaauccgacgaacuccuccacaacgugaacgucggcaaauccacaaccaacaucaugauaaccacaauaaucaucgucauaaucguaauccuacuccuccuuauugccguaggacuauuccuauacugcaaagcccgauccacccccgucacccucucaaaagaccaacucuccggcaucaacaauauagccuucucuaacuaaggacuagucccuguucccagagcccacuuuuuuuucuuuuuuugaaauaaaauagccugucuuucagaucuaaaaaaaaaaaaaaaaaaaaaaaaaaaaaaaaaaaaaaaaaaaaaaaaaaaaaaaaaaaaaaaaugcaucccccccccccccccccccccccccccccccaaaggcucuuuucagagccaccagaauu

SEQ ID NO: 12497 - RNA, 2047 nt, Artificial Sequence
  mRNA product Design a-4 comprising derived and/or modified sequence from HRSV(Memphis-37)__AIY60640.1__F0_DSCav1 (opt1)
gggagacuccugucgggcggaaguaggaggaguagaguuuaaaaacaguacucuuuuuccgguucgggacguaguugaagcaacgacaagccggauaaccgcucuugagacaggaagcuuaccauggagcugcccauccucaagaccaacgccaucaccacgauccuggccgcggugacccugugcuucgccagcucccagaacaucaccgaggaguucuaccagagcacgugcuccgccgucagcaagggcuaccucuccgcccugcgcaccgggugguacaccagcgugaucaccaucgagcuguccaacaucaaggagaacaagugcaacggcaccgacgccaaggugaagcucaucaagcaggagcuggacaaguacaagaacgcggucacggagcugcagcuccugaugcagagcaccccggccgccaacaaccgggcccgccgggagcugccccgcuucaugaacuacacccucaacaacaccaagaacaacaacgugacgcuguccaagaagcggaagcgccgguuccugggguuccuccugggcguggggagcgcgaucgccuccggcaucgccgucugcaaggugcugcaccucgagggcgaggugaacaagaucaagaacgcccugcuguccaccaacaaggccgucgugagccucuccaacggggugagcguccugaccuucaaggugcuggaccucaagaacuacaucgacaagcagcugcugcccauccugaacaagcagagcugcuccaucagcaacaucgagaccgucaucgaguuccagcagaagaacaaccgccuccuggagaucacgcgggaguucagcgugaacgcgggcgugaccacccccgucuccaccuacaugcugacgaacagcgagcuccugucccugaucaacgacaugccgaucaccaacgaccagaagaagcucaugagcaacaacgugcagaucgugcgccagcaguccuacagcaucaugugcaucaucaaggaggagguccuggccuacguggugcagcugccccucuacggggucaucgacacccccugcuggaagcugcacaccagcccccugugcacgaccaacaccaaggagggcuccaacaucugccucacccggacggaccgcgggugguacugcgacaacgccggcagcguguccuucuucccgcaggccgagaccugcaagguccagagcaaccggguguucugcgacaccaugaacucccugacccugcccagcgaggugaaccucugcaacaucgacaucuucaaccccaaguacgacugcaagaucaugacguccaagaccgacgucagcuccagcgugaucaccucccugggcgccaucgugagcugcuacgggaagaccaagugcacggcgagcaacaagaaccgcggcaucaucaagaccuucuccaacgggugcgacuacgucagcaacaagggcguggacaccguguccgucggcaacacccuguacuacgugaacaagcaggagggcaagagccucuacgugaagggggagcccaucaucaacuucuacgacccgcuggucuuccccuccgacgaguucgacgccagcaucucccaggugaacgagaagaucaaccagagccuggccuucauccggaaguccgacgagcuccugcacaacgugaacgucggcaagagcaccacgaacaucaugaucaccaccaucaucaucgugaucaucgugauccugcugcuccugaucgccgucgggcuguuccucuacugcaaggcccgcuccacccccgugacgcugagcaaggaccagcuguccgggaucaacaacaucgcguucagcaacugaggacuagucccuguucccagagcccacuuuuuuuucuuuuuuugaaauaaaauagccugucuuucagaucuaaaaaaaaaaaaaaaaaaaaaaaaaaaaaaaaaaaaaaaaaaaaaaaaaaaaaaaaaaaaaaaaugcaucccccccccccccccccccccccccccccccaaaggcucuuuucagagccaccagaauu

SEQ ID NO: 12498 - RNA, 2047 nt, Artificial Sequence
  mRNA product Design a-4 comprising derived and/or modified sequence from HRSV(Memphis-37)__AIY60640.1__F0_DSCav1 (opt1)
gggagacuccugucgggcggaaguaggaggaguagaguuuaaaaacaguacucuuuuuccgguucgggacguaguugaagcaacgacaagccggauaaccgcucuugagacaggaagcuuaccauggagcugcccauccucaagaccaacgccaucaccacgauccuggccgcggugacccugugcuucgccagcucccagaacaucaccgaggaguucuaccagagcacgugcuccgccgucagcaagggcuaccucuccgcccugcgcaccgggugguacaccagcgugaucaccaucgagcuguccaacaucaaggagaacaagugcaacggcaccgacgccaaggugaagcucaucaagcaggagcuggacaaguacaagaacgcggucacggagcugcagcuccugaugcagagcaccccggccgccaacaaccgggcccgccgggagcugccccgcuucaugaacuacacccucaacaacaccaagaacaacaacgugacgcuguccaagaagcggaagcgccgguuccugggguuccuccugggcguggggagcgcgaucgccuccggcaucgccgucugcaaggugcugcaccucgagggcgaggugaacaagaucaagaacgcccugcugagcaccaacaaggccgucgugucccucagcaacgggguguccguccugaccuucaaggugcuggaccucaagaacuacaucgacaagcagcugcugcccauccucaacaagcagagcugcuccaucagcaacaucgagaccgugaucgaguuccagcagaagaacaaccgccugcuggagaucacgcgggaguucuccgucaacgcgggcgugaccacccccgugagcaccuacaugcucacgaacagcgagcugcugucccucaucaacgacaugccgaucaccaacgaccagaagaagcugaugagcaacaacguccagaucgugcgccagcaguccuacagcaucaugugcaucaucaaggaggaggugcuggccuacgucgugcagcucccccuguacggggugaucgacacccccugcuggaagcugcacaccagcccccucugcacgaccaacaccaaggagggcagcaacaucugccugacccggacggaccgcgggugguacugcgacaacgccggcuccgucagcuucuucccgcaggccgagaccugcaaggugcaguccaaccgggucuucugcgacaccaugaacagccugacccuccccuccgaggugaaccugugcaacaucgacaucuucaaccccaaguacgacugcaagaucaugacgagcaagaccgacguguccagcuccgucaucaccagccugggcgccaucguguccugcuacgggaagaccaagugcacggcgagcaacaagaaccgcggcaucaucaagaccuucuccaacgggugcgacuacgugagcaacaagggcgucgacaccgugagcgugggcaacacccucuacuacgucaacaagcaggaggggaagucccuguacgugaagggcgagcccaucaucaacuucuacgacccgcugguguuccccagcgacgaguucgacgccuccaucagccaggucaacgagaagaucaaccagucccucgccuucauccggaaguccgacgagcugcugcacaacgugaacguggggaaguccaccacgaacaucaugaucaccaccaucaucaucgucaucaucgugauccugcuccugcugaucgccgugggccucuuccuguacugcaaggcccgcagcacccccgucacgcuguccaaggaccagcucagcgggaucaacaacaucgcguucuccaacugaggacuagucccuguucccagagcccacuuuuuuuucuuuuuuugaaauaaaauagccugucuuucagaucuaaaaaaaaaaaaaaaaaaaaaaaaaaaaaaaaaaaaaaaaaaaaaaaaaaaaaaaaaaaaaaaaugcaucccccccccccccccccccccccccccccccaaaggcucuuuucagagccaccagaauu

SEQ ID NO: 12499 - RNA, 2047 nt, Artificial Sequence
  mRNA product Design a-4 comprising derived and/or modified sequence from HRSV(Memphis-37)__AIY60640.1__F0_DSCav1 (opt2)
gggagacuccugucgggcggaaguaggaggaguagaguuuaaaaacaguacucuuuuuccgguucgggacguaguugaagcaacgacaagccggauaaccgcucuugagacaggaagcuuaccauggagcuccccauccucaagaccaacgccaucaccaccauccucgccgccgucacccucugcuucgccuccucccagaacaucaccgaggaguucuaccaguccaccugcuccgccgucuccaagggcuaccucuccgcccuccgcaccggcugguacaccuccgucaucaccaucgagcucuccaacaucaaggagaacaagugcaacggcaccgacgccaaggucaagcucaucaagcaggagcucgacaaguacaagaacgccgucaccgagcuccagcuccucaugcaguccacccccgccgccaacaaccgcgcccgccgcgagcucccccgcuucaugaacuacacccucaacaacaccaagaacaacaacgucacccucuccaagaagcgcaagcgccgcuuccucggcuuccuccucggcgucggcuccgccaucgccuccggcaucgccgucugcaagguccuccaccucgagggcgaggucaacaagaucaagaacgcccuccucuccaccaacaaggccgucgucucccucuccaacggcgucuccguccucaccuucaagguccucgaccucaagaacuacaucgacaagcagcuccuccccauccucaacaagcaguccugcuccaucuccaacaucgagaccgucaucgaguuccagcagaagaacaaccgccuccucgagaucacccgcgaguucuccgucaacgccggcgucaccacccccgucuccaccuacaugcucaccaacuccgagcuccucucccucaucaacgacaugcccaucaccaacgaccagaagaagcucauguccaacaacguccagaucguccgccagcaguccuacuccaucaugugcaucaucaaggaggagguccucgccuacgucguccagcucccccucuacggcgucaucgacacccccugcuggaagcuccacaccuccccccucugcaccaccaacaccaaggagggcuccaacaucugccucacccgcaccgaccgcggcugguacugcgacaacgccggcuccgucuccuucuucccccaggccgagaccugcaagguccaguccaaccgcgucuucugcgacaccaugaacucccucacccuccccuccgaggucaaccucugcaacaucgacaucuucaaccccaaguacgacugcaagaucaugaccuccaagaccgacgucuccuccuccgucaucaccucccucggcgccaucgucuccugcuacggcaagaccaagugcaccgccuccaacaagaaccgcggcaucaucaagaccuucuccaacggcugcgacuacgucuccaacaagggcgucgacaccgucuccgucggcaacacccucuacuacgucaacaagcaggagggcaagucccucuacgucaagggcgagcccaucaucaacuucuacgacccccucgucuuccccuccgacgaguucgacgccuccaucucccaggucaacgagaagaucaaccagucccucgccuucauccgcaaguccgacgagcuccuccacaacgucaacgucggcaaguccaccaccaacaucaugaucaccaccaucaucaucgucaucaucgucauccuccuccuccucaucgccgucggccucuuccucuacugcaaggcccgcuccacccccgucacccucuccaaggaccagcucuccggcaucaacaacaucgccuucuccaacugaggacuagucccuguucccagagcccacuuuuuuuucuuuuuuugaaauaaaauagccugucuuucagaucuaaaaaaaaaaaaaaaaaaaaaaaaaaaaaaaaaaaaaaaaaaaaaaaaaaaaaaaaaaaaaaaaugcaucccccccccccccccccccccccccccccccaaaggcucuuuucagagccaccagaauu

SEQ ID NO: 12500 - RNA, 2047 nt, Artificial Sequence
  mRNA product Design a-4 comprising derived and/or modified sequence from HRSV(Memphis-37)__AIY60640.1__F0_DSCav1 (opt3)
gggagacuccugucgggcggaaguaggaggaguagaguuuaaaaacaguacucuuuuuccgguucgggacguaguugaagcaacgacaagccggauaaccgcucuugagacaggaagcuuaccauggagcugcccauccucaagaccaacgccauuacaacuauacuugcugcagugacgcugugcuucgccagcucccagaauaucaccgaagaguuuuaccaaucuacauguucagcggucaguaaaggcuauuugagcgcuuuaagaacugggugguacaccuccguuauuacaaucgaacugucuaacauuaaggagaauaaaugcaacggaaccgacgccaaggugaaacuaaucaagcaggaacucgauaaguauaaaaaugcaguaacugagcugcagcuucugaugcagucgaccccugccgcuaacaauagggcacggcgcgaguugccacgauucaugaacuacacacucaauaacacgaagaauaacaaugugacucugagcaaaaagcguaaaagaagguuucuggguuuccucuuaggcgucgggucagccauagcuaguggaaucgccguguguaagguucugcaccuugaaggcgaggugaacaagauuaaaaaugcguugcuguccaccaacaaggcagucgugucucuaagcaacgguguauccguucucacauuuaaagugcuggaccuuaagaauuauaucgauaaacaacuguugccgauucucaacaagcagucaugcaguaucagcaauauagaaacugucauugaguuccagcagaaaaacaaucggcuguuagagaucacccgcgaauuuucugugaacgccggggugacaacccccgucuccacguacaugcugacuaauucagagcuccuuagccugauuaacgacaugccuaucacaaaugaucaaaagaaguugaugaguaacaauguucagaucgugagacagcagucuuauuccauuauguguauaaucaaagaagagguacuagcuuacgugguccaacugccacucuacggagugauugacacccccugcuggaagcugcauacuagcccucuuuguacaaccaacacgaaagaaggcucgaauaucugccugaccaggacagaucggggcugguauugugacaacgccgggucuguuuccuucuuuccacaggcagagacuugcaaggugcagucaaaucgcgucuucugugauaccaugaacaguuugacacuccccagcgaggugaaccugugcaauauagacauuuuuaacccuaaauacgauugcaagaucaugacuuccaagaccgacguaucuagcucaguuaucacaaguuuaggagcuauuguguccuguuaugguaaaaccaagugcacugccagcaauaaaaaccgaggcaucauuaagacguucucuaaugggugugauuacgucucaaacaaaggaguggacacagucagugugggcaauacccuguauuacguuaacaagcaagaagguaagagccuauaugugaaaggggagccaauaaucaauuuuuacgacccgcucguauuccccuccgaugaguucgacgcgucuauuucgcaggucaacgaaaagaucaaucagagccuggccuuuaucagaaaauccgaugaacuuuugcacaacgugaauguuggaaagucaacuaccaacauuaugauaacaaccaucauuaucgugauuaucgucauacugcuccugcuuaucgcagugggccuguucuuguacugcaaagcuaggaguacuccuguaacacucucuaaggaccagcugagcggcauuaauaacaucgccuuuuccaacugaggacuagucccuguucccagagcccacuuuuuuuucuuuuuuugaaauaaaauagccugucuuucagaucuaaaaaaaaaaaaaaaaaaaaaaaaaaaaaaaaaaaaaaaaaaaaaaaaaaaaaaaaaaaaaaaaugcaucccccccccccccccccccccccccccccccaaaggcucuuuucagagccaccagaauu

SEQ ID NO: 12501 - RNA, 2047 nt, Artificial Sequence
  mRNA product Design a-4 comprising derived and/or modified sequence from HRSV(Memphis-37)__AIY60640.1__F0_DSCav1 (opt4)
gggagacuccugucgggcggaaguaggaggaguagaguuuaaaaacaguacucuuuuuccgguucgggacguaguugaagcaacgacaagccggauaaccgcucuugagacaggaagcuuaccauggagcugcccauccugaagaccaacgccaucaccaccauccuggccgccgugacccugugcuucgccagcagccagaacaucaccgaggaguucuaccagagcaccugcagcgccgugagcaagggcuaccugagcgcccugagaaccggcugguacaccagcgugaucaccaucgagcugagcaacaucaaggagaacaagugcaacggcaccgacgccaaggugaagcugaucaagcaggagcuggacaaguacaagaacgccgugaccgagcugcagcugcugaugcagagcacccccgccgccaacaacagagccagaagagagcugcccagauucaugaacuacacccugaacaacaccaagaacaacaacgugacccugagcaagaagagaaagagaagauuccugggcuuccugcugggcgugggcagcgccaucgccagcggcaucgccgugugcaaggugcugcaccuggagggcgaggugaacaagaucaagaacgcccugcugagcaccaacaaggccguggugagccugagcaacggcgugagcgugcugaccuucaaggugcuggaccugaagaacuacaucgacaagcagcugcugcccauccugaacaagcagagcugcagcaucagcaacaucgagaccgugaucgaguuccagcagaagaacaacagacugcuggagaucaccagagaguucagcgugaacgccggcgugaccacccccgugagcaccuacaugcugaccaacagcgagcugcugagccugaucaacgacaugcccaucaccaacgaccagaagaagcugaugagcaacaacgugcagaucgugagacagcagagcuacagcaucaugugcaucaucaaggaggaggugcuggccuacguggugcagcugccccuguacggcgugaucgacacccccugcuggaagcugcacaccagcccccugugcaccaccaacaccaaggagggcagcaacaucugccugaccagaaccgacagaggcugguacugcgacaacgccggcagcgugagcuucuucccccaggccgagaccugcaaggugcagagcaacagaguguucugcgacaccaugaacagccugacccugcccagcgaggugaaccugugcaacaucgacaucuucaaccccaaguacgacugcaagaucaugaccagcaagaccgacgugagcagcagcgugaucaccagccugggcgccaucgugagcugcuacggcaagaccaagugcaccgccagcaacaagaacagaggcaucaucaagaccuucagcaacggcugcgacuacgugagcaacaagggcguggacaccgugagcgugggcaacacccuguacuacgugaacaagcaggagggcaagagccuguacgugaagggcgagcccaucaucaacuucuacgacccccugguguuccccagcgacgaguucgacgccagcaucagccaggugaacgagaagaucaaccagagccuggccuucaucagaaagagcgacgagcugcugcacaacgugaacgugggcaagagcaccaccaacaucaugaucaccaccaucaucaucgugaucaucgugauccugcugcugcugaucgccgugggccuguuccuguacugcaaggccagaagcacccccgugacccugagcaaggaccagcugagcggcaucaacaacaucgccuucagcaacugaggacuagucccuguucccagagcccacuuuuuuuucuuuuuuugaaauaaaauagccugucuuucagaucuaaaaaaaaaaaaaaaaaaaaaaaaaaaaaaaaaaaaaaaaaaaaaaaaaaaaaaaaaaaaaaaaugcaucccccccccccccccccccccccccccccccaaaggcucuuuucagagccaccagaauu

SEQ ID NO: 12502 - RNA, 2047 nt, Artificial Sequence
  mRNA product Design a-4 comprising derived and/or modified sequence from HRSV(Memphis-37)__AIY60640.1__F0_DSCav1 (opt5)
gggagacuccugucgggcggaaguaggaggaguagaguuuaaaaacaguacucuuuuuccgguucgggacguaguugaagcaacgacaagccggauaaccgcucuugagacaggaagcuuaccauggagcugcccauccucaagaccaacgccauuacaacgauccuggcugccgugacccuuugcuucgcgagcucccagaauauuacagaagaguuuuaccaaucuaccuguagcgcugucuccaaaggcuaucugucugcccucagaacagggugguacaccagcguuaucacaauugaacuguccaacaucaaggagaauaaaugcaacggaaccgacgccaaggugaaacuuaucaagcaggaacuggauaaguauaaaaaugcugugacggagcuccagcugcugaugcagucuaccccugccgcuaacaaucgggcccgcagagagcucccgcgguucaugaacuacacacugaauaacaccaagaauaacaaugucacacuuagcaaaaagcgcaaaagacgguuucugggcuuccuccugggggugggauccgcgauugccagcggcaucgcuguuuguaaggugcuucaccuggaaggggaggucaacaagauuaaaaaugcccuccugucuaccaacaaggcugugguuucccugagcaacggagugucuguccucacguuuaaagugcuggaccuuaagaauuauaucgauaaacaacugcuccccauucugaacaagcaguccugcagcaucucuaauauugaaacagugaucgaguuccagcagaaaaacaaucgccuucuggagaucaccagagaauuuuccgucaacgccggcguuacaaccccugugagcaccuacaugcucacaaauuccgagcugcugucucucauuaacgacaugcccaucacgaaugaucaaaagaagcugaugagcaacaaugugcagauuguccggcagcaguccuauagcaucauguguauuaucaaagaagaggugcuugcguacguugugcaacugccucucuacggcgucaucgacacccccugcuggaagcugcauacaucuccucuuuguaccacaaacaccaaagaaggguccaauauuugccugacgcgcacagauagaggaugguauugugacaacgccggcagcgugucuuucuuuccgcaggcugagaccugcaagguucagagcaaucggguguucugugauaccaugaacucccucacacugcccucugaggucaaccugugcaauaucgacauuuuuaacccuaaauacgauugcaagaucaugaccagcaagacagacguguccagcucugucauuacgucccucggggccaucgugagcuguuauggaaaaaccaagugcacagcuucuaauaaaaaccgcggcaucauuaagaccuucuccaaugggugugauuacguuagcaacaaaggaguggacacagucuccgugggcaauacccuguauuacguuaacaagcaagaaggcaagucucuuuaugugaaaggggagcccaucauuaauuuuuacgacccucuggucuuccccagcgaugaguucgacgccuccaucucucaggugaacgaaaagauuaaucagagccucgccuuuaucagaaaauccgaugaacugcugcacaacgugaauguuggaaagagcacgaccaacauuaugaucacaaccaucauuaucgucauuaucgugauucuucuccugcugaucgcugugggccucuuccuguacugcaaagcgcggucuacaccggucacccuuuccaaggaccagcugagcgggaucaauaacauugccuuuucuaacugaggacuagucccuguucccagagcccacuuuuuuuucuuuuuuugaaauaaaauagccugucuuucagaucuaaaaaaaaaaaaaaaaaaaaaaaaaaaaaaaaaaaaaaaaaaaaaaaaaaaaaaaaaaaaaaaaugcaucccccccccccccccccccccccccccccccaaaggcucuuuucagagccaccagaauu

SEQ ID NO: 12503 - RNA, 2047 nt, Artificial Sequence
  mRNA product Design a-4 comprising derived and/or modified sequence from HRSV(Memphis-37)__AIY60640.1__F0_DSCav1 (opt6)
gggagacuccugucgggcggaaguaggaggaguagaguuuaaaaacaguacucuuuuuccgguucgggacguaguugaagcaacgacaagccggauaaccgcucuugagacaggaagcuuaccauggaacucccaauccucaaaaccaaugccauaacaaccauacucgcugcaguaaccuuauguuucgcaaguagccaaaacauaaccgaagaauuuuaucaauccacaugcuccgcaguuucuaaaggauaucuaucagcauuaagaacuggaugguacacaucuguaauaacuauagaacuaagcaauauaaaagaaaacaaauguaacggaacugacgcuaaaguaaaacuuauaaaacaagaacuagauaaauacaaaaacgccguuaccgaacuacaacuauuaaugcaaucaacaccagccgcaaauaacagagcaagacgcgaauuaccaagauucaugaauuacacacuaaacaauacaaaaaauaacaauguaacacuaucaaaaaaaagaaaacgacgauucuuaggcuuccuacuaggagucggcucagcaauagcuuccggaauagccgucuguaaaguccuacaccuugaaggcgaaguaaacaaaaucaaaaacgcacuauuaucaacaaacaaagcagucguaucuuuauccaacggagucucaguccuaacauucaaaguacucgauuuaaaaaacuacaucgauaaacaacuccuucccauucuaaacaaacaauccugcucaauauccaacaucgaaacagucauagaauuucaacaaaaaaacaaccgccugcuagaaauaacaagagaauuuuccguaaaugccggcgucaccacaccaguaucaacauacaugcuaacaaacuccgaacuacucucccuaauaaacgauaugccaaucaccaacgaccaaaaaaaacuaaugucaaauaacguucaaauagucagacaacaaucauacagcauaaugugcauaauaaaagaagaagucuuagccuacguuguacaacucccauuauacggaguuaucgauacaccaugcuggaaauuacacacaucacccuuaugcaccacaaacacaaaagaaggauccaauauuugucuaacacgaacagacagaggaugguacugugauaacgcaggaucagugucauucuuuccacaagcagaaacauguaaaguucaaucuaacagaguauucugcgacaccaugaacucccuaaccuuacccucagaaguaaaucuaugcaacauagauaucuuuaacccaaaauacgacugcaaaaucaugacaucaaaaacugacguuucuucauccguuauaacuucccucggcgcuauaguguccugcuacggaaaaacuaaaugcacagcauccaacaaaaauagaggaauaauaaaaacauuuuccaacggcugcgacuauguuucaaacaaaggaguagauaccguaucagucggcaauacauuauauuauguuaacaaacaagaaggaaaaucccuauacguaaaaggagaaccuauaaucaacuucuacgacccacucguauuccccucagacgaauuugacgcaucuauaucucaaguaaaugaaaaaauaaaccaaucacucgcauuuauccgcaaaucugacgaauuacuccauaacgucaacgucggcaaaucaaccaccaacauaaugauaacaacaauuauaauaguaauaauugucauacuacuacuccuaauagcaguaggucuauuccuauacugcaaagcaagauccacccccguaacccuuuccaaagaucaacucucaggaauaaauaacauagccuuuucaaacuaaggacuagucccuguucccagagcccacuuuuuuuucuuuuuuugaaauaaaauagccugucuuucagaucuaaaaaaaaaaaaaaaaaaaaaaaaaaaaaaaaaaaaaaaaaaaaaaaaaaaaaaaaaaaaaaaaugcaucccccccccccccccccccccccccccccccaaaggcucuuuucagagccaccagaauu

SEQ ID NO: 12504 - RNA, 2047 nt, Artificial Sequence
  mRNA product Design a-4 comprising derived and/or modified sequence from HRSV(Memphis-37)__AIY60640.1__F0_DSCav1 (opt11)
gggagacuccugucgggcggaaguaggaggaguagaguuuaaaaacaguacucuuuuuccgguucgggacguaguugaagcaacgacaagccggauaaccgcucuugagacaggaagcuuaccauggaacuccccauacucaagacuaaugccaucaccaccauccucgccgccgugacccucugcuucgcaucgucccaaaacauaacagaagaguucuaccaaagcacaugcuccgcagucuccaaaggauaccucuccgcacuacguaccggcugguacaccagcgucaucaccaucgaacuuuccaacaucaaagagaacaaaugcaacggcaccgacgccaaaguaaaacucauaaaacaagagcuagacaaauacaaaaacgccgucacagaacuccaacuacugaugcaauccacaccggccgccaacaaccgcgcucgacgugaacucccacgcuucaugaacuacacucuuaacaacaccaaaaauaacaacgucacccuauccaaaaagcgaaagcgcagauuccucggcuuccuacuuggcgucggcucggcgauagccucuggaaucgccguuugcaagguccuccaccuagaaggcgaaguaaacaaaaucaaaaacgcacuccuaagcaccaacaaagccgucgucucacuuuccaacggcgucucaguccucacauucaaaguucucgaccuaaagaacuacaucgacaagcaacuacuacccauacucaauaaacaauccugcuccaucagcaacaucgagacagucaucgaauuucaacaaaagaacaaccgccuccucgaaauuacacgcgaguucucagucaacgccggagucaccaccccagucucaacauacaugcucaccaacagcgaacuccugucucuaaucaacgacaugcccaucacuaacgaccagaagaaacucauguccaacaacguccaaaucgugcgacaacaaucauacucuaucaugugcaucaucaaagaagaaguccucgcauacgucguccagcucccacucuacggcguaaucgacacacccugcuggaaacuccacacaucaccccuaugcaccaccaacacaaaagaaggcuccaacaucugccuaacccgaaccgacagagguugguauugcgacaacgccggcucagucucauucuucccacaagccgaaaccuguaaaguccaaucaaaccgcgucuucugcgauaccaugaacucucucacacuccccuccgaagucaaucucugcaacauagacaucuucaauccaaaguacgacugcaaaauaaugaccucgaaaaccgacguaagcuccagcgucaucaccuccuuaggcgcaaucguauccugcuacggcaaaaccaaaugcaccgccucaaacaaaaacagaggcaucaucaaaacguucucgaacggaugcgacuacguuuccaauaaaggcguagauaccgucuccgucggcaacacacucuauuacgucaacaaacaagaaggcaaaucccucuacgucaaaggugaaccuaucaucaacuucuacgacccccucgucuuccccagcgacgaguucgaugccucaaucagccaagucaacgagaaaaucaaccaaucacuggcuuucauacgcaaauccgacgaacuccuccacaacgugaacgucggcaaauccacaaccaacaucaugauaaccacaauaaucaucgucauaaucguaauccuacuccuccuuauugccguaggacuauuccuauacugcaaagcccgauccacccccgucacccucucaaaagaccaacucuccggcaucaacaauauagccuucucuaacuaaggacuagucccuguucccagagcccacuuuuuuuucuuuuuuugaaauaaaauagccugucuuucagaucuaaaaaaaaaaaaaaaaaaaaaaaaaaaaaaaaaaaaaaaaaaaaaaaaaaaaaaaaaaaaaaaaugcaucccccccccccccccccccccccccccccccaaaggcucuuuucagagccaccagaauu

SEQ ID NO: 12505 - RNA, 1993 nt, Artificial Sequence
  mRNA product Design a-5 comprising derived and/or modified sequence from HRSV(Memphis-37)__AIY60640.1__F0_DSCav1 (opt1)
gggagacuuucccauucuguagcagaauuugguguugccuguggucuuggucccgcggagaagcuuaccauggagcugcccauccucaagaccaacgccaucaccacgauccuggccgcggugacccugugcuucgccagcucccagaacaucaccgaggaguucuaccagagcacgugcuccgccgucagcaagggcuaccucuccgcccugcgcaccgggugguacaccagcgugaucaccaucgagcuguccaacaucaaggagaacaagugcaacggcaccgacgccaaggugaagcucaucaagcaggagcuggacaaguacaagaacgcggucacggagcugcagcuccugaugcagagcaccccggccgccaacaaccgggcccgccgggagcugccccgcuucaugaacuacacccucaacaacaccaagaacaacaacgugacgcuguccaagaagcggaagcgccgguuccugggguuccuccugggcguggggagcgcgaucgccuccggcaucgccgucugcaaggugcugcaccucgagggcgaggugaacaagaucaagaacgcccugcuguccaccaacaaggccgucgugagccucuccaacggggugagcguccugaccuucaaggugcuggaccucaagaacuacaucgacaagcagcugcugcccauccugaacaagcagagcugcuccaucagcaacaucgagaccgucaucgaguuccagcagaagaacaaccgccuccuggagaucacgcgggaguucagcgugaacgcgggcgugaccacccccgucuccaccuacaugcugacgaacagcgagcuccugucccugaucaacgacaugccgaucaccaacgaccagaagaagcucaugagcaacaacgugcagaucgugcgccagcaguccuacagcaucaugugcaucaucaaggaggagguccuggccuacguggugcagcugccccucuacggggucaucgacacccccugcuggaagcugcacaccagcccccugugcacgaccaacaccaaggagggcuccaacaucugccucacccggacggaccgcgggugguacugcgacaacgccggcagcguguccuucuucccgcaggccgagaccugcaagguccagagcaaccggguguucugcgacaccaugaacucccugacccugcccagcgaggugaaccucugcaacaucgacaucuucaaccccaaguacgacugcaagaucaugacguccaagaccgacgucagcuccagcgugaucaccucccugggcgccaucgugagcugcuacgggaagaccaagugcacggcgagcaacaagaaccgcggcaucaucaagaccuucuccaacgggugcgacuacgucagcaacaagggcguggacaccguguccgucggcaacacccuguacuacgugaacaagcaggagggcaagagccucuacgugaagggggagcccaucaucaacuucuacgacccgcuggucuuccccuccgacgaguucgacgccagcaucucccaggugaacgagaagaucaaccagagccuggccuucauccggaaguccgacgagcuccugcacaacgugaacgucggcaagagcaccacgaacaucaugaucaccaccaucaucaucgugaucaucgugauccugcugcuccugaucgccgucgggcuguuccucuacugcaaggcccgcuccacccccgugacgcugagcaaggaccagcuguccgggaucaacaacaucgcguucagcaacugaggacuagucccuguucccagagcccacuuuuuuuucuuuuuuugaaauaaaauagccugucuuucagaucuaaaaaaaaaaaaaaaaaaaaaaaaaaaaaaaaaaaaaaaaaaaaaaaaaaaaaaaaaaaaaaaaugcaucccccccccccccccccccccccccccccccaaaggcucuuuucagagccaccagaauu

SEQ ID NO: 12506 - RNA, 1993 nt, Artificial Sequence
  mRNA product Design a-5 comprising derived and/or modified sequence from HRSV(Memphis-37)__AIY60640.1__F0_DSCav1 (opt1)
gggagacuuucccauucuguagcagaauuugguguugccuguggucuuggucccgcggagaagcuuaccauggagcugcccauccucaagaccaacgccaucaccacgauccuggccgcggugacccugugcuucgccagcucccagaacaucaccgaggaguucuaccagagcacgugcuccgccgucagcaagggcuaccucuccgcccugcgcaccgggugguacaccagcgugaucaccaucgagcuguccaacaucaaggagaacaagugcaacggcaccgacgccaaggugaagcucaucaagcaggagcuggacaaguacaagaacgcggucacggagcugcagcuccugaugcagagcaccccggccgccaacaaccgggcccgccgggagcugccccgcuucaugaacuacacccucaacaacaccaagaacaacaacgugacgcuguccaagaagcggaagcgccgguuccugggguuccuccugggcguggggagcgcgaucgccuccggcaucgccgucugcaaggugcugcaccucgagggcgaggugaacaagaucaagaacgcccugcugagcaccaacaaggccgucgugucccucagcaacgggguguccguccugaccuucaaggugcuggaccucaagaacuacaucgacaagcagcugcugcccauccucaacaagcagagcugcuccaucagcaacaucgagaccgugaucgaguuccagcagaagaacaaccgccugcuggagaucacgcgggaguucuccgucaacgcgggcgugaccacccccgugagcaccuacaugcucacgaacagcgagcugcugucccucaucaacgacaugccgaucaccaacgaccagaagaagcugaugagcaacaacguccagaucgugcgccagcaguccuacagcaucaugugcaucaucaaggaggaggugcuggccuacgucgugcagcucccccuguacggggugaucgacacccccugcuggaagcugcacaccagcccccucugcacgaccaacaccaaggagggcagcaacaucugccugacccggacggaccgcgggugguacugcgacaacgccggcuccgucagcuucuucccgcaggccgagaccugcaaggugcaguccaaccgggucuucugcgacaccaugaacagccugacccuccccuccgaggugaaccugugcaacaucgacaucuucaaccccaaguacgacugcaagaucaugacgagcaagaccgacguguccagcuccgucaucaccagccugggcgccaucguguccugcuacgggaagaccaagugcacggcgagcaacaagaaccgcggcaucaucaagaccuucuccaacgggugcgacuacgugagcaacaagggcgucgacaccgugagcgugggcaacacccucuacuacgucaacaagcaggaggggaagucccuguacgugaagggcgagcccaucaucaacuucuacgacccgcugguguuccccagcgacgaguucgacgccuccaucagccaggucaacgagaagaucaaccagucccucgccuucauccggaaguccgacgagcugcugcacaacgugaacguggggaaguccaccacgaacaucaugaucaccaccaucaucaucgucaucaucgugauccugcuccugcugaucgccgugggccucuuccuguacugcaaggcccgcagcacccccgucacgcuguccaaggaccagcucagcgggaucaacaacaucgcguucuccaacugaggacuagucccuguucccagagcccacuuuuuuuucuuuuuuugaaauaaaauagccugucuuucagaucuaaaaaaaaaaaaaaaaaaaaaaaaaaaaaaaaaaaaaaaaaaaaaaaaaaaaaaaaaaaaaaaaugcaucccccccccccccccccccccccccccccccaaaggcucuuuucagagccaccagaauu

SEQ ID NO: 12507 - RNA, 1993 nt, Artificial Sequence
  mRNA product Design a-5 comprising derived and/or modified sequence from HRSV(Memphis-37)__AIY60640.1__F0_DSCav1 (opt2)
gggagacuuucccauucuguagcagaauuugguguugccuguggucuuggucccgcggagaagcuuaccauggagcuccccauccucaagaccaacgccaucaccaccauccucgccgccgucacccucugcuucgccuccucccagaacaucaccgaggaguucuaccaguccaccugcuccgccgucuccaagggcuaccucuccgcccuccgcaccggcugguacaccuccgucaucaccaucgagcucuccaacaucaaggagaacaagugcaacggcaccgacgccaaggucaagcucaucaagcaggagcucgacaaguacaagaacgccgucaccgagcuccagcuccucaugcaguccacccccgccgccaacaaccgcgcccgccgcgagcucccccgcuucaugaacuacacccucaacaacaccaagaacaacaacgucacccucuccaagaagcgcaagcgccgcuuccucggcuuccuccucggcgucggcuccgccaucgccuccggcaucgccgucugcaagguccuccaccucgagggcgaggucaacaagaucaagaacgcccuccucuccaccaacaaggccgucgucucccucuccaacggcgucuccguccucaccuucaagguccucgaccucaagaacuacaucgacaagcagcuccuccccauccucaacaagcaguccugcuccaucuccaacaucgagaccgucaucgaguuccagcagaagaacaaccgccuccucgagaucacccgcgaguucuccgucaacgccggcgucaccacccccgucuccaccuacaugcucaccaacuccgagcuccucucccucaucaacgacaugcccaucaccaacgaccagaagaagcucauguccaacaacguccagaucguccgccagcaguccuacuccaucaugugcaucaucaaggaggagguccucgccuacgucguccagcucccccucuacggcgucaucgacacccccugcuggaagcuccacaccuccccccucugcaccaccaacaccaaggagggcuccaacaucugccucacccgcaccgaccgcggcugguacugcgacaacgccggcuccgucuccuucuucccccaggccgagaccugcaagguccaguccaaccgcgucuucugcgacaccaugaacucccucacccuccccuccgaggucaaccucugcaacaucgacaucuucaaccccaaguacgacugcaagaucaugaccuccaagaccgacgucuccuccuccgucaucaccucccucggcgccaucgucuccugcuacggcaagaccaagugcaccgccuccaacaagaaccgcggcaucaucaagaccuucuccaacggcugcgacuacgucuccaacaagggcgucgacaccgucuccgucggcaacacccucuacuacgucaacaagcaggagggcaagucccucuacgucaagggcgagcccaucaucaacuucuacgacccccucgucuuccccuccgacgaguucgacgccuccaucucccaggucaacgagaagaucaaccagucccucgccuucauccgcaaguccgacgagcuccuccacaacgucaacgucggcaaguccaccaccaacaucaugaucaccaccaucaucaucgucaucaucgucauccuccuccuccucaucgccgucggccucuuccucuacugcaaggcccgcuccacccccgucacccucuccaaggaccagcucuccggcaucaacaacaucgccuucuccaacugaggacuagucccuguucccagagcccacuuuuuuuucuuuuuuugaaauaaaauagccugucuuucagaucuaaaaaaaaaaaaaaaaaaaaaaaaaaaaaaaaaaaaaaaaaaaaaaaaaaaaaaaaaaaaaaaaugcaucccccccccccccccccccccccccccccccaaaggcucuuuucagagccaccagaauu

SEQ ID NO: 12508 - RNA, 1993 nt, Artificial Sequence
  mRNA product Design a-5 comprising derived and/or modified sequence from HRSV(Memphis-37)__AIY60640.1__F0_DSCav1 (opt3)
gggagacuuucccauucuguagcagaauuugguguugccuguggucuuggucccgcggagaagcuuaccauggagcugcccauccucaagaccaacgccauuacaacuauacuugcugcagugacgcugugcuucgccagcucccagaauaucaccgaagaguuuuaccaaucuacauguucagcggucaguaaaggcuauuugagcgcuuuaagaacugggugguacaccuccguuauuacaaucgaacugucuaacauuaaggagaauaaaugcaacggaaccgacgccaaggugaaacuaaucaagcaggaacucgauaaguauaaaaaugcaguaacugagcugcagcuucugaugcagucgaccccugccgcuaacaauagggcacggcgcgaguugccacgauucaugaacuacacacucaauaacacgaagaauaacaaugugacucugagcaaaaagcguaaaagaagguuucuggguuuccucuuaggcgucgggucagccauagcuaguggaaucgccguguguaagguucugcaccuugaaggcgaggugaacaagauuaaaaaugcguugcuguccaccaacaaggcagucgugucucuaagcaacgguguauccguucucacauuuaaagugcuggaccuuaagaauuauaucgauaaacaacuguugccgauucucaacaagcagucaugcaguaucagcaauauagaaacugucauugaguuccagcagaaaaacaaucggcuguuagagaucacccgcgaauuuucugugaacgccggggugacaacccccgucuccacguacaugcugacuaauucagagcuccuuagccugauuaacgacaugccuaucacaaaugaucaaaagaaguugaugaguaacaauguucagaucgugagacagcagucuuauuccauuauguguauaaucaaagaagagguacuagcuuacgugguccaacugccacucuacggagugauugacacccccugcuggaagcugcauacuagcccucuuuguacaaccaacacgaaagaaggcucgaauaucugccugaccaggacagaucggggcugguauugugacaacgccgggucuguuuccuucuuuccacaggcagagacuugcaaggugcagucaaaucgcgucuucugugauaccaugaacaguuugacacuccccagcgaggugaaccugugcaauauagacauuuuuaacccuaaauacgauugcaagaucaugacuuccaagaccgacguaucuagcucaguuaucacaaguuuaggagcuauuguguccuguuaugguaaaaccaagugcacugccagcaauaaaaaccgaggcaucauuaagacguucucuaaugggugugauuacgucucaaacaaaggaguggacacagucagugugggcaauacccuguauuacguuaacaagcaagaagguaagagccuauaugugaaaggggagccaauaaucaauuuuuacgacccgcucguauuccccuccgaugaguucgacgcgucuauuucgcaggucaacgaaaagaucaaucagagccuggccuuuaucagaaaauccgaugaacuuuugcacaacgugaauguuggaaagucaacuaccaacauuaugauaacaaccaucauuaucgugauuaucgucauacugcuccugcuuaucgcagugggccuguucuuguacugcaaagcuaggaguacuccuguaacacucucuaaggaccagcugagcggcauuaauaacaucgccuuuuccaacugaggacuagucccuguucccagagcccacuuuuuuuucuuuuuuugaaauaaaauagccugucuuucagaucuaaaaaaaaaaaaaaaaaaaaaaaaaaaaaaaaaaaaaaaaaaaaaaaaaaaaaaaaaaaaaaaaugcaucccccccccccccccccccccccccccccccaaaggcucuuuucagagccaccagaauu

SEQ ID NO: 12509 - RNA, 1993 nt, Artificial Sequence
  mRNA product Design a-5 comprising derived and/or modified sequence from HRSV(Memphis-37)__AIY60640.1__F0_DSCav1 (opt4)
gggagacuuucccauucuguagcagaauuugguguugccuguggucuuggucccgcggagaagcuuaccauggagcugcccauccugaagaccaacgccaucaccaccauccuggccgccgugacccugugcuucgccagcagccagaacaucaccgaggaguucuaccagagcaccugcagcgccgugagcaagggcuaccugagcgcccugagaaccggcugguacaccagcgugaucaccaucgagcugagcaacaucaaggagaacaagugcaacggcaccgacgccaaggugaagcugaucaagcaggagcuggacaaguacaagaacgccgugaccgagcugcagcugcugaugcagagcacccccgccgccaacaacagagccagaagagagcugcccagauucaugaacuacacccugaacaacaccaagaacaacaacgugacccugagcaagaagagaaagagaagauuccugggcuuccugcugggcgugggcagcgccaucgccagcggcaucgccgugugcaaggugcugcaccuggagggcgaggugaacaagaucaagaacgcccugcugagcaccaacaaggccguggugagccugagcaacggcgugagcgugcugaccuucaaggugcuggaccugaagaacuacaucgacaagcagcugcugcccauccugaacaagcagagcugcagcaucagcaacaucgagaccgugaucgaguuccagcagaagaacaacagacugcuggagaucaccagagaguucagcgugaacgccggcgugaccacccccgugagcaccuacaugcugaccaacagcgagcugcugagccugaucaacgacaugcccaucaccaacgaccagaagaagcugaugagcaacaacgugcagaucgugagacagcagagcuacagcaucaugugcaucaucaaggaggaggugcuggccuacguggugcagcugccccuguacggcgugaucgacacccccugcuggaagcugcacaccagcccccugugcaccaccaacaccaaggagggcagcaacaucugccugaccagaaccgacagaggcugguacugcgacaacgccggcagcgugagcuucuucccccaggccgagaccugcaaggugcagagcaacagaguguucugcgacaccaugaacagccugacccugcccagcgaggugaaccugugcaacaucgacaucuucaaccccaaguacgacugcaagaucaugaccagcaagaccgacgugagcagcagcgugaucaccagccugggcgccaucgugagcugcuacggcaagaccaagugcaccgccagcaacaagaacagaggcaucaucaagaccuucagcaacggcugcgacuacgugagcaacaagggcguggacaccgugagcgugggcaacacccuguacuacgugaacaagcaggagggcaagagccuguacgugaagggcgagcccaucaucaacuucuacgacccccugguguuccccagcgacgaguucgacgccagcaucagccaggugaacgagaagaucaaccagagccuggccuucaucagaaagagcgacgagcugcugcacaacgugaacgugggcaagagcaccaccaacaucaugaucaccaccaucaucaucgugaucaucgugauccugcugcugcugaucgccgugggccuguuccuguacugcaaggccagaagcacccccgugacccugagcaaggaccagcugagcggcaucaacaacaucgccuucagcaacugaggacuagucccuguucccagagcccacuuuuuuuucuuuuuuugaaauaaaauagccugucuuucagaucuaaaaaaaaaaaaaaaaaaaaaaaaaaaaaaaaaaaaaaaaaaaaaaaaaaaaaaaaaaaaaaaaugcaucccccccccccccccccccccccccccccccaaaggcucuuuucagagccaccagaauu

SEQ ID NO: 12510 - RNA, 1993 nt, Artificial Sequence
  mRNA product Design a-5 comprising derived and/or modified sequence from HRSV(Memphis-37)__AIY60640.1__F0_DSCav1 (opt5)
gggagacuuucccauucuguagcagaauuugguguugccuguggucuuggucccgcggagaagcuuaccauggagcugcccauccucaagaccaacgccauuacaacgauccuggcugccgugacccuuugcuucgcgagcucccagaauauuacagaagaguuuuaccaaucuaccuguagcgcugucuccaaaggcuaucugucugcccucagaacagggugguacaccagcguuaucacaauugaacuguccaacaucaaggagaauaaaugcaacggaaccgacgccaaggugaaacuuaucaagcaggaacuggauaaguauaaaaaugcugugacggagcuccagcugcugaugcagucuaccccugccgcuaacaaucgggcccgcagagagcucccgcgguucaugaacuacacacugaauaacaccaagaauaacaaugucacacuuagcaaaaagcgcaaaagacgguuucugggcuuccuccugggggugggauccgcgauugccagcggcaucgcuguuuguaaggugcuucaccuggaaggggaggucaacaagauuaaaaaugcccuccugucuaccaacaaggcugugguuucccugagcaacggagugucuguccucacguuuaaagugcuggaccuuaagaauuauaucgauaaacaacugcuccccauucugaacaagcaguccugcagcaucucuaauauugaaacagugaucgaguuccagcagaaaaacaaucgccuucuggagaucaccagagaauuuuccgucaacgccggcguuacaaccccugugagcaccuacaugcucacaaauuccgagcugcugucucucauuaacgacaugcccaucacgaaugaucaaaagaagcugaugagcaacaaugugcagauuguccggcagcaguccuauagcaucauguguauuaucaaagaagaggugcuugcguacguugugcaacugccucucuacggcgucaucgacacccccugcuggaagcugcauacaucuccucuuuguaccacaaacaccaaagaaggguccaauauuugccugacgcgcacagauagaggaugguauugugacaacgccggcagcgugucuuucuuuccgcaggcugagaccugcaagguucagagcaaucggguguucugugauaccaugaacucccucacacugcccucugaggucaaccugugcaauaucgacauuuuuaacccuaaauacgauugcaagaucaugaccagcaagacagacguguccagcucugucauuacgucccucggggccaucgugagcuguuauggaaaaaccaagugcacagcuucuaauaaaaaccgcggcaucauuaagaccuucuccaaugggugugauuacguuagcaacaaaggaguggacacagucuccgugggcaauacccuguauuacguuaacaagcaagaaggcaagucucuuuaugugaaaggggagcccaucauuaauuuuuacgacccucuggucuuccccagcgaugaguucgacgccuccaucucucaggugaacgaaaagauuaaucagagccucgccuuuaucagaaaauccgaugaacugcugcacaacgugaauguuggaaagagcacgaccaacauuaugaucacaaccaucauuaucgucauuaucgugauucuucuccugcugaucgcugugggccucuuccuguacugcaaagcgcggucuacaccggucacccuuuccaaggaccagcugagcgggaucaauaacauugccuuuucuaacugaggacuagucccuguucccagagcccacuuuuuuuucuuuuuuugaaauaaaauagccugucuuucagaucuaaaaaaaaaaaaaaaaaaaaaaaaaaaaaaaaaaaaaaaaaaaaaaaaaaaaaaaaaaaaaaaaugcaucccccccccccccccccccccccccccccccaaaggcucuuuucagagccaccagaauu

SEQ ID NO: 12511 - RNA, 1993 nt, Artificial Sequence
  mRNA product Design a-5 comprising derived and/or modified sequence from HRSV(Memphis-37)__AIY60640.1__F0_DSCav1 (opt6)
gggagacuuucccauucuguagcagaauuugguguugccuguggucuuggucccgcggagaagcuuaccauggaacucccaauccucaaaaccaaugccauaacaaccauacucgcugcaguaaccuuauguuucgcaaguagccaaaacauaaccgaagaauuuuaucaauccacaugcuccgcaguuucuaaaggauaucuaucagcauuaagaacuggaugguacacaucuguaauaacuauagaacuaagcaauauaaaagaaaacaaauguaacggaacugacgcuaaaguaaaacuuauaaaacaagaacuagauaaauacaaaaacgccguuaccgaacuacaacuauuaaugcaaucaacaccagccgcaaauaacagagcaagacgcgaauuaccaagauucaugaauuacacacuaaacaauacaaaaaauaacaauguaacacuaucaaaaaaaagaaaacgacgauucuuaggcuuccuacuaggagucggcucagcaauagcuuccggaauagccgucuguaaaguccuacaccuugaaggcgaaguaaacaaaaucaaaaacgcacuauuaucaacaaacaaagcagucguaucuuuauccaacggagucucaguccuaacauucaaaguacucgauuuaaaaaacuacaucgauaaacaacuccuucccauucuaaacaaacaauccugcucaauauccaacaucgaaacagucauagaauuucaacaaaaaaacaaccgccugcuagaaauaacaagagaauuuuccguaaaugccggcgucaccacaccaguaucaacauacaugcuaacaaacuccgaacuacucucccuaauaaacgauaugccaaucaccaacgaccaaaaaaaacuaaugucaaauaacguucaaauagucagacaacaaucauacagcauaaugugcauaauaaaagaagaagucuuagccuacguuguacaacucccauuauacggaguuaucgauacaccaugcuggaaauuacacacaucacccuuaugcaccacaaacacaaaagaaggauccaauauuugucuaacacgaacagacagaggaugguacugugauaacgcaggaucagugucauucuuuccacaagcagaaacauguaaaguucaaucuaacagaguauucugcgacaccaugaacucccuaaccuuacccucagaaguaaaucuaugcaacauagauaucuuuaacccaaaauacgacugcaaaaucaugacaucaaaaacugacguuucuucauccguuauaacuucccucggcgcuauaguguccugcuacggaaaaacuaaaugcacagcauccaacaaaaauagaggaauaauaaaaacauuuuccaacggcugcgacuauguuucaaacaaaggaguagauaccguaucagucggcaauacauuauauuauguuaacaaacaagaaggaaaaucccuauacguaaaaggagaaccuauaaucaacuucuacgacccacucguauuccccucagacgaauuugacgcaucuauaucucaaguaaaugaaaaaauaaaccaaucacucgcauuuauccgcaaaucugacgaauuacuccauaacgucaacgucggcaaaucaaccaccaacauaaugauaacaacaauuauaauaguaauaauugucauacuacuacuccuaauagcaguaggucuauuccuauacugcaaagcaagauccacccccguaacccuuuccaaagaucaacucucaggaauaaauaacauagccuuuucaaacuaaggacuagucccuguucccagagcccacuuuuuuuucuuuuuuugaaauaaaauagccugucuuucagaucuaaaaaaaaaaaaaaaaaaaaaaaaaaaaaaaaaaaaaaaaaaaaaaaaaaaaaaaaaaaaaaaaugcaucccccccccccccccccccccccccccccccaaaggcucuuuucagagccaccagaauu

SEQ ID NO: 12512 - RNA, 1993 nt, Artificial Sequence
  mRNA product Design a-5 comprising derived and/or modified sequence from HRSV(Memphis-37)__AIY60640.1__F0_DSCav1 (opt11)
gggagacuuucccauucuguagcagaauuugguguugccuguggucuuggucccgcggagaagcuuaccauggaacuccccauacucaagacuaaugccaucaccaccauccucgccgccgugacccucugcuucgcaucgucccaaaacauaacagaagaguucuaccaaagcacaugcuccgcagucuccaaaggauaccucuccgcacuacguaccggcugguacaccagcgucaucaccaucgaacuuuccaacaucaaagagaacaaaugcaacggcaccgacgccaaaguaaaacucauaaaacaagagcuagacaaauacaaaaacgccgucacagaacuccaacuacugaugcaauccacaccggccgccaacaaccgcgcucgacgugaacucccacgcuucaugaacuacacucuuaacaacaccaaaaauaacaacgucacccuauccaaaaagcgaaagcgcagauuccucggcuuccuacuuggcgucggcucggcgauagccucuggaaucgccguuugcaagguccuccaccuagaaggcgaaguaaacaaaaucaaaaacgcacuccuaagcaccaacaaagccgucgucucacuuuccaacggcgucucaguccucacauucaaaguucucgaccuaaagaacuacaucgacaagcaacuacuacccauacucaauaaacaauccugcuccaucagcaacaucgagacagucaucgaauuucaacaaaagaacaaccgccuccucgaaauuacacgcgaguucucagucaacgccggagucaccaccccagucucaacauacaugcucaccaacagcgaacuccugucucuaaucaacgacaugcccaucacuaacgaccagaagaaacucauguccaacaacguccaaaucgugcgacaacaaucauacucuaucaugugcaucaucaaagaagaaguccucgcauacgucguccagcucccacucuacggcguaaucgacacacccugcuggaaacuccacacaucaccccuaugcaccaccaacacaaaagaaggcuccaacaucugccuaacccgaaccgacagagguugguauugcgacaacgccggcucagucucauucuucccacaagccgaaaccuguaaaguccaaucaaaccgcgucuucugcgauaccaugaacucucucacacuccccuccgaagucaaucucugcaacauagacaucuucaauccaaaguacgacugcaaaauaaugaccucgaaaaccgacguaagcuccagcgucaucaccuccuuaggcgcaaucguauccugcuacggcaaaaccaaaugcaccgccucaaacaaaaacagaggcaucaucaaaacguucucgaacggaugcgacuacguuuccaauaaaggcguagauaccgucuccgucggcaacacacucuauuacgucaacaaacaagaaggcaaaucccucuacgucaaaggugaaccuaucaucaacuucuacgacccccucgucuuccccagcgacgaguucgaugccucaaucagccaagucaacgagaaaaucaaccaaucacuggcuuucauacgcaaauccgacgaacuccuccacaacgugaacgucggcaaauccacaaccaacaucaugauaaccacaauaaucaucgucauaaucguaauccuacuccuccuuauugccguaggacuauuccuauacugcaaagcccgauccacccccgucacccucucaaaagaccaacucuccggcaucaacaauauagccuucucuaacuaaggacuagucccuguucccagagcccacuuuuuuuucuuuuuuugaaauaaaauagccugucuuucagaucuaaaaaaaaaaaaaaaaaaaaaaaaaaaaaaaaaaaaaaaaaaaaaaaaaaaaaaaaaaaaaaaaugcaucccccccccccccccccccccccccccccccaaaggcucuuuucagagccaccagaauu

SEQ ID NO: 12513 - RNA, 2174 nt, Artificial Sequence
  mRNA product Design b-1 comprising derived and/or modified sequence from HRSV(Memphis-37)__AIY60640.1__F0_DSCav1 (opt1)
gggagacggagacggccugcaggaccugcucucucagcccucagccgaggccuacgccgagccgagugcgcagccgacgaccgggaggagccgcagccuucaacucugagguacugugauccgcgcugcccgccgggccgccccaguccgcugcugcggcaccuccuucccucgcgcccucuucgcucgccagcgccuucccugugagccugcgucaccgcggccgccaagcuuaccauggagcugcccauccucaagaccaacgccaucaccacgauccuggccgcggugacccugugcuucgccagcucccagaacaucaccgaggaguucuaccagagcacgugcuccgccgucagcaagggcuaccucuccgcccugcgcaccgggugguacaccagcgugaucaccaucgagcuguccaacaucaaggagaacaagugcaacggcaccgacgccaaggugaagcucaucaagcaggagcuggacaaguacaagaacgcggucacggagcugcagcuccugaugcagagcaccccggccgccaacaaccgggcccgccgggagcugccccgcuucaugaacuacacccucaacaacaccaagaacaacaacgugacgcuguccaagaagcggaagcgccgguuccugggguuccuccugggcguggggagcgcgaucgccuccggcaucgccgucugcaaggugcugcaccucgagggcgaggugaacaagaucaagaacgcccugcuguccaccaacaaggccgucgugagccucuccaacggggugagcguccugaccuucaaggugcuggaccucaagaacuacaucgacaagcagcugcugcccauccugaacaagcagagcugcuccaucagcaacaucgagaccgucaucgaguuccagcagaagaacaaccgccuccuggagaucacgcgggaguucagcgugaacgcgggcgugaccacccccgucuccaccuacaugcugacgaacagcgagcuccugucccugaucaacgacaugccgaucaccaacgaccagaagaagcucaugagcaacaacgugcagaucgugcgccagcaguccuacagcaucaugugcaucaucaaggaggagguccuggccuacguggugcagcugccccucuacggggucaucgacacccccugcuggaagcugcacaccagcccccugugcacgaccaacaccaaggagggcuccaacaucugccucacccggacggaccgcgggugguacugcgacaacgccggcagcguguccuucuucccgcaggccgagaccugcaagguccagagcaaccggguguucugcgacaccaugaacucccugacccugcccagcgaggugaaccucugcaacaucgacaucuucaaccccaaguacgacugcaagaucaugacguccaagaccgacgucagcuccagcgugaucaccucccugggcgccaucgugagcugcuacgggaagaccaagugcacggcgagcaacaagaaccgcggcaucaucaagaccuucuccaacgggugcgacuacgucagcaacaagggcguggacaccguguccgucggcaacacccuguacuacgugaacaagcaggagggcaagagccucuacgugaagggggagcccaucaucaacuucuacgacccgcuggucuuccccuccgacgaguucgacgccagcaucucccaggugaacgagaagaucaaccagagccuggccuucauccggaaguccgacgagcuccugcacaacgugaacgucggcaagagcaccacgaacaucaugaucaccaccaucaucaucgugaucaucgugauccugcugcuccugaucgccgucgggcuguuccucuacugcaaggcccgcuccacccccgugacgcugagcaaggaccagcuguccgggaucaacaacaucgcguucagcaacugaggacuaguguccaccugucccuccugggcugcuggauugucucguuuuccugccaaauaaacaggaucagcgcuuuacagaucuaaaaaaaaaaaaaaaaaaaaaaaaaaaaaaaaaaaaaaaaaaaaaaaaaaaaaaaaaaaaaaaaugcaucccccccccccccccccccccccccccccccaaaggcucuuuucagagccaccagaauu

SEQ ID NO: 12514 - RNA, 2174 nt, Artificial Sequence
  mRNA product Design b-1 comprising derived and/or modified sequence from HRSV(Memphis-37)__AIY60640.1__F0_DSCav1 (opt1)
gggagacggagacggccugcaggaccugcucucucagcccucagccgaggccuacgccgagccgagugcgcagccgacgaccgggaggagccgcagccuucaacucugagguacugugauccgcgcugcccgccgggccgccccaguccgcugcugcggcaccuccuucccucgcgcccucuucgcucgccagcgccuucccugugagccugcgucaccgcggccgccaagcuuaccauggagcugcccauccucaagaccaacgccaucaccacgauccuggccgcggugacccugugcuucgccagcucccagaacaucaccgaggaguucuaccagagcacgugcuccgccgucagcaagggcuaccucuccgcccugcgcaccgggugguacaccagcgugaucaccaucgagcuguccaacaucaaggagaacaagugcaacggcaccgacgccaaggugaagcucaucaagcaggagcuggacaaguacaagaacgcggucacggagcugcagcuccugaugcagagcaccccggccgccaacaaccgggcccgccgggagcugccccgcuucaugaacuacacccucaacaacaccaagaacaacaacgugacgcuguccaagaagcggaagcgccgguuccugggguuccuccugggcguggggagcgcgaucgccuccggcaucgccgucugcaaggugcugcaccucgagggcgaggugaacaagaucaagaacgcccugcugagcaccaacaaggccgucgugucccucagcaacgggguguccguccugaccuucaaggugcuggaccucaagaacuacaucgacaagcagcugcugcccauccucaacaagcagagcugcuccaucagcaacaucgagaccgugaucgaguuccagcagaagaacaaccgccugcuggagaucacgcgggaguucuccgucaacgcgggcgugaccacccccgugagcaccuacaugcucacgaacagcgagcugcugucccucaucaacgacaugccgaucaccaacgaccagaagaagcugaugagcaacaacguccagaucgugcgccagcaguccuacagcaucaugugcaucaucaaggaggaggugcuggccuacgucgugcagcucccccuguacggggugaucgacacccccugcuggaagcugcacaccagcccccucugcacgaccaacaccaaggagggcagcaacaucugccugacccggacggaccgcgggugguacugcgacaacgccggcuccgucagcuucuucccgcaggccgagaccugcaaggugcaguccaaccgggucuucugcgacaccaugaacagccugacccuccccuccgaggugaaccugugcaacaucgacaucuucaaccccaaguacgacugcaagaucaugacgagcaagaccgacguguccagcuccgucaucaccagccugggcgccaucguguccugcuacgggaagaccaagugcacggcgagcaacaagaaccgcggcaucaucaagaccuucuccaacgggugcgacuacgugagcaacaagggcgucgacaccgugagcgugggcaacacccucuacuacgucaacaagcaggaggggaagucccuguacgugaagggcgagcccaucaucaacuucuacgacccgcugguguuccccagcgacgaguucgacgccuccaucagccaggucaacgagaagaucaaccagucccucgccuucauccggaaguccgacgagcugcugcacaacgugaacguggggaaguccaccacgaacaucaugaucaccaccaucaucaucgucaucaucgugauccugcuccugcugaucgccgugggccucuuccuguacugcaaggcccgcagcacccccgucacgcuguccaaggaccagcucagcgggaucaacaacaucgcguucuccaacugaggacuaguguccaccugucccuccugggcugcuggauugucucguuuuccugccaaauaaacaggaucagcgcuuuacagaucuaaaaaaaaaaaaaaaaaaaaaaaaaaaaaaaaaaaaaaaaaaaaaaaaaaaaaaaaaaaaaaaaugcaucccccccccccccccccccccccccccccccaaaggcucuuuucagagccaccagaauu

SEQ ID NO: 12515 - RNA, 2174 nt, Artificial Sequence
  mRNA product Design b-1 comprising derived and/or modified sequence from HRSV(Memphis-37)__AIY60640.1__F0_DSCav1 (opt2)
gggagacggagacggccugcaggaccugcucucucagcccucagccgaggccuacgccgagccgagugcgcagccgacgaccgggaggagccgcagccuucaacucugagguacugugauccgcgcugcccgccgggccgccccaguccgcugcugcggcaccuccuucccucgcgcccucuucgcucgccagcgccuucccugugagccugcgucaccgcggccgccaagcuuaccauggagcuccccauccucaagaccaacgccaucaccaccauccucgccgccgucacccucugcuucgccuccucccagaacaucaccgaggaguucuaccaguccaccugcuccgccgucuccaagggcuaccucuccgcccuccgcaccggcugguacaccuccgucaucaccaucgagcucuccaacaucaaggagaacaagugcaacggcaccgacgccaaggucaagcucaucaagcaggagcucgacaaguacaagaacgccgucaccgagcuccagcuccucaugcaguccacccccgccgccaacaaccgcgcccgccgcgagcucccccgcuucaugaacuacacccucaacaacaccaagaacaacaacgucacccucuccaagaagcgcaagcgccgcuuccucggcuuccuccucggcgucggcuccgccaucgccuccggcaucgccgucugcaagguccuccaccucgagggcgaggucaacaagaucaagaacgcccuccucuccaccaacaaggccgucgucucccucuccaacggcgucuccguccucaccuucaagguccucgaccucaagaacuacaucgacaagcagcuccuccccauccucaacaagcaguccugcuccaucuccaacaucgagaccgucaucgaguuccagcagaagaacaaccgccuccucgagaucacccgcgaguucuccgucaacgccggcgucaccacccccgucuccaccuacaugcucaccaacuccgagcuccucucccucaucaacgacaugcccaucaccaacgaccagaagaagcucauguccaacaacguccagaucguccgccagcaguccuacuccaucaugugcaucaucaaggaggagguccucgccuacgucguccagcucccccucuacggcgucaucgacacccccugcuggaagcuccacaccuccccccucugcaccaccaacaccaaggagggcuccaacaucugccucacccgcaccgaccgcggcugguacugcgacaacgccggcuccgucuccuucuucccccaggccgagaccugcaagguccaguccaaccgcgucuucugcgacaccaugaacucccucacccuccccuccgaggucaaccucugcaacaucgacaucuucaaccccaaguacgacugcaagaucaugaccuccaagaccgacgucuccuccuccgucaucaccucccucggcgccaucgucuccugcuacggcaagaccaagugcaccgccuccaacaagaaccgcggcaucaucaagaccuucuccaacggcugcgacuacgucuccaacaagggcgucgacaccgucuccgucggcaacacccucuacuacgucaacaagcaggagggcaagucccucuacgucaagggcgagcccaucaucaacuucuacgacccccucgucuuccccuccgacgaguucgacgccuccaucucccaggucaacgagaagaucaaccagucccucgccuucauccgcaaguccgacgagcuccuccacaacgucaacgucggcaaguccaccaccaacaucaugaucaccaccaucaucaucgucaucaucgucauccuccuccuccucaucgccgucggccucuuccucuacugcaaggcccgcuccacccccgucacccucuccaaggaccagcucuccggcaucaacaacaucgccuucuccaacugaggacuaguguccaccugucccuccugggcugcuggauugucucguuuuccugccaaauaaacaggaucagcgcuuuacagaucuaaaaaaaaaaaaaaaaaaaaaaaaaaaaaaaaaaaaaaaaaaaaaaaaaaaaaaaaaaaaaaaaugcaucccccccccccccccccccccccccccccccaaaggcucuuuucagagccaccagaauu

SEQ ID NO: 12516 - RNA, 2174 nt, Artificial Sequence
  mRNA product Design b-1 comprising derived and/or modified sequence from HRSV(Memphis-37)__AIY60640.1__F0_DSCav1 (opt3)
gggagacggagacggccugcaggaccugcucucucagcccucagccgaggccuacgccgagccgagugcgcagccgacgaccgggaggagccgcagccuucaacucugagguacugugauccgcgcugcccgccgggccgccccaguccgcugcugcggcaccuccuucccucgcgcccucuucgcucgccagcgccuucccugugagccugcgucaccgcggccgccaagcuuaccauggagcugcccauccucaagaccaacgccauuacaacuauacuugcugcagugacgcugugcuucgccagcucccagaauaucaccgaagaguuuuaccaaucuacauguucagcggucaguaaaggcuauuugagcgcuuuaagaacugggugguacaccuccguuauuacaaucgaacugucuaacauuaaggagaauaaaugcaacggaaccgacgccaaggugaaacuaaucaagcaggaacucgauaaguauaaaaaugcaguaacugagcugcagcuucugaugcagucgaccccugccgcuaacaauagggcacggcgcgaguugccacgauucaugaacuacacacucaauaacacgaagaauaacaaugugacucugagcaaaaagcguaaaagaagguuucuggguuuccucuuaggcgucgggucagccauagcuaguggaaucgccguguguaagguucugcaccuugaaggcgaggugaacaagauuaaaaaugcguugcuguccaccaacaaggcagucgugucucuaagcaacgguguauccguucucacauuuaaagugcuggaccuuaagaauuauaucgauaaacaacuguugccgauucucaacaagcagucaugcaguaucagcaauauagaaacugucauugaguuccagcagaaaaacaaucggcuguuagagaucacccgcgaauuuucugugaacgccggggugacaacccccgucuccacguacaugcugacuaauucagagcuccuuagccugauuaacgacaugccuaucacaaaugaucaaaagaaguugaugaguaacaauguucagaucgugagacagcagucuuauuccauuauguguauaaucaaagaagagguacuagcuuacgugguccaacugccacucuacggagugauugacacccccugcuggaagcugcauacuagcccucuuuguacaaccaacacgaaagaaggcucgaauaucugccugaccaggacagaucggggcugguauugugacaacgccgggucuguuuccuucuuuccacaggcagagacuugcaaggugcagucaaaucgcgucuucugugauaccaugaacaguuugacacuccccagcgaggugaaccugugcaauauagacauuuuuaacccuaaauacgauugcaagaucaugacuuccaagaccgacguaucuagcucaguuaucacaaguuuaggagcuauuguguccuguuaugguaaaaccaagugcacugccagcaauaaaaaccgaggcaucauuaagacguucucuaaugggugugauuacgucucaaacaaaggaguggacacagucagugugggcaauacccuguauuacguuaacaagcaagaagguaagagccuauaugugaaaggggagccaauaaucaauuuuuacgacccgcucguauuccccuccgaugaguucgacgcgucuauuucgcaggucaacgaaaagaucaaucagagccuggccuuuaucagaaaauccgaugaacuuuugcacaacgugaauguuggaaagucaacuaccaacauuaugauaacaaccaucauuaucgugauuaucgucauacugcuccugcuuaucgcagugggccuguucuuguacugcaaagcuaggaguacuccuguaacacucucuaaggaccagcugagcggcauuaauaacaucgccuuuuccaacugaggacuaguguccaccugucccuccugggcugcuggauugucucguuuuccugccaaauaaacaggaucagcgcuuuacagaucuaaaaaaaaaaaaaaaaaaaaaaaaaaaaaaaaaaaaaaaaaaaaaaaaaaaaaaaaaaaaaaaaugcaucccccccccccccccccccccccccccccccaaaggcucuuuucagagccaccagaauu

SEQ ID NO: 12517 - RNA, 2174 nt, Artificial Sequence
  mRNA product Design b-1 comprising derived and/or modified sequence from HRSV(Memphis-37)__AIY60640.1__F0_DSCav1 (opt4)
gggagacggagacggccugcaggaccugcucucucagcccucagccgaggccuacgccgagccgagugcgcagccgacgaccgggaggagccgcagccuucaacucugagguacugugauccgcgcugcccgccgggccgccccaguccgcugcugcggcaccuccuucccucgcgcccucuucgcucgccagcgccuucccugugagccugcgucaccgcggccgccaagcuuaccauggagcugcccauccugaagaccaacgccaucaccaccauccuggccgccgugacccugugcuucgccagcagccagaacaucaccgaggaguucuaccagagcaccugcagcgccgugagcaagggcuaccugagcgcccugagaaccggcugguacaccagcgugaucaccaucgagcugagcaacaucaaggagaacaagugcaacggcaccgacgccaaggugaagcugaucaagcaggagcuggacaaguacaagaacgccgugaccgagcugcagcugcugaugcagagcacccccgccgccaacaacagagccagaagagagcugcccagauucaugaacuacacccugaacaacaccaagaacaacaacgugacccugagcaagaagagaaagagaagauuccugggcuuccugcugggcgugggcagcgccaucgccagcggcaucgccgugugcaaggugcugcaccuggagggcgaggugaacaagaucaagaacgcccugcugagcaccaacaaggccguggugagccugagcaacggcgugagcgugcugaccuucaaggugcuggaccugaagaacuacaucgacaagcagcugcugcccauccugaacaagcagagcugcagcaucagcaacaucgagaccgugaucgaguuccagcagaagaacaacagacugcuggagaucaccagagaguucagcgugaacgccggcgugaccacccccgugagcaccuacaugcugaccaacagcgagcugcugagccugaucaacgacaugcccaucaccaacgaccagaagaagcugaugagcaacaacgugcagaucgugagacagcagagcuacagcaucaugugcaucaucaaggaggaggugcuggccuacguggugcagcugccccuguacggcgugaucgacacccccugcuggaagcugcacaccagcccccugugcaccaccaacaccaaggagggcagcaacaucugccugaccagaaccgacagaggcugguacugcgacaacgccggcagcgugagcuucuucccccaggccgagaccugcaaggugcagagcaacagaguguucugcgacaccaugaacagccugacccugcccagcgaggugaaccugugcaacaucgacaucuucaaccccaaguacgacugcaagaucaugaccagcaagaccgacgugagcagcagcgugaucaccagccugggcgccaucgugagcugcuacggcaagaccaagugcaccgccagcaacaagaacagaggcaucaucaagaccuucagcaacggcugcgacuacgugagcaacaagggcguggacaccgugagcgugggcaacacccuguacuacgugaacaagcaggagggcaagagccuguacgugaagggcgagcccaucaucaacuucuacgacccccugguguuccccagcgacgaguucgacgccagcaucagccaggugaacgagaagaucaaccagagccuggccuucaucagaaagagcgacgagcugcugcacaacgugaacgugggcaagagcaccaccaacaucaugaucaccaccaucaucaucgugaucaucgugauccugcugcugcugaucgccgugggccuguuccuguacugcaaggccagaagcacccccgugacccugagcaaggaccagcugagcggcaucaacaacaucgccuucagcaacugaggacuaguguccaccugucccuccugggcugcuggauugucucguuuuccugccaaauaaacaggaucagcgcuuuacagaucuaaaaaaaaaaaaaaaaaaaaaaaaaaaaaaaaaaaaaaaaaaaaaaaaaaaaaaaaaaaaaaaaugcaucccccccccccccccccccccccccccccccaaaggcucuuuucagagccaccagaauu

SEQ ID NO: 12518 - RNA, 2174 nt, Artificial Sequence
  mRNA product Design b-1 comprising derived and/or modified sequence from HRSV(Memphis-37)__AIY60640.1__F0_DSCav1 (opt5)
gggagacggagacggccugcaggaccugcucucucagcccucagccgaggccuacgccgagccgagugcgcagccgacgaccgggaggagccgcagccuucaacucugagguacugugauccgcgcugcccgccgggccgccccaguccgcugcugcggcaccuccuucccucgcgcccucuucgcucgccagcgccuucccugugagccugcgucaccgcggccgccaagcuuaccauggagcugcccauccucaagaccaacgccauuacaacgauccuggcugccgugacccuuugcuucgcgagcucccagaauauuacagaagaguuuuaccaaucuaccuguagcgcugucuccaaaggcuaucugucugcccucagaacagggugguacaccagcguuaucacaauugaacuguccaacaucaaggagaauaaaugcaacggaaccgacgccaaggugaaacuuaucaagcaggaacuggauaaguauaaaaaugcugugacggagcuccagcugcugaugcagucuaccccugccgcuaacaaucgggcccgcagagagcucccgcgguucaugaacuacacacugaauaacaccaagaauaacaaugucacacuuagcaaaaagcgcaaaagacgguuucugggcuuccuccugggggugggauccgcgauugccagcggcaucgcuguuuguaaggugcuucaccuggaaggggaggucaacaagauuaaaaaugcccuccugucuaccaacaaggcugugguuucccugagcaacggagugucuguccucacguuuaaagugcuggaccuuaagaauuauaucgauaaacaacugcuccccauucugaacaagcaguccugcagcaucucuaauauugaaacagugaucgaguuccagcagaaaaacaaucgccuucuggagaucaccagagaauuuuccgucaacgccggcguuacaaccccugugagcaccuacaugcucacaaauuccgagcugcugucucucauuaacgacaugcccaucacgaaugaucaaaagaagcugaugagcaacaaugugcagauuguccggcagcaguccuauagcaucauguguauuaucaaagaagaggugcuugcguacguugugcaacugccucucuacggcgucaucgacacccccugcuggaagcugcauacaucuccucuuuguaccacaaacaccaaagaaggguccaauauuugccugacgcgcacagauagaggaugguauugugacaacgccggcagcgugucuuucuuuccgcaggcugagaccugcaagguucagagcaaucggguguucugugauaccaugaacucccucacacugcccucugaggucaaccugugcaauaucgacauuuuuaacccuaaauacgauugcaagaucaugaccagcaagacagacguguccagcucugucauuacgucccucggggccaucgugagcuguuauggaaaaaccaagugcacagcuucuaauaaaaaccgcggcaucauuaagaccuucuccaaugggugugauuacguuagcaacaaaggaguggacacagucuccgugggcaauacccuguauuacguuaacaagcaagaaggcaagucucuuuaugugaaaggggagcccaucauuaauuuuuacgacccucuggucuuccccagcgaugaguucgacgccuccaucucucaggugaacgaaaagauuaaucagagccucgccuuuaucagaaaauccgaugaacugcugcacaacgugaauguuggaaagagcacgaccaacauuaugaucacaaccaucauuaucgucauuaucgugauucuucuccugcugaucgcugugggccucuuccuguacugcaaagcgcggucuacaccggucacccuuuccaaggaccagcugagcgggaucaauaacauugccuuuucuaacugaggacuaguguccaccugucccuccugggcugcuggauugucucguuuuccugccaaauaaacaggaucagcgcuuuacagaucuaaaaaaaaaaaaaaaaaaaaaaaaaaaaaaaaaaaaaaaaaaaaaaaaaaaaaaaaaaaaaaaaugcaucccccccccccccccccccccccccccccccaaaggcucuuuucagagccaccagaauu

SEQ ID NO: 12519 - RNA, 2174 nt, Artificial Sequence
  mRNA product Design b-1 comprising derived and/or modified sequence from HRSV(Memphis-37)__AIY60640.1__F0_DSCav1 (opt6)
gggagacggagacggccugcaggaccugcucucucagcccucagccgaggccuacgccgagccgagugcgcagccgacgaccgggaggagccgcagccuucaacucugagguacugugauccgcgcugcccgccgggccgccccaguccgcugcugcggcaccuccuucccucgcgcccucuucgcucgccagcgccuucccugugagccugcgucaccgcggccgccaagcuuaccauggaacucccaauccucaaaaccaaugccauaacaaccauacucgcugcaguaaccuuauguuucgcaaguagccaaaacauaaccgaagaauuuuaucaauccacaugcuccgcaguuucuaaaggauaucuaucagcauuaagaacuggaugguacacaucuguaauaacuauagaacuaagcaauauaaaagaaaacaaauguaacggaacugacgcuaaaguaaaacuuauaaaacaagaacuagauaaauacaaaaacgccguuaccgaacuacaacuauuaaugcaaucaacaccagccgcaaauaacagagcaagacgcgaauuaccaagauucaugaauuacacacuaaacaauacaaaaaauaacaauguaacacuaucaaaaaaaagaaaacgacgauucuuaggcuuccuacuaggagucggcucagcaauagcuuccggaauagccgucuguaaaguccuacaccuugaaggcgaaguaaacaaaaucaaaaacgcacuauuaucaacaaacaaagcagucguaucuuuauccaacggagucucaguccuaacauucaaaguacucgauuuaaaaaacuacaucgauaaacaacuccuucccauucuaaacaaacaauccugcucaauauccaacaucgaaacagucauagaauuucaacaaaaaaacaaccgccugcuagaaauaacaagagaauuuuccguaaaugccggcgucaccacaccaguaucaacauacaugcuaacaaacuccgaacuacucucccuaauaaacgauaugccaaucaccaacgaccaaaaaaaacuaaugucaaauaacguucaaauagucagacaacaaucauacagcauaaugugcauaauaaaagaagaagucuuagccuacguuguacaacucccauuauacggaguuaucgauacaccaugcuggaaauuacacacaucacccuuaugcaccacaaacacaaaagaaggauccaauauuugucuaacacgaacagacagaggaugguacugugauaacgcaggaucagugucauucuuuccacaagcagaaacauguaaaguucaaucuaacagaguauucugcgacaccaugaacucccuaaccuuacccucagaaguaaaucuaugcaacauagauaucuuuaacccaaaauacgacugcaaaaucaugacaucaaaaacugacguuucuucauccguuauaacuucccucggcgcuauaguguccugcuacggaaaaacuaaaugcacagcauccaacaaaaauagaggaauaauaaaaacauuuuccaacggcugcgacuauguuucaaacaaaggaguagauaccguaucagucggcaauacauuauauuauguuaacaaacaagaaggaaaaucccuauacguaaaaggagaaccuauaaucaacuucuacgacccacucguauuccccucagacgaauuugacgcaucuauaucucaaguaaaugaaaaaauaaaccaaucacucgcauuuauccgcaaaucugacgaauuacuccauaacgucaacgucggcaaaucaaccaccaacauaaugauaacaacaauuauaauaguaauaauugucauacuacuacuccuaauagcaguaggucuauuccuauacugcaaagcaagauccacccccguaacccuuuccaaagaucaacucucaggaauaaauaacauagccuuuucaaacuaaggacuaguguccaccugucccuccugggcugcuggauugucucguuuuccugccaaauaaacaggaucagcgcuuuacagaucuaaaaaaaaaaaaaaaaaaaaaaaaaaaaaaaaaaaaaaaaaaaaaaaaaaaaaaaaaaaaaaaaugcaucccccccccccccccccccccccccccccccaaaggcucuuuucagagccaccagaauu

SEQ ID NO: 12520 - RNA, 2174 nt, Artificial Sequence
  mRNA product Design b-1 comprising derived and/or modified sequence from HRSV(Memphis-37)__AIY60640.1__F0_DSCav1 (opt11)
gggagacggagacggccugcaggaccugcucucucagcccucagccgaggccuacgccgagccgagugcgcagccgacgaccgggaggagccgcagccuucaacucugagguacugugauccgcgcugcccgccgggccgccccaguccgcugcugcggcaccuccuucccucgcgcccucuucgcucgccagcgccuucccugugagccugcgucaccgcggccgccaagcuuaccauggaacuccccauacucaagacuaaugccaucaccaccauccucgccgccgugacccucugcuucgcaucgucccaaaacauaacagaagaguucuaccaaagcacaugcuccgcagucuccaaaggauaccucuccgcacuacguaccggcugguacaccagcgucaucaccaucgaacuuuccaacaucaaagagaacaaaugcaacggcaccgacgccaaaguaaaacucauaaaacaagagcuagacaaauacaaaaacgccgucacagaacuccaacuacugaugcaauccacaccggccgccaacaaccgcgcucgacgugaacucccacgcuucaugaacuacacucuuaacaacaccaaaaauaacaacgucacccuauccaaaaagcgaaagcgcagauuccucggcuuccuacuuggcgucggcucggcgauagccucuggaaucgccguuugcaagguccuccaccuagaaggcgaaguaaacaaaaucaaaaacgcacuccuaagcaccaacaaagccgucgucucacuuuccaacggcgucucaguccucacauucaaaguucucgaccuaaagaacuacaucgacaagcaacuacuacccauacucaauaaacaauccugcuccaucagcaacaucgagacagucaucgaauuucaacaaaagaacaaccgccuccucgaaauuacacgcgaguucucagucaacgccggagucaccaccccagucucaacauacaugcucaccaacagcgaacuccugucucuaaucaacgacaugcccaucacuaacgaccagaagaaacucauguccaacaacguccaaaucgugcgacaacaaucauacucuaucaugugcaucaucaaagaagaaguccucgcauacgucguccagcucccacucuacggcguaaucgacacacccugcuggaaacuccacacaucaccccuaugcaccaccaacacaaaagaaggcuccaacaucugccuaacccgaaccgacagagguugguauugcgacaacgccggcucagucucauucuucccacaagccgaaaccuguaaaguccaaucaaaccgcgucuucugcgauaccaugaacucucucacacuccccuccgaagucaaucucugcaacauagacaucuucaauccaaaguacgacugcaaaauaaugaccucgaaaaccgacguaagcuccagcgucaucaccuccuuaggcgcaaucguauccugcuacggcaaaaccaaaugcaccgccucaaacaaaaacagaggcaucaucaaaacguucucgaacggaugcgacuacguuuccaauaaaggcguagauaccgucuccgucggcaacacacucuauuacgucaacaaacaagaaggcaaaucccucuacgucaaaggugaaccuaucaucaacuucuacgacccccucgucuuccccagcgacgaguucgaugccucaaucagccaagucaacgagaaaaucaaccaaucacuggcuuucauacgcaaauccgacgaacuccuccacaacgugaacgucggcaaauccacaaccaacaucaugauaaccacaauaaucaucgucauaaucguaauccuacuccuccuuauugccguaggacuauuccuauacugcaaagcccgauccacccccgucacccucucaaaagaccaacucuccggcaucaacaauauagccuucucuaacuaaggacuaguguccaccugucccuccugggcugcuggauugucucguuuuccugccaaauaaacaggaucagcgcuuuacagaucuaaaaaaaaaaaaaaaaaaaaaaaaaaaaaaaaaaaaaaaaaaaaaaaaaaaaaaaaaaaaaaaaugcaucccccccccccccccccccccccccccccccaaaggcucuuuucagagccaccagaauu

SEQ ID NO: 12521 - RNA, 1994 nt, Artificial Sequence
  mRNA product Design b-2 comprising derived and/or modified sequence from HRSV(Memphis-37)__AIY60640.1__F0_DSCav1 (opt1)
gggagagccucugcuggaguccggggaguggcguuggcugcuagagcgaagcuuaccauggagcugcccauccucaagaccaacgccaucaccacgauccuggccgcggugacccugugcuucgccagcucccagaacaucaccgaggaguucuaccagagcacgugcuccgccgucagcaagggcuaccucuccgcccugcgcaccgggugguacaccagcgugaucaccaucgagcuguccaacaucaaggagaacaagugcaacggcaccgacgccaaggugaagcucaucaagcaggagcuggacaaguacaagaacgcggucacggagcugcagcuccugaugcagagcaccccggccgccaacaaccgggcccgccgggagcugccccgcuucaugaacuacacccucaacaacaccaagaacaacaacgugacgcuguccaagaagcggaagcgccgguuccugggguuccuccugggcguggggagcgcgaucgccuccggcaucgccgucugcaaggugcugcaccucgagggcgaggugaacaagaucaagaacgcccugcuguccaccaacaaggccgucgugagccucuccaacggggugagcguccugaccuucaaggugcuggaccucaagaacuacaucgacaagcagcugcugcccauccugaacaagcagagcugcuccaucagcaacaucgagaccgucaucgaguuccagcagaagaacaaccgccuccuggagaucacgcgggaguucagcgugaacgcgggcgugaccacccccgucuccaccuacaugcugacgaacagcgagcuccugucccugaucaacgacaugccgaucaccaacgaccagaagaagcucaugagcaacaacgugcagaucgugcgccagcaguccuacagcaucaugugcaucaucaaggaggagguccuggccuacguggugcagcugccccucuacggggucaucgacacccccugcuggaagcugcacaccagcccccugugcacgaccaacaccaaggagggcuccaacaucugccucacccggacggaccgcgggugguacugcgacaacgccggcagcguguccuucuucccgcaggccgagaccugcaagguccagagcaaccggguguucugcgacaccaugaacucccugacccugcccagcgaggugaaccucugcaacaucgacaucuucaaccccaaguacgacugcaagaucaugacguccaagaccgacgucagcuccagcgugaucaccucccugggcgccaucgugagcugcuacgggaagaccaagugcacggcgagcaacaagaaccgcggcaucaucaagaccuucuccaacgggugcgacuacgucagcaacaagggcguggacaccguguccgucggcaacacccuguacuacgugaacaagcaggagggcaagagccucuacgugaagggggagcccaucaucaacuucuacgacccgcuggucuuccccuccgacgaguucgacgccagcaucucccaggugaacgagaagaucaaccagagccuggccuucauccggaaguccgacgagcuccugcacaacgugaacgucggcaagagcaccacgaacaucaugaucaccaccaucaucaucgugaucaucgugauccugcugcuccugaucgccgucgggcuguuccucuacugcaaggcccgcuccacccccgugacgcugagcaaggaccagcuguccgggaucaacaacaucgcguucagcaacugaggacuaguguccaccugucccuccugggcugcuggauugucucguuuuccugccaaauaaacaggaucagcgcuuuacagaucuaaaaaaaaaaaaaaaaaaaaaaaaaaaaaaaaaaaaaaaaaaaaaaaaaaaaaaaaaaaaaaaaugcaucccccccccccccccccccccccccccccccaaaggcucuuuucagagccaccagaauu

SEQ ID NO: 12522 - RNA, 1994 nt, Artificial Sequence
  mRNA product Design b-2 comprising derived and/or modified sequence from HRSV(Memphis-37)__AIY60640.1__F0_DSCav1 (opt1)
gggagagccucugcuggaguccggggaguggcguuggcugcuagagcgaagcuuaccauggagcugcccauccucaagaccaacgccaucaccacgauccuggccgcggugacccugugcuucgccagcucccagaacaucaccgaggaguucuaccagagcacgugcuccgccgucagcaagggcuaccucuccgcccugcgcaccgggugguacaccagcgugaucaccaucgagcuguccaacaucaaggagaacaagugcaacggcaccgacgccaaggugaagcucaucaagcaggagcuggacaaguacaagaacgcggucacggagcugcagcuccugaugcagagcaccccggccgccaacaaccgggcccgccgggagcugccccgcuucaugaacuacacccucaacaacaccaagaacaacaacgugacgcuguccaagaagcggaagcgccgguuccugggguuccuccugggcguggggagcgcgaucgccuccggcaucgccgucugcaaggugcugcaccucgagggcgaggugaacaagaucaagaacgcccugcugagcaccaacaaggccgucgugucccucagcaacgggguguccguccugaccuucaaggugcuggaccucaagaacuacaucgacaagcagcugcugcccauccucaacaagcagagcugcuccaucagcaacaucgagaccgugaucgaguuccagcagaagaacaaccgccugcuggagaucacgcgggaguucuccgucaacgcgggcgugaccacccccgugagcaccuacaugcucacgaacagcgagcugcugucccucaucaacgacaugccgaucaccaacgaccagaagaagcugaugagcaacaacguccagaucgugcgccagcaguccuacagcaucaugugcaucaucaaggaggaggugcuggccuacgucgugcagcucccccuguacggggugaucgacacccccugcuggaagcugcacaccagcccccucugcacgaccaacaccaaggagggcagcaacaucugccugacccggacggaccgcgggugguacugcgacaacgccggcuccgucagcuucuucccgcaggccgagaccugcaaggugcaguccaaccgggucuucugcgacaccaugaacagccugacccuccccuccgaggugaaccugugcaacaucgacaucuucaaccccaaguacgacugcaagaucaugacgagcaagaccgacguguccagcuccgucaucaccagccugggcgccaucguguccugcuacgggaagaccaagugcacggcgagcaacaagaaccgcggcaucaucaagaccuucuccaacgggugcgacuacgugagcaacaagggcgucgacaccgugagcgugggcaacacccucuacuacgucaacaagcaggaggggaagucccuguacgugaagggcgagcccaucaucaacuucuacgacccgcugguguuccccagcgacgaguucgacgccuccaucagccaggucaacgagaagaucaaccagucccucgccuucauccggaaguccgacgagcugcugcacaacgugaacguggggaaguccaccacgaacaucaugaucaccaccaucaucaucgucaucaucgugauccugcuccugcugaucgccgugggccucuuccuguacugcaaggcccgcagcacccccgucacgcuguccaaggaccagcucagcgggaucaacaacaucgcguucuccaacugaggacuaguguccaccugucccuccugggcugcuggauugucucguuuuccugccaaauaaacaggaucagcgcuuuacagaucuaaaaaaaaaaaaaaaaaaaaaaaaaaaaaaaaaaaaaaaaaaaaaaaaaaaaaaaaaaaaaaaaugcaucccccccccccccccccccccccccccccccaaaggcucuuuucagagccaccagaauu

SEQ ID NO: 12523 - RNA, 1994 nt, Artificial Sequence
  mRNA product Design b-2 comprising derived and/or modified sequence from HRSV(Memphis-37)__AIY60640.1__F0_DSCav1 (opt2)
gggagagccucugcuggaguccggggaguggcguuggcugcuagagcgaagcuuaccauggagcuccccauccucaagaccaacgccaucaccaccauccucgccgccgucacccucugcuucgccuccucccagaacaucaccgaggaguucuaccaguccaccugcuccgccgucuccaagggcuaccucuccgcccuccgcaccggcugguacaccuccgucaucaccaucgagcucuccaacaucaaggagaacaagugcaacggcaccgacgccaaggucaagcucaucaagcaggagcucgacaaguacaagaacgccgucaccgagcuccagcuccucaugcaguccacccccgccgccaacaaccgcgcccgccgcgagcucccccgcuucaugaacuacacccucaacaacaccaagaacaacaacgucacccucuccaagaagcgcaagcgccgcuuccucggcuuccuccucggcgucggcuccgccaucgccuccggcaucgccgucugcaagguccuccaccucgagggcgaggucaacaagaucaagaacgcccuccucuccaccaacaaggccgucgucucccucuccaacggcgucuccguccucaccuucaagguccucgaccucaagaacuacaucgacaagcagcuccuccccauccucaacaagcaguccugcuccaucuccaacaucgagaccgucaucgaguuccagcagaagaacaaccgccuccucgagaucacccgcgaguucuccgucaacgccggcgucaccacccccgucuccaccuacaugcucaccaacuccgagcuccucucccucaucaacgacaugcccaucaccaacgaccagaagaagcucauguccaacaacguccagaucguccgccagcaguccuacuccaucaugugcaucaucaaggaggagguccucgccuacgucguccagcucccccucuacggcgucaucgacacccccugcuggaagcuccacaccuccccccucugcaccaccaacaccaaggagggcuccaacaucugccucacccgcaccgaccgcggcugguacugcgacaacgccggcuccgucuccuucuucccccaggccgagaccugcaagguccaguccaaccgcgucuucugcgacaccaugaacucccucacccuccccuccgaggucaaccucugcaacaucgacaucuucaaccccaaguacgacugcaagaucaugaccuccaagaccgacgucuccuccuccgucaucaccucccucggcgccaucgucuccugcuacggcaagaccaagugcaccgccuccaacaagaaccgcggcaucaucaagaccuucuccaacggcugcgacuacgucuccaacaagggcgucgacaccgucuccgucggcaacacccucuacuacgucaacaagcaggagggcaagucccucuacgucaagggcgagcccaucaucaacuucuacgacccccucgucuuccccuccgacgaguucgacgccuccaucucccaggucaacgagaagaucaaccagucccucgccuucauccgcaaguccgacgagcuccuccacaacgucaacgucggcaaguccaccaccaacaucaugaucaccaccaucaucaucgucaucaucgucauccuccuccuccucaucgccgucggccucuuccucuacugcaaggcccgcuccacccccgucacccucuccaaggaccagcucuccggcaucaacaacaucgccuucuccaacugaggacuaguguccaccugucccuccugggcugcuggauugucucguuuuccugccaaauaaacaggaucagcgcuuuacagaucuaaaaaaaaaaaaaaaaaaaaaaaaaaaaaaaaaaaaaaaaaaaaaaaaaaaaaaaaaaaaaaaaugcaucccccccccccccccccccccccccccccccaaaggcucuuuucagagccaccagaauu

SEQ ID NO: 12524 - RNA, 1994 nt, Artificial Sequence
  mRNA product Design b-2 comprising derived and/or modified sequence from HRSV(Memphis-37)__AIY60640.1__F0_DSCav1 (opt3)
gggagagccucugcuggaguccggggaguggcguuggcugcuagagcgaagcuuaccauggagcugcccauccucaagaccaacgccauuacaacuauacuugcugcagugacgcugugcuucgccagcucccagaauaucaccgaagaguuuuaccaaucuacauguucagcggucaguaaaggcuauuugagcgcuuuaagaacugggugguacaccuccguuauuacaaucgaacugucuaacauuaaggagaauaaaugcaacggaaccgacgccaaggugaaacuaaucaagcaggaacucgauaaguauaaaaaugcaguaacugagcugcagcuucugaugcagucgaccccugccgcuaacaauagggcacggcgcgaguugccacgauucaugaacuacacacucaauaacacgaagaauaacaaugugacucugagcaaaaagcguaaaagaagguuucuggguuuccucuuaggcgucgggucagccauagcuaguggaaucgccguguguaagguucugcaccuugaaggcgaggugaacaagauuaaaaaugcguugcuguccaccaacaaggcagucgugucucuaagcaacgguguauccguucucacauuuaaagugcuggaccuuaagaauuauaucgauaaacaacuguugccgauucucaacaagcagucaugcaguaucagcaauauagaaacugucauugaguuccagcagaaaaacaaucggcuguuagagaucacccgcgaauuuucugugaacgccggggugacaacccccgucuccacguacaugcugacuaauucagagcuccuuagccugauuaacgacaugccuaucacaaaugaucaaaagaaguugaugaguaacaauguucagaucgugagacagcagucuuauuccauuauguguauaaucaaagaagagguacuagcuuacgugguccaacugccacucuacggagugauugacacccccugcuggaagcugcauacuagcccucuuuguacaaccaacacgaaagaaggcucgaauaucugccugaccaggacagaucggggcugguauugugacaacgccgggucuguuuccuucuuuccacaggcagagacuugcaaggugcagucaaaucgcgucuucugugauaccaugaacaguuugacacuccccagcgaggugaaccugugcaauauagacauuuuuaacccuaaauacgauugcaagaucaugacuuccaagaccgacguaucuagcucaguuaucacaaguuuaggagcuauuguguccuguuaugguaaaaccaagugcacugccagcaauaaaaaccgaggcaucauuaagacguucucuaaugggugugauuacgucucaaacaaaggaguggacacagucagugugggcaauacccuguauuacguuaacaagcaagaagguaagagccuauaugugaaaggggagccaauaaucaauuuuuacgacccgcucguauuccccuccgaugaguucgacgcgucuauuucgcaggucaacgaaaagaucaaucagagccuggccuuuaucagaaaauccgaugaacuuuugcacaacgugaauguuggaaagucaacuaccaacauuaugauaacaaccaucauuaucgugauuaucgucauacugcuccugcuuaucgcagugggccuguucuuguacugcaaagcuaggaguacuccuguaacacucucuaaggaccagcugagcggcauuaauaacaucgccuuuuccaacugaggacuaguguccaccugucccuccugggcugcuggauugucucguuuuccugccaaauaaacaggaucagcgcuuuacagaucuaaaaaaaaaaaaaaaaaaaaaaaaaaaaaaaaaaaaaaaaaaaaaaaaaaaaaaaaaaaaaaaaugcaucccccccccccccccccccccccccccccccaaaggcucuuuucagagccaccagaauu

SEQ ID NO: 12525 - RNA, 1994 nt, Artificial Sequence
  mRNA product Design b-2 comprising derived and/or modified sequence from HRSV(Memphis-37)__AIY60640.1__F0_DSCav1 (opt4)
gggagagccucugcuggaguccggggaguggcguuggcugcuagagcgaagcuuaccauggagcugcccauccugaagaccaacgccaucaccaccauccuggccgccgugacccugugcuucgccagcagccagaacaucaccgaggaguucuaccagagcaccugcagcgccgugagcaagggcuaccugagcgcccugagaaccggcugguacaccagcgugaucaccaucgagcugagcaacaucaaggagaacaagugcaacggcaccgacgccaaggugaagcugaucaagcaggagcuggacaaguacaagaacgccgugaccgagcugcagcugcugaugcagagcacccccgccgccaacaacagagccagaagagagcugcccagauucaugaacuacacccugaacaacaccaagaacaacaacgugacccugagcaagaagagaaagagaagauuccugggcuuccugcugggcgugggcagcgccaucgccagcggcaucgccgugugcaaggugcugcaccuggagggcgaggugaacaagaucaagaacgcccugcugagcaccaacaaggccguggugagccugagcaacggcgugagcgugcugaccuucaaggugcuggaccugaagaacuacaucgacaagcagcugcugcccauccugaacaagcagagcugcagcaucagcaacaucgagaccgugaucgaguuccagcagaagaacaacagacugcuggagaucaccagagaguucagcgugaacgccggcgugaccacccccgugagcaccuacaugcugaccaacagcgagcugcugagccugaucaacgacaugcccaucaccaacgaccagaagaagcugaugagcaacaacgugcagaucgugagacagcagagcuacagcaucaugugcaucaucaaggaggaggugcuggccuacguggugcagcugccccuguacggcgugaucgacacccccugcuggaagcugcacaccagcccccugugcaccaccaacaccaaggagggcagcaacaucugccugaccagaaccgacagaggcugguacugcgacaacgccggcagcgugagcuucuucccccaggccgagaccugcaaggugcagagcaacagaguguucugcgacaccaugaacagccugacccugcccagcgaggugaaccugugcaacaucgacaucuucaaccccaaguacgacugcaagaucaugaccagcaagaccgacgugagcagcagcgugaucaccagccugggcgccaucgugagcugcuacggcaagaccaagugcaccgccagcaacaagaacagaggcaucaucaagaccuucagcaacggcugcgacuacgugagcaacaagggcguggacaccgugagcgugggcaacacccuguacuacgugaacaagcaggagggcaagagccuguacgugaagggcgagcccaucaucaacuucuacgacccccugguguuccccagcgacgaguucgacgccagcaucagccaggugaacgagaagaucaaccagagccuggccuucaucagaaagagcgacgagcugcugcacaacgugaacgugggcaagagcaccaccaacaucaugaucaccaccaucaucaucgugaucaucgugauccugcugcugcugaucgccgugggccuguuccuguacugcaaggccagaagcacccccgugacccugagcaaggaccagcugagcggcaucaacaacaucgccuucagcaacugaggacuaguguccaccugucccuccugggcugcuggauugucucguuuuccugccaaauaaacaggaucagcgcuuuacagaucuaaaaaaaaaaaaaaaaaaaaaaaaaaaaaaaaaaaaaaaaaaaaaaaaaaaaaaaaaaaaaaaaugcaucccccccccccccccccccccccccccccccaaaggcucuuuucagagccaccagaauu

SEQ ID NO: 12526 - RNA, 1994 nt, Artificial Sequence
  mRNA product Design b-2 comprising derived and/or modified sequence from HRSV(Memphis-37)__AIY60640.1__F0_DSCav1 (opt5)
gggagagccucugcuggaguccggggaguggcguuggcugcuagagcgaagcuuaccauggagcugcccauccucaagaccaacgccauuacaacgauccuggcugccgugacccuuugcuucgcgagcucccagaauauuacagaagaguuuuaccaaucuaccuguagcgcugucuccaaaggcuaucugucugcccucagaacagggugguacaccagcguuaucacaauugaacuguccaacaucaaggagaauaaaugcaacggaaccgacgccaaggugaaacuuaucaagcaggaacuggauaaguauaaaaaugcugugacggagcuccagcugcugaugcagucuaccccugccgcuaacaaucgggcccgcagagagcucccgcgguucaugaacuacacacugaauaacaccaagaauaacaaugucacacuuagcaaaaagcgcaaaagacgguuucugggcuuccuccugggggugggauccgcgauugccagcggcaucgcuguuuguaaggugcuucaccuggaaggggaggucaacaagauuaaaaaugcccuccugucuaccaacaaggcugugguuucccugagcaacggagugucuguccucacguuuaaagugcuggaccuuaagaauuauaucgauaaacaacugcuccccauucugaacaagcaguccugcagcaucucuaauauugaaacagugaucgaguuccagcagaaaaacaaucgccuucuggagaucaccagagaauuuuccgucaacgccggcguuacaaccccugugagcaccuacaugcucacaaauuccgagcugcugucucucauuaacgacaugcccaucacgaaugaucaaaagaagcugaugagcaacaaugugcagauuguccggcagcaguccuauagcaucauguguauuaucaaagaagaggugcuugcguacguugugcaacugccucucuacggcgucaucgacacccccugcuggaagcugcauacaucuccucuuuguaccacaaacaccaaagaaggguccaauauuugccugacgcgcacagauagaggaugguauugugacaacgccggcagcgugucuuucuuuccgcaggcugagaccugcaagguucagagcaaucggguguucugugauaccaugaacucccucacacugcccucugaggucaaccugugcaauaucgacauuuuuaacccuaaauacgauugcaagaucaugaccagcaagacagacguguccagcucugucauuacgucccucggggccaucgugagcuguuauggaaaaaccaagugcacagcuucuaauaaaaaccgcggcaucauuaagaccuucuccaaugggugugauuacguuagcaacaaaggaguggacacagucuccgugggcaauacccuguauuacguuaacaagcaagaaggcaagucucuuuaugugaaaggggagcccaucauuaauuuuuacgacccucuggucuuccccagcgaugaguucgacgccuccaucucucaggugaacgaaaagauuaaucagagccucgccuuuaucagaaaauccgaugaacugcugcacaacgugaauguuggaaagagcacgaccaacauuaugaucacaaccaucauuaucgucauuaucgugauucuucuccugcugaucgcugugggccucuuccuguacugcaaagcgcggucuacaccggucacccuuuccaaggaccagcugagcgggaucaauaacauugccuuuucuaacugaggacuaguguccaccugucccuccugggcugcuggauugucucguuuuccugccaaauaaacaggaucagcgcuuuacagaucuaaaaaaaaaaaaaaaaaaaaaaaaaaaaaaaaaaaaaaaaaaaaaaaaaaaaaaaaaaaaaaaaugcaucccccccccccccccccccccccccccccccaaaggcucuuuucagagccaccagaauu

SEQ ID NO: 12527 - RNA, 1994 nt, Artificial Sequence
  mRNA product Design b-2 comprising derived and/or modified sequence from HRSV(Memphis-37)__AIY60640.1__F0_DSCav1 (opt6)
gggagagccucugcuggaguccggggaguggcguuggcugcuagagcgaagcuuaccauggaacucccaauccucaaaaccaaugccauaacaaccauacucgcugcaguaaccuuauguuucgcaaguagccaaaacauaaccgaagaauuuuaucaauccacaugcuccgcaguuucuaaaggauaucuaucagcauuaagaacuggaugguacacaucuguaauaacuauagaacuaagcaauauaaaagaaaacaaauguaacggaacugacgcuaaaguaaaacuuauaaaacaagaacuagauaaauacaaaaacgccguuaccgaacuacaacuauuaaugcaaucaacaccagccgcaaauaacagagcaagacgcgaauuaccaagauucaugaauuacacacuaaacaauacaaaaaauaacaauguaacacuaucaaaaaaaagaaaacgacgauucuuaggcuuccuacuaggagucggcucagcaauagcuuccggaauagccgucuguaaaguccuacaccuugaaggcgaaguaaacaaaaucaaaaacgcacuauuaucaacaaacaaagcagucguaucuuuauccaacggagucucaguccuaacauucaaaguacucgauuuaaaaaacuacaucgauaaacaacuccuucccauucuaaacaaacaauccugcucaauauccaacaucgaaacagucauagaauuucaacaaaaaaacaaccgccugcuagaaauaacaagagaauuuuccguaaaugccggcgucaccacaccaguaucaacauacaugcuaacaaacuccgaacuacucucccuaauaaacgauaugccaaucaccaacgaccaaaaaaaacuaaugucaaauaacguucaaauagucagacaacaaucauacagcauaaugugcauaauaaaagaagaagucuuagccuacguuguacaacucccauuauacggaguuaucgauacaccaugcuggaaauuacacacaucacccuuaugcaccacaaacacaaaagaaggauccaauauuugucuaacacgaacagacagaggaugguacugugauaacgcaggaucagugucauucuuuccacaagcagaaacauguaaaguucaaucuaacagaguauucugcgacaccaugaacucccuaaccuuacccucagaaguaaaucuaugcaacauagauaucuuuaacccaaaauacgacugcaaaaucaugacaucaaaaacugacguuucuucauccguuauaacuucccucggcgcuauaguguccugcuacggaaaaacuaaaugcacagcauccaacaaaaauagaggaauaauaaaaacauuuuccaacggcugcgacuauguuucaaacaaaggaguagauaccguaucagucggcaauacauuauauuauguuaacaaacaagaaggaaaaucccuauacguaaaaggagaaccuauaaucaacuucuacgacccacucguauuccccucagacgaauuugacgcaucuauaucucaaguaaaugaaaaaauaaaccaaucacucgcauuuauccgcaaaucugacgaauuacuccauaacgucaacgucggcaaaucaaccaccaacauaaugauaacaacaauuauaauaguaauaauugucauacuacuacuccuaauagcaguaggucuauuccuauacugcaaagcaagauccacccccguaacccuuuccaaagaucaacucucaggaauaaauaacauagccuuuucaaacuaaggacuaguguccaccugucccuccugggcugcuggauugucucguuuuccugccaaauaaacaggaucagcgcuuuacagaucuaaaaaaaaaaaaaaaaaaaaaaaaaaaaaaaaaaaaaaaaaaaaaaaaaaaaaaaaaaaaaaaaugcaucccccccccccccccccccccccccccccccaaaggcucuuuucagagccaccagaauu

SEQ ID NO: 12528 - RNA, 1994 nt, Artificial Sequence
  mRNA product Design b-2 comprising derived and/or modified sequence from HRSV(Memphis-37)__AIY60640.1__F0_DSCav1 (opt11)
gggagagccucugcuggaguccggggaguggcguuggcugcuagagcgaagcuuaccauggaacuccccauacucaagacuaaugccaucaccaccauccucgccgccgugacccucugcuucgcaucgucccaaaacauaacagaagaguucuaccaaagcacaugcuccgcagucuccaaaggauaccucuccgcacuacguaccggcugguacaccagcgucaucaccaucgaacuuuccaacaucaaagagaacaaaugcaacggcaccgacgccaaaguaaaacucauaaaacaagagcuagacaaauacaaaaacgccgucacagaacuccaacuacugaugcaauccacaccggccgccaacaaccgcgcucgacgugaacucccacgcuucaugaacuacacucuuaacaacaccaaaaauaacaacgucacccuauccaaaaagcgaaagcgcagauuccucggcuuccuacuuggcgucggcucggcgauagccucuggaaucgccguuugcaagguccuccaccuagaaggcgaaguaaacaaaaucaaaaacgcacuccuaagcaccaacaaagccgucgucucacuuuccaacggcgucucaguccucacauucaaaguucucgaccuaaagaacuacaucgacaagcaacuacuacccauacucaauaaacaauccugcuccaucagcaacaucgagacagucaucgaauuucaacaaaagaacaaccgccuccucgaaauuacacgcgaguucucagucaacgccggagucaccaccccagucucaacauacaugcucaccaacagcgaacuccugucucuaaucaacgacaugcccaucacuaacgaccagaagaaacucauguccaacaacguccaaaucgugcgacaacaaucauacucuaucaugugcaucaucaaagaagaaguccucgcauacgucguccagcucccacucuacggcguaaucgacacacccugcuggaaacuccacacaucaccccuaugcaccaccaacacaaaagaaggcuccaacaucugccuaacccgaaccgacagagguugguauugcgacaacgccggcucagucucauucuucccacaagccgaaaccuguaaaguccaaucaaaccgcgucuucugcgauaccaugaacucucucacacuccccuccgaagucaaucucugcaacauagacaucuucaauccaaaguacgacugcaaaauaaugaccucgaaaaccgacguaagcuccagcgucaucaccuccuuaggcgcaaucguauccugcuacggcaaaaccaaaugcaccgccucaaacaaaaacagaggcaucaucaaaacguucucgaacggaugcgacuacguuuccaauaaaggcguagauaccgucuccgucggcaacacacucuauuacgucaacaaacaagaaggcaaaucccucuacgucaaaggugaaccuaucaucaacuucuacgacccccucgucuuccccagcgacgaguucgaugccucaaucagccaagucaacgagaaaaucaaccaaucacuggcuuucauacgcaaauccgacgaacuccuccacaacgugaacgucggcaaauccacaaccaacaucaugauaaccacaauaaucaucgucauaaucguaauccuacuccuccuuauugccguaggacuauuccuauacugcaaagcccgauccacccccgucacccucucaaaagaccaacucuccggcaucaacaauauagccuucucuaacuaaggacuaguguccaccugucccuccugggcugcuggauugucucguuuuccugccaaauaaacaggaucagcgcuuuacagaucuaaaaaaaaaaaaaaaaaaaaaaaaaaaaaaaaaaaaaaaaaaaaaaaaaaaaaaaaaaaaaaaaugcaucccccccccccccccccccccccccccccccaaaggcucuuuucagagccaccagaauu

SEQ ID NO: 12529 - RNA, 2014 nt, Artificial Sequence
  mRNA product Design b-3 comprising derived and/or modified sequence from HRSV(Memphis-37)__AIY60640.1__F0_DSCav1 (opt1)
gggagagucccgcagucggcguccagcggcucugcuuguucgugugugugucguugcaggccuuauucaagcuuaccauggagcugcccauccucaagaccaacgccaucaccacgauccuggccgcggugacccugugcuucgccagcucccagaacaucaccgaggaguucuaccagagcacgugcuccgccgucagcaagggcuaccucuccgcccugcgcaccgggugguacaccagcgugaucaccaucgagcuguccaacaucaaggagaacaagugcaacggcaccgacgccaaggugaagcucaucaagcaggagcuggacaaguacaagaacgcggucacggagcugcagcuccugaugcagagcaccccggccgccaacaaccgggcccgccgggagcugccccgcuucaugaacuacacccucaacaacaccaagaacaacaacgugacgcuguccaagaagcggaagcgccgguuccugggguuccuccugggcguggggagcgcgaucgccuccggcaucgccgucugcaaggugcugcaccucgagggcgaggugaacaagaucaagaacgcccugcuguccaccaacaaggccgucgugagccucuccaacggggugagcguccugaccuucaaggugcuggaccucaagaacuacaucgacaagcagcugcugcccauccugaacaagcagagcugcuccaucagcaacaucgagaccgucaucgaguuccagcagaagaacaaccgccuccuggagaucacgcgggaguucagcgugaacgcgggcgugaccacccccgucuccaccuacaugcugacgaacagcgagcuccugucccugaucaacgacaugccgaucaccaacgaccagaagaagcucaugagcaacaacgugcagaucgugcgccagcaguccuacagcaucaugugcaucaucaaggaggagguccuggccuacguggugcagcugccccucuacggggucaucgacacccccugcuggaagcugcacaccagcccccugugcacgaccaacaccaaggagggcuccaacaucugccucacccggacggaccgcgggugguacugcgacaacgccggcagcguguccuucuucccgcaggccgagaccugcaagguccagagcaaccggguguucugcgacaccaugaacucccugacccugcccagcgaggugaaccucugcaacaucgacaucuucaaccccaaguacgacugcaagaucaugacguccaagaccgacgucagcuccagcgugaucaccucccugggcgccaucgugagcugcuacgggaagaccaagugcacggcgagcaacaagaaccgcggcaucaucaagaccuucuccaacgggugcgacuacgucagcaacaagggcguggacaccguguccgucggcaacacccuguacuacgugaacaagcaggagggcaagagccucuacgugaagggggagcccaucaucaacuucuacgacccgcuggucuuccccuccgacgaguucgacgccagcaucucccaggugaacgagaagaucaaccagagccuggccuucauccggaaguccgacgagcuccugcacaacgugaacgucggcaagagcaccacgaacaucaugaucaccaccaucaucaucgugaucaucgugauccugcugcuccugaucgccgucgggcuguuccucuacugcaaggcccgcuccacccccgugacgcugagcaaggaccagcuguccgggaucaacaacaucgcguucagcaacugaggacuaguguccaccugucccuccugggcugcuggauugucucguuuuccugccaaauaaacaggaucagcgcuuuacagaucuaaaaaaaaaaaaaaaaaaaaaaaaaaaaaaaaaaaaaaaaaaaaaaaaaaaaaaaaaaaaaaaaugcaucccccccccccccccccccccccccccccccaaaggcucuuuucagagccaccagaauu

SEQ ID NO: 12530 - RNA, 2014 nt, Artificial Sequence
  mRNA product Design b-3 comprising derived and/or modified sequence from HRSV(Memphis-37)__AIY60640.1__F0_DSCav1 (opt1)
gggagagucccgcagucggcguccagcggcucugcuuguucgugugugugucguugcaggccuuauucaagcuuaccauggagcugcccauccucaagaccaacgccaucaccacgauccuggccgcggugacccugugcuucgccagcucccagaacaucaccgaggaguucuaccagagcacgugcuccgccgucagcaagggcuaccucuccgcccugcgcaccgggugguacaccagcgugaucaccaucgagcuguccaacaucaaggagaacaagugcaacggcaccgacgccaaggugaagcucaucaagcaggagcuggacaaguacaagaacgcggucacggagcugcagcuccugaugcagagcaccccggccgccaacaaccgggcccgccgggagcugccccgcuucaugaacuacacccucaacaacaccaagaacaacaacgugacgcuguccaagaagcggaagcgccgguuccugggguuccuccugggcguggggagcgcgaucgccuccggcaucgccgucugcaaggugcugcaccucgagggcgaggugaacaagaucaagaacgcccugcugagcaccaacaaggccgucgugucccucagcaacgggguguccguccugaccuucaaggugcuggaccucaagaacuacaucgacaagcagcugcugcccauccucaacaagcagagcugcuccaucagcaacaucgagaccgugaucgaguuccagcagaagaacaaccgccugcuggagaucacgcgggaguucuccgucaacgcgggcgugaccacccccgugagcaccuacaugcucacgaacagcgagcugcugucccucaucaacgacaugccgaucaccaacgaccagaagaagcugaugagcaacaacguccagaucgugcgccagcaguccuacagcaucaugugcaucaucaaggaggaggugcuggccuacgucgugcagcucccccuguacggggugaucgacacccccugcuggaagcugcacaccagcccccucugcacgaccaacaccaaggagggcagcaacaucugccugacccggacggaccgcgggugguacugcgacaacgccggcuccgucagcuucuucccgcaggccgagaccugcaaggugcaguccaaccgggucuucugcgacaccaugaacagccugacccuccccuccgaggugaaccugugcaacaucgacaucuucaaccccaaguacgacugcaagaucaugacgagcaagaccgacguguccagcuccgucaucaccagccugggcgccaucguguccugcuacgggaagaccaagugcacggcgagcaacaagaaccgcggcaucaucaagaccuucuccaacgggugcgacuacgugagcaacaagggcgucgacaccgugagcgugggcaacacccucuacuacgucaacaagcaggaggggaagucccuguacgugaagggcgagcccaucaucaacuucuacgacccgcugguguuccccagcgacgaguucgacgccuccaucagccaggucaacgagaagaucaaccagucccucgccuucauccggaaguccgacgagcugcugcacaacgugaacguggggaaguccaccacgaacaucaugaucaccaccaucaucaucgucaucaucgugauccugcuccugcugaucgccgugggccucuuccuguacugcaaggcccgcagcacccccgucacgcuguccaaggaccagcucagcgggaucaacaacaucgcguucuccaacugaggacuaguguccaccugucccuccugggcugcuggauugucucguuuuccugccaaauaaacaggaucagcgcuuuacagaucuaaaaaaaaaaaaaaaaaaaaaaaaaaaaaaaaaaaaaaaaaaaaaaaaaaaaaaaaaaaaaaaaugcaucccccccccccccccccccccccccccccccaaaggcucuuuucagagccaccagaauu

SEQ ID NO: 12531 - RNA, 2014 nt, Artificial Sequence
  mRNA product Design b-3 comprising derived and/or modified sequence from HRSV(Memphis-37)__AIY60640.1__F0_DSCav1 (opt2)
gggagagucccgcagucggcguccagcggcucugcuuguucgugugugugucguugcaggccuuauucaagcuuaccauggagcuccccauccucaagaccaacgccaucaccaccauccucgccgccgucacccucugcuucgccuccucccagaacaucaccgaggaguucuaccaguccaccugcuccgccgucuccaagggcuaccucuccgcccuccgcaccggcugguacaccuccgucaucaccaucgagcucuccaacaucaaggagaacaagugcaacggcaccgacgccaaggucaagcucaucaagcaggagcucgacaaguacaagaacgccgucaccgagcuccagcuccucaugcaguccacccccgccgccaacaaccgcgcccgccgcgagcucccccgcuucaugaacuacacccucaacaacaccaagaacaacaacgucacccucuccaagaagcgcaagcgccgcuuccucggcuuccuccucggcgucggcuccgccaucgccuccggcaucgccgucugcaagguccuccaccucgagggcgaggucaacaagaucaagaacgcccuccucuccaccaacaaggccgucgucucccucuccaacggcgucuccguccucaccuucaagguccucgaccucaagaacuacaucgacaagcagcuccuccccauccucaacaagcaguccugcuccaucuccaacaucgagaccgucaucgaguuccagcagaagaacaaccgccuccucgagaucacccgcgaguucuccgucaacgccggcgucaccacccccgucuccaccuacaugcucaccaacuccgagcuccucucccucaucaacgacaugcccaucaccaacgaccagaagaagcucauguccaacaacguccagaucguccgccagcaguccuacuccaucaugugcaucaucaaggaggagguccucgccuacgucguccagcucccccucuacggcgucaucgacacccccugcuggaagcuccacaccuccccccucugcaccaccaacaccaaggagggcuccaacaucugccucacccgcaccgaccgcggcugguacugcgacaacgccggcuccgucuccuucuucccccaggccgagaccugcaagguccaguccaaccgcgucuucugcgacaccaugaacucccucacccuccccuccgaggucaaccucugcaacaucgacaucuucaaccccaaguacgacugcaagaucaugaccuccaagaccgacgucuccuccuccgucaucaccucccucggcgccaucgucuccugcuacggcaagaccaagugcaccgccuccaacaagaaccgcggcaucaucaagaccuucuccaacggcugcgacuacgucuccaacaagggcgucgacaccgucuccgucggcaacacccucuacuacgucaacaagcaggagggcaagucccucuacgucaagggcgagcccaucaucaacuucuacgacccccucgucuuccccuccgacgaguucgacgccuccaucucccaggucaacgagaagaucaaccagucccucgccuucauccgcaaguccgacgagcuccuccacaacgucaacgucggcaaguccaccaccaacaucaugaucaccaccaucaucaucgucaucaucgucauccuccuccuccucaucgccgucggccucuuccucuacugcaaggcccgcuccacccccgucacccucuccaaggaccagcucuccggcaucaacaacaucgccuucuccaacugaggacuaguguccaccugucccuccugggcugcuggauugucucguuuuccugccaaauaaacaggaucagcgcuuuacagaucuaaaaaaaaaaaaaaaaaaaaaaaaaaaaaaaaaaaaaaaaaaaaaaaaaaaaaaaaaaaaaaaaugcaucccccccccccccccccccccccccccccccaaaggcucuuuucagagccaccagaauu

SEQ ID NO: 12532 - RNA, 2014 nt, Artificial Sequence
  mRNA product Design b-3 comprising derived and/or modified sequence from HRSV(Memphis-37)__AIY60640.1__F0_DSCav1 (opt3)
gggagagucccgcagucggcguccagcggcucugcuuguucgugugugugucguugcaggccuuauucaagcuuaccauggagcugcccauccucaagaccaacgccauuacaacuauacuugcugcagugacgcugugcuucgccagcucccagaauaucaccgaagaguuuuaccaaucuacauguucagcggucaguaaaggcuauuugagcgcuuuaagaacugggugguacaccuccguuauuacaaucgaacugucuaacauuaaggagaauaaaugcaacggaaccgacgccaaggugaaacuaaucaagcaggaacucgauaaguauaaaaaugcaguaacugagcugcagcuucugaugcagucgaccccugccgcuaacaauagggcacggcgcgaguugccacgauucaugaacuacacacucaauaacacgaagaauaacaaugugacucugagcaaaaagcguaaaagaagguuucuggguuuccucuuaggcgucgggucagccauagcuaguggaaucgccguguguaagguucugcaccuugaaggcgaggugaacaagauuaaaaaugcguugcuguccaccaacaaggcagucgugucucuaagcaacgguguauccguucucacauuuaaagugcuggaccuuaagaauuauaucgauaaacaacuguugccgauucucaacaagcagucaugcaguaucagcaauauagaaacugucauugaguuccagcagaaaaacaaucggcuguuagagaucacccgcgaauuuucugugaacgccggggugacaacccccgucuccacguacaugcugacuaauucagagcuccuuagccugauuaacgacaugccuaucacaaaugaucaaaagaaguugaugaguaacaauguucagaucgugagacagcagucuuauuccauuauguguauaaucaaagaagagguacuagcuuacgugguccaacugccacucuacggagugauugacacccccugcuggaagcugcauacuagcccucuuuguacaaccaacacgaaagaaggcucgaauaucugccugaccaggacagaucggggcugguauugugacaacgccgggucuguuuccuucuuuccacaggcagagacuugcaaggugcagucaaaucgcgucuucugugauaccaugaacaguuugacacuccccagcgaggugaaccugugcaauauagacauuuuuaacccuaaauacgauugcaagaucaugacuuccaagaccgacguaucuagcucaguuaucacaaguuuaggagcuauuguguccuguuaugguaaaaccaagugcacugccagcaauaaaaaccgaggcaucauuaagacguucucuaaugggugugauuacgucucaaacaaaggaguggacacagucagugugggcaauacccuguauuacguuaacaagcaagaagguaagagccuauaugugaaaggggagccaauaaucaauuuuuacgacccgcucguauuccccuccgaugaguucgacgcgucuauuucgcaggucaacgaaaagaucaaucagagccuggccuuuaucagaaaauccgaugaacuuuugcacaacgugaauguuggaaagucaacuaccaacauuaugauaacaaccaucauuaucgugauuaucgucauacugcuccugcuuaucgcagugggccuguucuuguacugcaaagcuaggaguacuccuguaacacucucuaaggaccagcugagcggcauuaauaacaucgccuuuuccaacugaggacuaguguccaccugucccuccugggcugcuggauugucucguuuuccugccaaauaaacaggaucagcgcuuuacagaucuaaaaaaaaaaaaaaaaaaaaaaaaaaaaaaaaaaaaaaaaaaaaaaaaaaaaaaaaaaaaaaaaugcaucccccccccccccccccccccccccccccccaaaggcucuuuucagagccaccagaauu

SEQ ID NO: 12533 - RNA, 2014 nt, Artificial Sequence
  mRNA product Design b-3 comprising derived and/or modified sequence from HRSV(Memphis-37)__AIY60640.1__F0_DSCav1 (opt4)
gggagagucccgcagucggcguccagcggcucugcuuguucgugugugugucguugcaggccuuauucaagcuuaccauggagcugcccauccugaagaccaacgccaucaccaccauccuggccgccgugacccugugcuucgccagcagccagaacaucaccgaggaguucuaccagagcaccugcagcgccgugagcaagggcuaccugagcgcccugagaaccggcugguacaccagcgugaucaccaucgagcugagcaacaucaaggagaacaagugcaacggcaccgacgccaaggugaagcugaucaagcaggagcuggacaaguacaagaacgccgugaccgagcugcagcugcugaugcagagcacccccgccgccaacaacagagccagaagagagcugcccagauucaugaacuacacccugaacaacaccaagaacaacaacgugacccugagcaagaagagaaagagaagauuccugggcuuccugcugggcgugggcagcgccaucgccagcggcaucgccgugugcaaggugcugcaccuggagggcgaggugaacaagaucaagaacgcccugcugagcaccaacaaggccguggugagccugagcaacggcgugagcgugcugaccuucaaggugcuggaccugaagaacuacaucgacaagcagcugcugcccauccugaacaagcagagcugcagcaucagcaacaucgagaccgugaucgaguuccagcagaagaacaacagacugcuggagaucaccagagaguucagcgugaacgccggcgugaccacccccgugagcaccuacaugcugaccaacagcgagcugcugagccugaucaacgacaugcccaucaccaacgaccagaagaagcugaugagcaacaacgugcagaucgugagacagcagagcuacagcaucaugugcaucaucaaggaggaggugcuggccuacguggugcagcugccccuguacggcgugaucgacacccccugcuggaagcugcacaccagcccccugugcaccaccaacaccaaggagggcagcaacaucugccugaccagaaccgacagaggcugguacugcgacaacgccggcagcgugagcuucuucccccaggccgagaccugcaaggugcagagcaacagaguguucugcgacaccaugaacagccugacccugcccagcgaggugaaccugugcaacaucgacaucuucaaccccaaguacgacugcaagaucaugaccagcaagaccgacgugagcagcagcgugaucaccagccugggcgccaucgugagcugcuacggcaagaccaagugcaccgccagcaacaagaacagaggcaucaucaagaccuucagcaacggcugcgacuacgugagcaacaagggcguggacaccgugagcgugggcaacacccuguacuacgugaacaagcaggagggcaagagccuguacgugaagggcgagcccaucaucaacuucuacgacccccugguguuccccagcgacgaguucgacgccagcaucagccaggugaacgagaagaucaaccagagccuggccuucaucagaaagagcgacgagcugcugcacaacgugaacgugggcaagagcaccaccaacaucaugaucaccaccaucaucaucgugaucaucgugauccugcugcugcugaucgccgugggccuguuccuguacugcaaggccagaagcacccccgugacccugagcaaggaccagcugagcggcaucaacaacaucgccuucagcaacugaggacuaguguccaccugucccuccugggcugcuggauugucucguuuuccugccaaauaaacaggaucagcgcuuuacagaucuaaaaaaaaaaaaaaaaaaaaaaaaaaaaaaaaaaaaaaaaaaaaaaaaaaaaaaaaaaaaaaaaugcaucccccccccccccccccccccccccccccccaaaggcucuuuucagagccaccagaauu

SEQ ID NO: 12534 - RNA, 2014 nt, Artificial Sequence
  mRNA product Design b-3 comprising derived and/or modified sequence from HRSV(Memphis-37)__AIY60640.1__F0_DSCav1 (opt5)
gggagagucccgcagucggcguccagcggcucugcuuguucgugugugugucguugcaggccuuauucaagcuuaccauggagcugcccauccucaagaccaacgccauuacaacgauccuggcugccgugacccuuugcuucgcgagcucccagaauauuacagaagaguuuuaccaaucuaccuguagcgcugucuccaaaggcuaucugucugcccucagaacagggugguacaccagcguuaucacaauugaacuguccaacaucaaggagaauaaaugcaacggaaccgacgccaaggugaaacuuaucaagcaggaacuggauaaguauaaaaaugcugugacggagcuccagcugcugaugcagucuaccccugccgcuaacaaucgggcccgcagagagcucccgcgguucaugaacuacacacugaauaacaccaagaauaacaaugucacacuuagcaaaaagcgcaaaagacgguuucugggcuuccuccugggggugggauccgcgauugccagcggcaucgcuguuuguaaggugcuucaccuggaaggggaggucaacaagauuaaaaaugcccuccugucuaccaacaaggcugugguuucccugagcaacggagugucuguccucacguuuaaagugcuggaccuuaagaauuauaucgauaaacaacugcuccccauucugaacaagcaguccugcagcaucucuaauauugaaacagugaucgaguuccagcagaaaaacaaucgccuucuggagaucaccagagaauuuuccgucaacgccggcguuacaaccccugugagcaccuacaugcucacaaauuccgagcugcugucucucauuaacgacaugcccaucacgaaugaucaaaagaagcugaugagcaacaaugugcagauuguccggcagcaguccuauagcaucauguguauuaucaaagaagaggugcuugcguacguugugcaacugccucucuacggcgucaucgacacccccugcuggaagcugcauacaucuccucuuuguaccacaaacaccaaagaaggguccaauauuugccugacgcgcacagauagaggaugguauugugacaacgccggcagcgugucuuucuuuccgcaggcugagaccugcaagguucagagcaaucggguguucugugauaccaugaacucccucacacugcccucugaggucaaccugugcaauaucgacauuuuuaacccuaaauacgauugcaagaucaugaccagcaagacagacguguccagcucugucauuacgucccucggggccaucgugagcuguuauggaaaaaccaagugcacagcuucuaauaaaaaccgcggcaucauuaagaccuucuccaaugggugugauuacguuagcaacaaaggaguggacacagucuccgugggcaauacccuguauuacguuaacaagcaagaaggcaagucucuuuaugugaaaggggagcccaucauuaauuuuuacgacccucuggucuuccccagcgaugaguucgacgccuccaucucucaggugaacgaaaagauuaaucagagccucgccuuuaucagaaaauccgaugaacugcugcacaacgugaauguuggaaagagcacgaccaacauuaugaucacaaccaucauuaucgucauuaucgugauucuucuccugcugaucgcugugggccucuuccuguacugcaaagcgcggucuacaccggucacccuuuccaaggaccagcugagcgggaucaauaacauugccuuuucuaacugaggacuaguguccaccugucccuccugggcugcuggauugucucguuuuccugccaaauaaacaggaucagcgcuuuacagaucuaaaaaaaaaaaaaaaaaaaaaaaaaaaaaaaaaaaaaaaaaaaaaaaaaaaaaaaaaaaaaaaaugcaucccccccccccccccccccccccccccccccaaaggcucuuuucagagccaccagaauu

SEQ ID NO: 12535 - RNA, 2014 nt, Artificial Sequence
  mRNA product Design b-3 comprising derived and/or modified sequence from HRSV(Memphis-37)__AIY60640.1__F0_DSCav1 (opt6)
gggagagucccgcagucggcguccagcggcucugcuuguucgugugugugucguugcaggccuuauucaagcuuaccauggaacucccaauccucaaaaccaaugccauaacaaccauacucgcugcaguaaccuuauguuucgcaaguagccaaaacauaaccgaagaauuuuaucaauccacaugcuccgcaguuucuaaaggauaucuaucagcauuaagaacuggaugguacacaucuguaauaacuauagaacuaagcaauauaaaagaaaacaaauguaacggaacugacgcuaaaguaaaacuuauaaaacaagaacuagauaaauacaaaaacgccguuaccgaacuacaacuauuaaugcaaucaacaccagccgcaaauaacagagcaagacgcgaauuaccaagauucaugaauuacacacuaaacaauacaaaaaauaacaauguaacacuaucaaaaaaaagaaaacgacgauucuuaggcuuccuacuaggagucggcucagcaauagcuuccggaauagccgucuguaaaguccuacaccuugaaggcgaaguaaacaaaaucaaaaacgcacuauuaucaacaaacaaagcagucguaucuuuauccaacggagucucaguccuaacauucaaaguacucgauuuaaaaaacuacaucgauaaacaacuccuucccauucuaaacaaacaauccugcucaauauccaacaucgaaacagucauagaauuucaacaaaaaaacaaccgccugcuagaaauaacaagagaauuuuccguaaaugccggcgucaccacaccaguaucaacauacaugcuaacaaacuccgaacuacucucccuaauaaacgauaugccaaucaccaacgaccaaaaaaaacuaaugucaaauaacguucaaauagucagacaacaaucauacagcauaaugugcauaauaaaagaagaagucuuagccuacguuguacaacucccauuauacggaguuaucgauacaccaugcuggaaauuacacacaucacccuuaugcaccacaaacacaaaagaaggauccaauauuugucuaacacgaacagacagaggaugguacugugauaacgcaggaucagugucauucuuuccacaagcagaaacauguaaaguucaaucuaacagaguauucugcgacaccaugaacucccuaaccuuacccucagaaguaaaucuaugcaacauagauaucuuuaacccaaaauacgacugcaaaaucaugacaucaaaaacugacguuucuucauccguuauaacuucccucggcgcuauaguguccugcuacggaaaaacuaaaugcacagcauccaacaaaaauagaggaauaauaaaaacauuuuccaacggcugcgacuauguuucaaacaaaggaguagauaccguaucagucggcaauacauuauauuauguuaacaaacaagaaggaaaaucccuauacguaaaaggagaaccuauaaucaacuucuacgacccacucguauuccccucagacgaauuugacgcaucuauaucucaaguaaaugaaaaaauaaaccaaucacucgcauuuauccgcaaaucugacgaauuacuccauaacgucaacgucggcaaaucaaccaccaacauaaugauaacaacaauuauaauaguaauaauugucauacuacuacuccuaauagcaguaggucuauuccuauacugcaaagcaagauccacccccguaacccuuuccaaagaucaacucucaggaauaaauaacauagccuuuucaaacuaaggacuaguguccaccugucccuccugggcugcuggauugucucguuuuccugccaaauaaacaggaucagcgcuuuacagaucuaaaaaaaaaaaaaaaaaaaaaaaaaaaaaaaaaaaaaaaaaaaaaaaaaaaaaaaaaaaaaaaaugcaucccccccccccccccccccccccccccccccaaaggcucuuuucagagccaccagaauu

SEQ ID NO: 12536 - RNA, 2014 nt, Artificial Sequence
  mRNA product Design b-3 comprising derived and/or modified sequence from HRSV(Memphis-37)__AIY60640.1__F0_DSCav1 (opt11)
gggagagucccgcagucggcguccagcggcucugcuuguucgugugugugucguugcaggccuuauucaagcuuaccauggaacuccccauacucaagacuaaugccaucaccaccauccucgccgccgugacccucugcuucgcaucgucccaaaacauaacagaagaguucuaccaaagcacaugcuccgcagucuccaaaggauaccucuccgcacuacguaccggcugguacaccagcgucaucaccaucgaacuuuccaacaucaaagagaacaaaugcaacggcaccgacgccaaaguaaaacucauaaaacaagagcuagacaaauacaaaaacgccgucacagaacuccaacuacugaugcaauccacaccggccgccaacaaccgcgcucgacgugaacucccacgcuucaugaacuacacucuuaacaacaccaaaaauaacaacgucacccuauccaaaaagcgaaagcgcagauuccucggcuuccuacuuggcgucggcucggcgauagccucuggaaucgccguuugcaagguccuccaccuagaaggcgaaguaaacaaaaucaaaaacgcacuccuaagcaccaacaaagccgucgucucacuuuccaacggcgucucaguccucacauucaaaguucucgaccuaaagaacuacaucgacaagcaacuacuacccauacucaauaaacaauccugcuccaucagcaacaucgagacagucaucgaauuucaacaaaagaacaaccgccuccucgaaauuacacgcgaguucucagucaacgccggagucaccaccccagucucaacauacaugcucaccaacagcgaacuccugucucuaaucaacgacaugcccaucacuaacgaccagaagaaacucauguccaacaacguccaaaucgugcgacaacaaucauacucuaucaugugcaucaucaaagaagaaguccucgcauacgucguccagcucccacucuacggcguaaucgacacacccugcuggaaacuccacacaucaccccuaugcaccaccaacacaaaagaaggcuccaacaucugccuaacccgaaccgacagagguugguauugcgacaacgccggcucagucucauucuucccacaagccgaaaccuguaaaguccaaucaaaccgcgucuucugcgauaccaugaacucucucacacuccccuccgaagucaaucucugcaacauagacaucuucaauccaaaguacgacugcaaaauaaugaccucgaaaaccgacguaagcuccagcgucaucaccuccuuaggcgcaaucguauccugcuacggcaaaaccaaaugcaccgccucaaacaaaaacagaggcaucaucaaaacguucucgaacggaugcgacuacguuuccaauaaaggcguagauaccgucuccgucggcaacacacucuauuacgucaacaaacaagaaggcaaaucccucuacgucaaaggugaaccuaucaucaacuucuacgacccccucgucuuccccagcgacgaguucgaugccucaaucagccaagucaacgagaaaaucaaccaaucacuggcuuucauacgcaaauccgacgaacuccuccacaacgugaacgucggcaaauccacaaccaacaucaugauaaccacaauaaucaucgucauaaucguaauccuacuccuccuuauugccguaggacuauuccuauacugcaaagcccgauccacccccgucacccucucaaaagaccaacucuccggcaucaacaauauagccuucucuaacuaaggacuaguguccaccugucccuccugggcugcuggauugucucguuuuccugccaaauaaacaggaucagcgcuuuacagaucuaaaaaaaaaaaaaaaaaaaaaaaaaaaaaaaaaaaaaaaaaaaaaaaaaaaaaaaaaaaaaaaaugcaucccccccccccccccccccccccccccccccaaaggcucuuuucagagccaccagaauu

SEQ ID NO: 12537 - RNA, 2065 nt, Artificial Sequence
  mRNA product Design b-4 comprising derived and/or modified sequence from HRSV(Memphis-37)__AIY60640.1__F0_DSCav1 (opt1)
gggagagucccgcagucggcguccagcggcucugcuuguucgugugugugucguugcaggccuuauucaagcuuaccauggagcugcccauccucaagaccaacgccaucaccacgauccuggccgcggugacccugugcuucgccagcucccagaacaucaccgaggaguucuaccagagcacgugcuccgccgucagcaagggcuaccucuccgcccugcgcaccgggugguacaccagcgugaucaccaucgagcuguccaacaucaaggagaacaagugcaacggcaccgacgccaaggugaagcucaucaagcaggagcuggacaaguacaagaacgcggucacggagcugcagcuccugaugcagagcaccccggccgccaacaaccgggcccgccgggagcugccccgcuucaugaacuacacccucaacaacaccaagaacaacaacgugacgcuguccaagaagcggaagcgccgguuccugggguuccuccugggcguggggagcgcgaucgccuccggcaucgccgucugcaaggugcugcaccucgagggcgaggugaacaagaucaagaacgcccugcuguccaccaacaaggccgucgugagccucuccaacggggugagcguccugaccuucaaggugcuggaccucaagaacuacaucgacaagcagcugcugcccauccugaacaagcagagcugcuccaucagcaacaucgagaccgucaucgaguuccagcagaagaacaaccgccuccuggagaucacgcgggaguucagcgugaacgcgggcgugaccacccccgucuccaccuacaugcugacgaacagcgagcuccugucccugaucaacgacaugccgaucaccaacgaccagaagaagcucaugagcaacaacgugcagaucgugcgccagcaguccuacagcaucaugugcaucaucaaggaggagguccuggccuacguggugcagcugccccucuacggggucaucgacacccccugcuggaagcugcacaccagcccccugugcacgaccaacaccaaggagggcuccaacaucugccucacccggacggaccgcgggugguacugcgacaacgccggcagcguguccuucuucccgcaggccgagaccugcaagguccagagcaaccggguguucugcgacaccaugaacucccugacccugcccagcgaggugaaccucugcaacaucgacaucuucaaccccaaguacgacugcaagaucaugacguccaagaccgacgucagcuccagcgugaucaccucccugggcgccaucgugagcugcuacgggaagaccaagugcacggcgagcaacaagaaccgcggcaucaucaagaccuucuccaacgggugcgacuacgucagcaacaagggcguggacaccguguccgucggcaacacccuguacuacgugaacaagcaggagggcaagagccucuacgugaagggggagcccaucaucaacuucuacgacccgcuggucuuccccuccgacgaguucgacgccagcaucucccaggugaacgagaagaucaaccagagccuggccuucauccggaaguccgacgagcuccugcacaacgugaacgucggcaagagcaccacgaacaucaugaucaccaccaucaucaucgugaucaucgugauccugcugcuccugaucgccgucgggcuguuccucuacugcaaggcccgcuccacccccgugacgcugagcaaggaccagcuguccgggaucaacaacaucgcguucagcaacugaggacuaguaauaaggaaacuguaugaaugucugugggcaggaagugaagagauccuucuguaaagguuuuuggaauuaugucugcugaauaauaaacuuuuuugaaauaauaaaucugguagaaaaaugagaucuaaaaaaaaaaaaaaaaaaaaaaaaaaaaaaaaaaaaaaaaaaaaaaaaaaaaaaaaaaaaaaaaugcaucccccccccccccccccccccccccccccccaaaggcucuuuucagagccaccagaauu

SEQ ID NO: 12538 - RNA, 2065 nt, Artificial Sequence
  mRNA product Design b-4 comprising derived and/or modified sequence from HRSV(Memphis-37)__AIY60640.1__F0_DSCav1 (opt1)
gggagagucccgcagucggcguccagcggcucugcuuguucgugugugugucguugcaggccuuauucaagcuuaccauggagcugcccauccucaagaccaacgccaucaccacgauccuggccgcggugacccugugcuucgccagcucccagaacaucaccgaggaguucuaccagagcacgugcuccgccgucagcaagggcuaccucuccgcccugcgcaccgggugguacaccagcgugaucaccaucgagcuguccaacaucaaggagaacaagugcaacggcaccgacgccaaggugaagcucaucaagcaggagcuggacaaguacaagaacgcggucacggagcugcagcuccugaugcagagcaccccggccgccaacaaccgggcccgccgggagcugccccgcuucaugaacuacacccucaacaacaccaagaacaacaacgugacgcuguccaagaagcggaagcgccgguuccugggguuccuccugggcguggggagcgcgaucgccuccggcaucgccgucugcaaggugcugcaccucgagggcgaggugaacaagaucaagaacgcccugcugagcaccaacaaggccgucgugucccucagcaacgggguguccguccugaccuucaaggugcuggaccucaagaacuacaucgacaagcagcugcugcccauccucaacaagcagagcugcuccaucagcaacaucgagaccgugaucgaguuccagcagaagaacaaccgccugcuggagaucacgcgggaguucuccgucaacgcgggcgugaccacccccgugagcaccuacaugcucacgaacagcgagcugcugucccucaucaacgacaugccgaucaccaacgaccagaagaagcugaugagcaacaacguccagaucgugcgccagcaguccuacagcaucaugugcaucaucaaggaggaggugcuggccuacgucgugcagcucccccuguacggggugaucgacacccccugcuggaagcugcacaccagcccccucugcacgaccaacaccaaggagggcagcaacaucugccugacccggacggaccgcgggugguacugcgacaacgccggcuccgucagcuucuucccgcaggccgagaccugcaaggugcaguccaaccgggucuucugcgacaccaugaacagccugacccuccccuccgaggugaaccugugcaacaucgacaucuucaaccccaaguacgacugcaagaucaugacgagcaagaccgacguguccagcuccgucaucaccagccugggcgccaucguguccugcuacgggaagaccaagugcacggcgagcaacaagaaccgcggcaucaucaagaccuucuccaacgggugcgacuacgugagcaacaagggcgucgacaccgugagcgugggcaacacccucuacuacgucaacaagcaggaggggaagucccuguacgugaagggcgagcccaucaucaacuucuacgacccgcugguguuccccagcgacgaguucgacgccuccaucagccaggucaacgagaagaucaaccagucccucgccuucauccggaaguccgacgagcugcugcacaacgugaacguggggaaguccaccacgaacaucaugaucaccaccaucaucaucgucaucaucgugauccugcuccugcugaucgccgugggccucuuccuguacugcaaggcccgcagcacccccgucacgcuguccaaggaccagcucagcgggaucaacaacaucgcguucuccaacugaggacuaguaauaaggaaacuguaugaaugucugugggcaggaagugaagagauccuucuguaaagguuuuuggaauuaugucugcugaauaauaaacuuuuuugaaauaauaaaucugguagaaaaaugagaucuaaaaaaaaaaaaaaaaaaaaaaaaaaaaaaaaaaaaaaaaaaaaaaaaaaaaaaaaaaaaaaaaugcaucccccccccccccccccccccccccccccccaaaggcucuuuucagagccaccagaauu

SEQ ID NO: 12539 - RNA, 2065 nt, Artificial Sequence
  mRNA product Design b-4 comprising derived and/or modified sequence from HRSV(Memphis-37)__AIY60640.1__F0_DSCav1 (opt2)
gggagagucccgcagucggcguccagcggcucugcuuguucgugugugugucguugcaggccuuauucaagcuuaccauggagcuccccauccucaagaccaacgccaucaccaccauccucgccgccgucacccucugcuucgccuccucccagaacaucaccgaggaguucuaccaguccaccugcuccgccgucuccaagggcuaccucuccgcccuccgcaccggcugguacaccuccgucaucaccaucgagcucuccaacaucaaggagaacaagugcaacggcaccgacgccaaggucaagcucaucaagcaggagcucgacaaguacaagaacgccgucaccgagcuccagcuccucaugcaguccacccccgccgccaacaaccgcgcccgccgcgagcucccccgcuucaugaacuacacccucaacaacaccaagaacaacaacgucacccucuccaagaagcgcaagcgccgcuuccucggcuuccuccucggcgucggcuccgccaucgccuccggcaucgccgucugcaagguccuccaccucgagggcgaggucaacaagaucaagaacgcccuccucuccaccaacaaggccgucgucucccucuccaacggcgucuccguccucaccuucaagguccucgaccucaagaacuacaucgacaagcagcuccuccccauccucaacaagcaguccugcuccaucuccaacaucgagaccgucaucgaguuccagcagaagaacaaccgccuccucgagaucacccgcgaguucuccgucaacgccggcgucaccacccccgucuccaccuacaugcucaccaacuccgagcuccucucccucaucaacgacaugcccaucaccaacgaccagaagaagcucauguccaacaacguccagaucguccgccagcaguccuacuccaucaugugcaucaucaaggaggagguccucgccuacgucguccagcucccccucuacggcgucaucgacacccccugcuggaagcuccacaccuccccccucugcaccaccaacaccaaggagggcuccaacaucugccucacccgcaccgaccgcggcugguacugcgacaacgccggcuccgucuccuucuucccccaggccgagaccugcaagguccaguccaaccgcgucuucugcgacaccaugaacucccucacccuccccuccgaggucaaccucugcaacaucgacaucuucaaccccaaguacgacugcaagaucaugaccuccaagaccgacgucuccuccuccgucaucaccucccucggcgccaucgucuccugcuacggcaagaccaagugcaccgccuccaacaagaaccgcggcaucaucaagaccuucuccaacggcugcgacuacgucuccaacaagggcgucgacaccgucuccgucggcaacacccucuacuacgucaacaagcaggagggcaagucccucuacgucaagggcgagcccaucaucaacuucuacgacccccucgucuuccccuccgacgaguucgacgccuccaucucccaggucaacgagaagaucaaccagucccucgccuucauccgcaaguccgacgagcuccuccacaacgucaacgucggcaaguccaccaccaacaucaugaucaccaccaucaucaucgucaucaucgucauccuccuccuccucaucgccgucggccucuuccucuacugcaaggcccgcuccacccccgucacccucuccaaggaccagcucuccggcaucaacaacaucgccuucuccaacugaggacuaguaauaaggaaacuguaugaaugucugugggcaggaagugaagagauccuucuguaaagguuuuuggaauuaugucugcugaauaauaaacuuuuuugaaauaauaaaucugguagaaaaaugagaucuaaaaaaaaaaaaaaaaaaaaaaaaaaaaaaaaaaaaaaaaaaaaaaaaaaaaaaaaaaaaaaaaugcaucccccccccccccccccccccccccccccccaaaggcucuuuucagagccaccagaauu

SEQ ID NO: 12540 - RNA, 2065 nt, Artificial Sequence
  mRNA product Design b-4 comprising derived and/or modified sequence from HRSV(Memphis-37)__AIY60640.1__F0_DSCav1 (opt3)
gggagagucccgcagucggcguccagcggcucugcuuguucgugugugugucguugcaggccuuauucaagcuuaccauggagcugcccauccucaagaccaacgccauuacaacuauacuugcugcagugacgcugugcuucgccagcucccagaauaucaccgaagaguuuuaccaaucuacauguucagcggucaguaaaggcuauuugagcgcuuuaagaacugggugguacaccuccguuauuacaaucgaacugucuaacauuaaggagaauaaaugcaacggaaccgacgccaaggugaaacuaaucaagcaggaacucgauaaguauaaaaaugcaguaacugagcugcagcuucugaugcagucgaccccugccgcuaacaauagggcacggcgcgaguugccacgauucaugaacuacacacucaauaacacgaagaauaacaaugugacucugagcaaaaagcguaaaagaagguuucuggguuuccucuuaggcgucgggucagccauagcuaguggaaucgccguguguaagguucugcaccuugaaggcgaggugaacaagauuaaaaaugcguugcuguccaccaacaaggcagucgugucucuaagcaacgguguauccguucucacauuuaaagugcuggaccuuaagaauuauaucgauaaacaacuguugccgauucucaacaagcagucaugcaguaucagcaauauagaaacugucauugaguuccagcagaaaaacaaucggcuguuagagaucacccgcgaauuuucugugaacgccggggugacaacccccgucuccacguacaugcugacuaauucagagcuccuuagccugauuaacgacaugccuaucacaaaugaucaaaagaaguugaugaguaacaauguucagaucgugagacagcagucuuauuccauuauguguauaaucaaagaagagguacuagcuuacgugguccaacugccacucuacggagugauugacacccccugcuggaagcugcauacuagcccucuuuguacaaccaacacgaaagaaggcucgaauaucugccugaccaggacagaucggggcugguauugugacaacgccgggucuguuuccuucuuuccacaggcagagacuugcaaggugcagucaaaucgcgucuucugugauaccaugaacaguuugacacuccccagcgaggugaaccugugcaauauagacauuuuuaacccuaaauacgauugcaagaucaugacuuccaagaccgacguaucuagcucaguuaucacaaguuuaggagcuauuguguccuguuaugguaaaaccaagugcacugccagcaauaaaaaccgaggcaucauuaagacguucucuaaugggugugauuacgucucaaacaaaggaguggacacagucagugugggcaauacccuguauuacguuaacaagcaagaagguaagagccuauaugugaaaggggagccaauaaucaauuuuuacgacccgcucguauuccccuccgaugaguucgacgcgucuauuucgcaggucaacgaaaagaucaaucagagccuggccuuuaucagaaaauccgaugaacuuuugcacaacgugaauguuggaaagucaacuaccaacauuaugauaacaaccaucauuaucgugauuaucgucauacugcuccugcuuaucgcagugggccuguucuuguacugcaaagcuaggaguacuccuguaacacucucuaaggaccagcugagcggcauuaauaacaucgccuuuuccaacugaggacuaguaauaaggaaacuguaugaaugucugugggcaggaagugaagagauccuucuguaaagguuuuuggaauuaugucugcugaauaauaaacuuuuuugaaauaauaaaucugguagaaaaaugagaucuaaaaaaaaaaaaaaaaaaaaaaaaaaaaaaaaaaaaaaaaaaaaaaaaaaaaaaaaaaaaaaaaugcaucccccccccccccccccccccccccccccccaaaggcucuuuucagagccaccagaauu

SEQ ID NO: 12541 - RNA, 2065 nt, Artificial Sequence
  mRNA product Design b-4 comprising derived and/or modified sequence from HRSV(Memphis-37)__AIY60640.1__F0_DSCav1 (opt4)
gggagagucccgcagucggcguccagcggcucugcuuguucgugugugugucguugcaggccuuauucaagcuuaccauggagcugcccauccugaagaccaacgccaucaccaccauccuggccgccgugacccugugcuucgccagcagccagaacaucaccgaggaguucuaccagagcaccugcagcgccgugagcaagggcuaccugagcgcccugagaaccggcugguacaccagcgugaucaccaucgagcugagcaacaucaaggagaacaagugcaacggcaccgacgccaaggugaagcugaucaagcaggagcuggacaaguacaagaacgccgugaccgagcugcagcugcugaugcagagcacccccgccgccaacaacagagccagaagagagcugcccagauucaugaacuacacccugaacaacaccaagaacaacaacgugacccugagcaagaagagaaagagaagauuccugggcuuccugcugggcgugggcagcgccaucgccagcggcaucgccgugugcaaggugcugcaccuggagggcgaggugaacaagaucaagaacgcccugcugagcaccaacaaggccguggugagccugagcaacggcgugagcgugcugaccuucaaggugcuggaccugaagaacuacaucgacaagcagcugcugcccauccugaacaagcagagcugcagcaucagcaacaucgagaccgugaucgaguuccagcagaagaacaacagacugcuggagaucaccagagaguucagcgugaacgccggcgugaccacccccgugagcaccuacaugcugaccaacagcgagcugcugagccugaucaacgacaugcccaucaccaacgaccagaagaagcugaugagcaacaacgugcagaucgugagacagcagagcuacagcaucaugugcaucaucaaggaggaggugcuggccuacguggugcagcugccccuguacggcgugaucgacacccccugcuggaagcugcacaccagcccccugugcaccaccaacaccaaggagggcagcaacaucugccugaccagaaccgacagaggcugguacugcgacaacgccggcagcgugagcuucuucccccaggccgagaccugcaaggugcagagcaacagaguguucugcgacaccaugaacagccugacccugcccagcgaggugaaccugugcaacaucgacaucuucaaccccaaguacgacugcaagaucaugaccagcaagaccgacgugagcagcagcgugaucaccagccugggcgccaucgugagcugcuacggcaagaccaagugcaccgccagcaacaagaacagaggcaucaucaagaccuucagcaacggcugcgacuacgugagcaacaagggcguggacaccgugagcgugggcaacacccuguacuacgugaacaagcaggagggcaagagccuguacgugaagggcgagcccaucaucaacuucuacgacccccugguguuccccagcgacgaguucgacgccagcaucagccaggugaacgagaagaucaaccagagccuggccuucaucagaaagagcgacgagcugcugcacaacgugaacgugggcaagagcaccaccaacaucaugaucaccaccaucaucaucgugaucaucgugauccugcugcugcugaucgccgugggccuguuccuguacugcaaggccagaagcacccccgugacccugagcaaggaccagcugagcggcaucaacaacaucgccuucagcaacugaggacuaguaauaaggaaacuguaugaaugucugugggcaggaagugaagagauccuucuguaaagguuuuuggaauuaugucugcugaauaauaaacuuuuuugaaauaauaaaucugguagaaaaaugagaucuaaaaaaaaaaaaaaaaaaaaaaaaaaaaaaaaaaaaaaaaaaaaaaaaaaaaaaaaaaaaaaaaugcaucccccccccccccccccccccccccccccccaaaggcucuuuucagagccaccagaauu

SEQ ID NO: 12542 - RNA, 2065 nt, Artificial Sequence
  mRNA product Design b-4 comprising derived and/or modified sequence from HRSV(Memphis-37)__AIY60640.1__F0_DSCav1 (opt5)
gggagagucccgcagucggcguccagcggcucugcuuguucgugugugugucguugcaggccuuauucaagcuuaccauggagcugcccauccucaagaccaacgccauuacaacgauccuggcugccgugacccuuugcuucgcgagcucccagaauauuacagaagaguuuuaccaaucuaccuguagcgcugucuccaaaggcuaucugucugcccucagaacagggugguacaccagcguuaucacaauugaacuguccaacaucaaggagaauaaaugcaacggaaccgacgccaaggugaaacuuaucaagcaggaacuggauaaguauaaaaaugcugugacggagcuccagcugcugaugcagucuaccccugccgcuaacaaucgggcccgcagagagcucccgcgguucaugaacuacacacugaauaacaccaagaauaacaaugucacacuuagcaaaaagcgcaaaagacgguuucugggcuuccuccugggggugggauccgcgauugccagcggcaucgcuguuuguaaggugcuucaccuggaaggggaggucaacaagauuaaaaaugcccuccugucuaccaacaaggcugugguuucccugagcaacggagugucuguccucacguuuaaagugcuggaccuuaagaauuauaucgauaaacaacugcuccccauucugaacaagcaguccugcagcaucucuaauauugaaacagugaucgaguuccagcagaaaaacaaucgccuucuggagaucaccagagaauuuuccgucaacgccggcguuacaaccccugugagcaccuacaugcucacaaauuccgagcugcugucucucauuaacgacaugcccaucacgaaugaucaaaagaagcugaugagcaacaaugugcagauuguccggcagcaguccuauagcaucauguguauuaucaaagaagaggugcuugcguacguugugcaacugccucucuacggcgucaucgacacccccugcuggaagcugcauacaucuccucuuuguaccacaaacaccaaagaaggguccaauauuugccugacgcgcacagauagaggaugguauugugacaacgccggcagcgugucuuucuuuccgcaggcugagaccugcaagguucagagcaaucggguguucugugauaccaugaacucccucacacugcccucugaggucaaccugugcaauaucgacauuuuuaacccuaaauacgauugcaagaucaugaccagcaagacagacguguccagcucugucauuacgucccucggggccaucgugagcuguuauggaaaaaccaagugcacagcuucuaauaaaaaccgcggcaucauuaagaccuucuccaaugggugugauuacguuagcaacaaaggaguggacacagucuccgugggcaauacccuguauuacguuaacaagcaagaaggcaagucucuuuaugugaaaggggagcccaucauuaauuuuuacgacccucuggucuuccccagcgaugaguucgacgccuccaucucucaggugaacgaaaagauuaaucagagccucgccuuuaucagaaaauccgaugaacugcugcacaacgugaauguuggaaagagcacgaccaacauuaugaucacaaccaucauuaucgucauuaucgugauucuucuccugcugaucgcugugggccucuuccuguacugcaaagcgcggucuacaccggucacccuuuccaaggaccagcugagcgggaucaauaacauugccuuuucuaacugaggacuaguaauaaggaaacuguaugaaugucugugggcaggaagugaagagauccuucuguaaagguuuuuggaauuaugucugcugaauaauaaacuuuuuugaaauaauaaaucugguagaaaaaugagaucuaaaaaaaaaaaaaaaaaaaaaaaaaaaaaaaaaaaaaaaaaaaaaaaaaaaaaaaaaaaaaaaaugcaucccccccccccccccccccccccccccccccaaaggcucuuuucagagccaccagaauu

SEQ ID NO: 12543 - RNA, 2065 nt, Artificial Sequence
  mRNA product Design b-4 comprising derived and/or modified sequence from HRSV(Memphis-37)__AIY60640.1__F0_DSCav1 (opt6)
gggagagucccgcagucggcguccagcggcucugcuuguucgugugugugucguugcaggccuuauucaagcuuaccauggaacucccaauccucaaaaccaaugccauaacaaccauacucgcugcaguaaccuuauguuucgcaaguagccaaaacauaaccgaagaauuuuaucaauccacaugcuccgcaguuucuaaaggauaucuaucagcauuaagaacuggaugguacacaucuguaauaacuauagaacuaagcaauauaaaagaaaacaaauguaacggaacugacgcuaaaguaaaacuuauaaaacaagaacuagauaaauacaaaaacgccguuaccgaacuacaacuauuaaugcaaucaacaccagccgcaaauaacagagcaagacgcgaauuaccaagauucaugaauuacacacuaaacaauacaaaaaauaacaauguaacacuaucaaaaaaaagaaaacgacgauucuuaggcuuccuacuaggagucggcucagcaauagcuuccggaauagccgucuguaaaguccuacaccuugaaggcgaaguaaacaaaaucaaaaacgcacuauuaucaacaaacaaagcagucguaucuuuauccaacggagucucaguccuaacauucaaaguacucgauuuaaaaaacuacaucgauaaacaacuccuucccauucuaaacaaacaauccugcucaauauccaacaucgaaacagucauagaauuucaacaaaaaaacaaccgccugcuagaaauaacaagagaauuuuccguaaaugccggcgucaccacaccaguaucaacauacaugcuaacaaacuccgaacuacucucccuaauaaacgauaugccaaucaccaacgaccaaaaaaaacuaaugucaaauaacguucaaauagucagacaacaaucauacagcauaaugugcauaauaaaagaagaagucuuagccuacguuguacaacucccauuauacggaguuaucgauacaccaugcuggaaauuacacacaucacccuuaugcaccacaaacacaaaagaaggauccaauauuugucuaacacgaacagacagaggaugguacugugauaacgcaggaucagugucauucuuuccacaagcagaaacauguaaaguucaaucuaacagaguauucugcgacaccaugaacucccuaaccuuacccucagaaguaaaucuaugcaacauagauaucuuuaacccaaaauacgacugcaaaaucaugacaucaaaaacugacguuucuucauccguuauaacuucccucggcgcuauaguguccugcuacggaaaaacuaaaugcacagcauccaacaaaaauagaggaauaauaaaaacauuuuccaacggcugcgacuauguuucaaacaaaggaguagauaccguaucagucggcaauacauuauauuauguuaacaaacaagaaggaaaaucccuauacguaaaaggagaaccuauaaucaacuucuacgacccacucguauuccccucagacgaauuugacgcaucuauaucucaaguaaaugaaaaaauaaaccaaucacucgcauuuauccgcaaaucugacgaauuacuccauaacgucaacgucggcaaaucaaccaccaacauaaugauaacaacaauuauaauaguaauaauugucauacuacuacuccuaauagcaguaggucuauuccuauacugcaaagcaagauccacccccguaacccuuuccaaagaucaacucucaggaauaaauaacauagccuuuucaaacuaaggacuaguaauaaggaaacuguaugaaugucugugggcaggaagugaagagauccuucuguaaagguuuuuggaauuaugucugcugaauaauaaacuuuuuugaaauaauaaaucugguagaaaaaugagaucuaaaaaaaaaaaaaaaaaaaaaaaaaaaaaaaaaaaaaaaaaaaaaaaaaaaaaaaaaaaaaaaaugcaucccccccccccccccccccccccccccccccaaaggcucuuuucagagccaccagaauu

SEQ ID NO: 12544 - RNA, 2065 nt, Artificial Sequence
  mRNA product Design b-4 comprising derived and/or modified sequence from HRSV(Memphis-37)__AIY60640.1__F0_DSCav1 (opt11)
gggagagucccgcagucggcguccagcggcucugcuuguucgugugugugucguugcaggccuuauucaagcuuaccauggaacuccccauacucaagacuaaugccaucaccaccauccucgccgccgugacccucugcuucgcaucgucccaaaacauaacagaagaguucuaccaaagcacaugcuccgcagucuccaaaggauaccucuccgcacuacguaccggcugguacaccagcgucaucaccaucgaacuuuccaacaucaaagagaacaaaugcaacggcaccgacgccaaaguaaaacucauaaaacaagagcuagacaaauacaaaaacgccgucacagaacuccaacuacugaugcaauccacaccggccgccaacaaccgcgcucgacgugaacucccacgcuucaugaacuacacucuuaacaacaccaaaaauaacaacgucacccuauccaaaaagcgaaagcgcagauuccucggcuuccuacuuggcgucggcucggcgauagccucuggaaucgccguuugcaagguccuccaccuagaaggcgaaguaaacaaaaucaaaaacgcacuccuaagcaccaacaaagccgucgucucacuuuccaacggcgucucaguccucacauucaaaguucucgaccuaaagaacuacaucgacaagcaacuacuacccauacucaauaaacaauccugcuccaucagcaacaucgagacagucaucgaauuucaacaaaagaacaaccgccuccucgaaauuacacgcgaguucucagucaacgccggagucaccaccccagucucaacauacaugcucaccaacagcgaacuccugucucuaaucaacgacaugcccaucacuaacgaccagaagaaacucauguccaacaacguccaaaucgugcgacaacaaucauacucuaucaugugcaucaucaaagaagaaguccucgcauacgucguccagcucccacucuacggcguaaucgacacacccugcuggaaacuccacacaucaccccuaugcaccaccaacacaaaagaaggcuccaacaucugccuaacccgaaccgacagagguugguauugcgacaacgccggcucagucucauucuucccacaagccgaaaccuguaaaguccaaucaaaccgcgucuucugcgauaccaugaacucucucacacuccccuccgaagucaaucucugcaacauagacaucuucaauccaaaguacgacugcaaaauaaugaccucgaaaaccgacguaagcuccagcgucaucaccuccuuaggcgcaaucguauccugcuacggcaaaaccaaaugcaccgccucaaacaaaaacagaggcaucaucaaaacguucucgaacggaugcgacuacguuuccaauaaaggcguagauaccgucuccgucggcaacacacucuauuacgucaacaaacaagaaggcaaaucccucuacgucaaaggugaaccuaucaucaacuucuacgacccccucgucuuccccagcgacgaguucgaugccucaaucagccaagucaacgagaaaaucaaccaaucacuggcuuucauacgcaaauccgacgaacuccuccacaacgugaacgucggcaaauccacaaccaacaucaugauaaccacaauaaucaucgucauaaucguaauccuacuccuccuuauugccguaggacuauuccuauacugcaaagcccgauccacccccgucacccucucaaaagaccaacucuccggcaucaacaauauagccuucucuaacuaaggacuaguaauaaggaaacuguaugaaugucugugggcaggaagugaagagauccuucuguaaagguuuuuggaauuaugucugcugaauaauaaacuuuuuugaaauaauaaaucugguagaaaaaugagaucuaaaaaaaaaaaaaaaaaaaaaaaaaaaaaaaaaaaaaaaaaaaaaaaaaaaaaaaaaaaaaaaaugcaucccccccccccccccccccccccccccccccaaaggcucuuuucagagccaccagaauu

SEQ ID NO: 12545 - RNA, 2127 nt, Artificial Sequence
  mRNA product Design b-5 comprising derived and/or modified sequence from HRSV(Memphis-37)__AIY60640.1__F0_DSCav1 (opt1)
gggagacuccugucgggcggaaguaggaggaguagaguuuaaaaacaguacucuuuuuccgguucgggacguaguugaagcaacgacaagccggauaaccgcucuugagacaggaagcuuaccauggagcugcccauccucaagaccaacgccaucaccacgauccuggccgcggugacccugugcuucgccagcucccagaacaucaccgaggaguucuaccagagcacgugcuccgccgucagcaagggcuaccucuccgcccugcgcaccgggugguacaccagcgugaucaccaucgagcuguccaacaucaaggagaacaagugcaacggcaccgacgccaaggugaagcucaucaagcaggagcuggacaaguacaagaacgcggucacggagcugcagcuccugaugcagagcaccccggccgccaacaaccgggcccgccgggagcugccccgcuucaugaacuacacccucaacaacaccaagaacaacaacgugacgcuguccaagaagcggaagcgccgguuccugggguuccuccugggcguggggagcgcgaucgccuccggcaucgccgucugcaaggugcugcaccucgagggcgaggugaacaagaucaagaacgcccugcuguccaccaacaaggccgucgugagccucuccaacggggugagcguccugaccuucaaggugcuggaccucaagaacuacaucgacaagcagcugcugcccauccugaacaagcagagcugcuccaucagcaacaucgagaccgucaucgaguuccagcagaagaacaaccgccuccuggagaucacgcgggaguucagcgugaacgcgggcgugaccacccccgucuccaccuacaugcugacgaacagcgagcuccugucccugaucaacgacaugccgaucaccaacgaccagaagaagcucaugagcaacaacgugcagaucgugcgccagcaguccuacagcaucaugugcaucaucaaggaggagguccuggccuacguggugcagcugccccucuacggggucaucgacacccccugcuggaagcugcacaccagcccccugugcacgaccaacaccaaggagggcuccaacaucugccucacccggacggaccgcgggugguacugcgacaacgccggcagcguguccuucuucccgcaggccgagaccugcaagguccagagcaaccggguguucugcgacaccaugaacucccugacccugcccagcgaggugaaccucugcaacaucgacaucuucaaccccaaguacgacugcaagaucaugacguccaagaccgacgucagcuccagcgugaucaccucccugggcgccaucgugagcugcuacgggaagaccaagugcacggcgagcaacaagaaccgcggcaucaucaagaccuucuccaacgggugcgacuacgucagcaacaagggcguggacaccguguccgucggcaacacccuguacuacgugaacaagcaggagggcaagagccucuacgugaagggggagcccaucaucaacuucuacgacccgcuggucuuccccuccgacgaguucgacgccagcaucucccaggugaacgagaagaucaaccagagccuggccuucauccggaaguccgacgagcuccugcacaacgugaacgucggcaagagcaccacgaacaucaugaucaccaccaucaucaucgugaucaucgugauccugcugcuccugaucgccgucgggcuguuccucuacugcaaggcccgcuccacccccgugacgcugagcaaggaccagcuguccgggaucaacaacaucgcguucagcaacugaggacuaguacuggcugcaucucccuuuccucuguccuccauccuucucccaggauggugaagggggaccugguacccagugauccccaccccaggauccuaaaucaugacuuaccugcuaauaaaaacucauuggaaaagugagaagaucuaaaaaaaaaaaaaaaaaaaaaaaaaaaaaaaaaaaaaaaaaaaaaaaaaaaaaaaaaaaaaaaaugcaucccccccccccccccccccccccccccccccaaaggcucuuuucagagccaccagaauu

SEQ ID NO: 12546 - RNA, 2127 nt, Artificial Sequence
  mRNA product Design b-5 comprising derived and/or modified sequence from HRSV(Memphis-37)__AIY60640.1__F0_DSCav1 (opt1)
gggagacuccugucgggcggaaguaggaggaguagaguuuaaaaacaguacucuuuuuccgguucgggacguaguugaagcaacgacaagccggauaaccgcucuugagacaggaagcuuaccauggagcugcccauccucaagaccaacgccaucaccacgauccuggccgcggugacccugugcuucgccagcucccagaacaucaccgaggaguucuaccagagcacgugcuccgccgucagcaagggcuaccucuccgcccugcgcaccgggugguacaccagcgugaucaccaucgagcuguccaacaucaaggagaacaagugcaacggcaccgacgccaaggugaagcucaucaagcaggagcuggacaaguacaagaacgcggucacggagcugcagcuccugaugcagagcaccccggccgccaacaaccgggcccgccgggagcugccccgcuucaugaacuacacccucaacaacaccaagaacaacaacgugacgcuguccaagaagcggaagcgccgguuccugggguuccuccugggcguggggagcgcgaucgccuccggcaucgccgucugcaaggugcugcaccucgagggcgaggugaacaagaucaagaacgcccugcugagcaccaacaaggccgucgugucccucagcaacgggguguccguccugaccuucaaggugcuggaccucaagaacuacaucgacaagcagcugcugcccauccucaacaagcagagcugcuccaucagcaacaucgagaccgugaucgaguuccagcagaagaacaaccgccugcuggagaucacgcgggaguucuccgucaacgcgggcgugaccacccccgugagcaccuacaugcucacgaacagcgagcugcugucccucaucaacgacaugccgaucaccaacgaccagaagaagcugaugagcaacaacguccagaucgugcgccagcaguccuacagcaucaugugcaucaucaaggaggaggugcuggccuacgucgugcagcucccccuguacggggugaucgacacccccugcuggaagcugcacaccagcccccucugcacgaccaacaccaaggagggcagcaacaucugccugacccggacggaccgcgggugguacugcgacaacgccggcuccgucagcuucuucccgcaggccgagaccugcaaggugcaguccaaccgggucuucugcgacaccaugaacagccugacccuccccuccgaggugaaccugugcaacaucgacaucuucaaccccaaguacgacugcaagaucaugacgagcaagaccgacguguccagcuccgucaucaccagccugggcgccaucguguccugcuacgggaagaccaagugcacggcgagcaacaagaaccgcggcaucaucaagaccuucuccaacgggugcgacuacgugagcaacaagggcgucgacaccgugagcgugggcaacacccucuacuacgucaacaagcaggaggggaagucccuguacgugaagggcgagcccaucaucaacuucuacgacccgcugguguuccccagcgacgaguucgacgccuccaucagccaggucaacgagaagaucaaccagucccucgccuucauccggaaguccgacgagcugcugcacaacgugaacguggggaaguccaccacgaacaucaugaucaccaccaucaucaucgucaucaucgugauccugcuccugcugaucgccgugggccucuuccuguacugcaaggcccgcagcacccccgucacgcuguccaaggaccagcucagcgggaucaacaacaucgcguucuccaacugaggacuaguacuggcugcaucucccuuuccucuguccuccauccuucucccaggauggugaagggggaccugguacccagugauccccaccccaggauccuaaaucaugacuuaccugcuaauaaaaacucauuggaaaagugagaagaucuaaaaaaaaaaaaaaaaaaaaaaaaaaaaaaaaaaaaaaaaaaaaaaaaaaaaaaaaaaaaaaaaugcaucccccccccccccccccccccccccccccccaaaggcucuuuucagagccaccagaauu

SEQ ID NO: 12547 - RNA, 2127 nt, Artificial Sequence
  mRNA product Design b-5 comprising derived and/or modified sequence from HRSV(Memphis-37)__AIY60640.1__F0_DSCav1 (opt2)
gggagacuccugucgggcggaaguaggaggaguagaguuuaaaaacaguacucuuuuuccgguucgggacguaguugaagcaacgacaagccggauaaccgcucuugagacaggaagcuuaccauggagcuccccauccucaagaccaacgccaucaccaccauccucgccgccgucacccucugcuucgccuccucccagaacaucaccgaggaguucuaccaguccaccugcuccgccgucuccaagggcuaccucuccgcccuccgcaccggcugguacaccuccgucaucaccaucgagcucuccaacaucaaggagaacaagugcaacggcaccgacgccaaggucaagcucaucaagcaggagcucgacaaguacaagaacgccgucaccgagcuccagcuccucaugcaguccacccccgccgccaacaaccgcgcccgccgcgagcucccccgcuucaugaacuacacccucaacaacaccaagaacaacaacgucacccucuccaagaagcgcaagcgccgcuuccucggcuuccuccucggcgucggcuccgccaucgccuccggcaucgccgucugcaagguccuccaccucgagggcgaggucaacaagaucaagaacgcccuccucuccaccaacaaggccgucgucucccucuccaacggcgucuccguccucaccuucaagguccucgaccucaagaacuacaucgacaagcagcuccuccccauccucaacaagcaguccugcuccaucuccaacaucgagaccgucaucgaguuccagcagaagaacaaccgccuccucgagaucacccgcgaguucuccgucaacgccggcgucaccacccccgucuccaccuacaugcucaccaacuccgagcuccucucccucaucaacgacaugcccaucaccaacgaccagaagaagcucauguccaacaacguccagaucguccgccagcaguccuacuccaucaugugcaucaucaaggaggagguccucgccuacgucguccagcucccccucuacggcgucaucgacacccccugcuggaagcuccacaccuccccccucugcaccaccaacaccaaggagggcuccaacaucugccucacccgcaccgaccgcggcugguacugcgacaacgccggcuccgucuccuucuucccccaggccgagaccugcaagguccaguccaaccgcgucuucugcgacaccaugaacucccucacccuccccuccgaggucaaccucugcaacaucgacaucuucaaccccaaguacgacugcaagaucaugaccuccaagaccgacgucuccuccuccgucaucaccucccucggcgccaucgucuccugcuacggcaagaccaagugcaccgccuccaacaagaaccgcggcaucaucaagaccuucuccaacggcugcgacuacgucuccaacaagggcgucgacaccgucuccgucggcaacacccucuacuacgucaacaagcaggagggcaagucccucuacgucaagggcgagcccaucaucaacuucuacgacccccucgucuuccccuccgacgaguucgacgccuccaucucccaggucaacgagaagaucaaccagucccucgccuucauccgcaaguccgacgagcuccuccacaacgucaacgucggcaaguccaccaccaacaucaugaucaccaccaucaucaucgucaucaucgucauccuccuccuccucaucgccgucggccucuuccucuacugcaaggcccgcuccacccccgucacccucuccaaggaccagcucuccggcaucaacaacaucgccuucuccaacugaggacuaguacuggcugcaucucccuuuccucuguccuccauccuucucccaggauggugaagggggaccugguacccagugauccccaccccaggauccuaaaucaugacuuaccugcuaauaaaaacucauuggaaaagugagaagaucuaaaaaaaaaaaaaaaaaaaaaaaaaaaaaaaaaaaaaaaaaaaaaaaaaaaaaaaaaaaaaaaaugcaucccccccccccccccccccccccccccccccaaaggcucuuuucagagccaccagaauu

SEQ ID NO: 12548 - RNA, 2127 nt, Artificial Sequence
  mRNA product Design b-5 comprising derived and/or modified sequence from HRSV(Memphis-37)__AIY60640.1__F0_DSCav1 (opt3)
gggagacuccugucgggcggaaguaggaggaguagaguuuaaaaacaguacucuuuuuccgguucgggacguaguugaagcaacgacaagccggauaaccgcucuugagacaggaagcuuaccauggagcugcccauccucaagaccaacgccauuacaacuauacuugcugcagugacgcugugcuucgccagcucccagaauaucaccgaagaguuuuaccaaucuacauguucagcggucaguaaaggcuauuugagcgcuuuaagaacugggugguacaccuccguuauuacaaucgaacugucuaacauuaaggagaauaaaugcaacggaaccgacgccaaggugaaacuaaucaagcaggaacucgauaaguauaaaaaugcaguaacugagcugcagcuucugaugcagucgaccccugccgcuaacaauagggcacggcgcgaguugccacgauucaugaacuacacacucaauaacacgaagaauaacaaugugacucugagcaaaaagcguaaaagaagguuucuggguuuccucuuaggcgucgggucagccauagcuaguggaaucgccguguguaagguucugcaccuugaaggcgaggugaacaagauuaaaaaugcguugcuguccaccaacaaggcagucgugucucuaagcaacgguguauccguucucacauuuaaagugcuggaccuuaagaauuauaucgauaaacaacuguugccgauucucaacaagcagucaugcaguaucagcaauauagaaacugucauugaguuccagcagaaaaacaaucggcuguuagagaucacccgcgaauuuucugugaacgccggggugacaacccccgucuccacguacaugcugacuaauucagagcuccuuagccugauuaacgacaugccuaucacaaaugaucaaaagaaguugaugaguaacaauguucagaucgugagacagcagucuuauuccauuauguguauaaucaaagaagagguacuagcuuacgugguccaacugccacucuacggagugauugacacccccugcuggaagcugcauacuagcccucuuuguacaaccaacacgaaagaaggcucgaauaucugccugaccaggacagaucggggcugguauugugacaacgccgggucuguuuccuucuuuccacaggcagagacuugcaaggugcagucaaaucgcgucuucugugauaccaugaacaguuugacacuccccagcgaggugaaccugugcaauauagacauuuuuaacccuaaauacgauugcaagaucaugacuuccaagaccgacguaucuagcucaguuaucacaaguuuaggagcuauuguguccuguuaugguaaaaccaagugcacugccagcaauaaaaaccgaggcaucauuaagacguucucuaaugggugugauuacgucucaaacaaaggaguggacacagucagugugggcaauacccuguauuacguuaacaagcaagaagguaagagccuauaugugaaaggggagccaauaaucaauuuuuacgacccgcucguauuccccuccgaugaguucgacgcgucuauuucgcaggucaacgaaaagaucaaucagagccuggccuuuaucagaaaauccgaugaacuuuugcacaacgugaauguuggaaagucaacuaccaacauuaugauaacaaccaucauuaucgugauuaucgucauacugcuccugcuuaucgcagugggccuguucuuguacugcaaagcuaggaguacuccuguaacacucucuaaggaccagcugagcggcauuaauaacaucgccuuuuccaacugaggacuaguacuggcugcaucucccuuuccucuguccuccauccuucucccaggauggugaagggggaccugguacccagugauccccaccccaggauccuaaaucaugacuuaccugcuaauaaaaacucauuggaaaagugagaagaucuaaaaaaaaaaaaaaaaaaaaaaaaaaaaaaaaaaaaaaaaaaaaaaaaaaaaaaaaaaaaaaaaugcaucccccccccccccccccccccccccccccccaaaggcucuuuucagagccaccagaauu

SEQ ID NO: 12549 - RNA, 2127 nt, Artificial Sequence
  mRNA product Design b-5 comprising derived and/or modified sequence from HRSV(Memphis-37)__AIY60640.1__F0_DSCav1 (opt4)
gggagacuccugucgggcggaaguaggaggaguagaguuuaaaaacaguacucuuuuuccgguucgggacguaguugaagcaacgacaagccggauaaccgcucuugagacaggaagcuuaccauggagcugcccauccugaagaccaacgccaucaccaccauccuggccgccgugacccugugcuucgccagcagccagaacaucaccgaggaguucuaccagagcaccugcagcgccgugagcaagggcuaccugagcgcccugagaaccggcugguacaccagcgugaucaccaucgagcugagcaacaucaaggagaacaagugcaacggcaccgacgccaaggugaagcugaucaagcaggagcuggacaaguacaagaacgccgugaccgagcugcagcugcugaugcagagcacccccgccgccaacaacagagccagaagagagcugcccagauucaugaacuacacccugaacaacaccaagaacaacaacgugacccugagcaagaagagaaagagaagauuccugggcuuccugcugggcgugggcagcgccaucgccagcggcaucgccgugugcaaggugcugcaccuggagggcgaggugaacaagaucaagaacgcccugcugagcaccaacaaggccguggugagccugagcaacggcgugagcgugcugaccuucaaggugcuggaccugaagaacuacaucgacaagcagcugcugcccauccugaacaagcagagcugcagcaucagcaacaucgagaccgugaucgaguuccagcagaagaacaacagacugcuggagaucaccagagaguucagcgugaacgccggcgugaccacccccgugagcaccuacaugcugaccaacagcgagcugcugagccugaucaacgacaugcccaucaccaacgaccagaagaagcugaugagcaacaacgugcagaucgugagacagcagagcuacagcaucaugugcaucaucaaggaggaggugcuggccuacguggugcagcugccccuguacggcgugaucgacacccccugcuggaagcugcacaccagcccccugugcaccaccaacaccaaggagggcagcaacaucugccugaccagaaccgacagaggcugguacugcgacaacgccggcagcgugagcuucuucccccaggccgagaccugcaaggugcagagcaacagaguguucugcgacaccaugaacagccugacccugcccagcgaggugaaccugugcaacaucgacaucuucaaccccaaguacgacugcaagaucaugaccagcaagaccgacgugagcagcagcgugaucaccagccugggcgccaucgugagcugcuacggcaagaccaagugcaccgccagcaacaagaacagaggcaucaucaagaccuucagcaacggcugcgacuacgugagcaacaagggcguggacaccgugagcgugggcaacacccuguacuacgugaacaagcaggagggcaagagccuguacgugaagggcgagcccaucaucaacuucuacgacccccugguguuccccagcgacgaguucgacgccagcaucagccaggugaacgagaagaucaaccagagccuggccuucaucagaaagagcgacgagcugcugcacaacgugaacgugggcaagagcaccaccaacaucaugaucaccaccaucaucaucgugaucaucgugauccugcugcugcugaucgccgugggccuguuccuguacugcaaggccagaagcacccccgugacccugagcaaggaccagcugagcggcaucaacaacaucgccuucagcaacugaggacuaguacuggcugcaucucccuuuccucuguccuccauccuucucccaggauggugaagggggaccugguacccagugauccccaccccaggauccuaaaucaugacuuaccugcuaauaaaaacucauuggaaaagugagaagaucuaaaaaaaaaaaaaaaaaaaaaaaaaaaaaaaaaaaaaaaaaaaaaaaaaaaaaaaaaaaaaaaaugcaucccccccccccccccccccccccccccccccaaaggcucuuuucagagccaccagaauu

SEQ ID NO: 12550 - RNA, 2127 nt, Artificial Sequence
  mRNA product Design b-5 comprising derived and/or modified sequence from HRSV(Memphis-37)__AIY60640.1__F0_DSCav1 (opt5)
gggagacuccugucgggcggaaguaggaggaguagaguuuaaaaacaguacucuuuuuccgguucgggacguaguugaagcaacgacaagccggauaaccgcucuugagacaggaagcuuaccauggagcugcccauccucaagaccaacgccauuacaacgauccuggcugccgugacccuuugcuucgcgagcucccagaauauuacagaagaguuuuaccaaucuaccuguagcgcugucuccaaaggcuaucugucugcccucagaacagggugguacaccagcguuaucacaauugaacuguccaacaucaaggagaauaaaugcaacggaaccgacgccaaggugaaacuuaucaagcaggaacuggauaaguauaaaaaugcugugacggagcuccagcugcugaugcagucuaccccugccgcuaacaaucgggcccgcagagagcucccgcgguucaugaacuacacacugaauaacaccaagaauaacaaugucacacuuagcaaaaagcgcaaaagacgguuucugggcuuccuccugggggugggauccgcgauugccagcggcaucgcuguuuguaaggugcuucaccuggaaggggaggucaacaagauuaaaaaugcccuccugucuaccaacaaggcugugguuucccugagcaacggagugucuguccucacguuuaaagugcuggaccuuaagaauuauaucgauaaacaacugcuccccauucugaacaagcaguccugcagcaucucuaauauugaaacagugaucgaguuccagcagaaaaacaaucgccuucuggagaucaccagagaauuuuccgucaacgccggcguuacaaccccugugagcaccuacaugcucacaaauuccgagcugcugucucucauuaacgacaugcccaucacgaaugaucaaaagaagcugaugagcaacaaugugcagauuguccggcagcaguccuauagcaucauguguauuaucaaagaagaggugcuugcguacguugugcaacugccucucuacggcgucaucgacacccccugcuggaagcugcauacaucuccucuuuguaccacaaacaccaaagaaggguccaauauuugccugacgcgcacagauagaggaugguauugugacaacgccggcagcgugucuuucuuuccgcaggcugagaccugcaagguucagagcaaucggguguucugugauaccaugaacucccucacacugcccucugaggucaaccugugcaauaucgacauuuuuaacccuaaauacgauugcaagaucaugaccagcaagacagacguguccagcucugucauuacgucccucggggccaucgugagcuguuauggaaaaaccaagugcacagcuucuaauaaaaaccgcggcaucauuaagaccuucuccaaugggugugauuacguuagcaacaaaggaguggacacagucuccgugggcaauacccuguauuacguuaacaagcaagaaggcaagucucuuuaugugaaaggggagcccaucauuaauuuuuacgacccucuggucuuccccagcgaugaguucgacgccuccaucucucaggugaacgaaaagauuaaucagagccucgccuuuaucagaaaauccgaugaacugcugcacaacgugaauguuggaaagagcacgaccaacauuaugaucacaaccaucauuaucgucauuaucgugauucuucuccugcugaucgcugugggccucuuccuguacugcaaagcgcggucuacaccggucacccuuuccaaggaccagcugagcgggaucaauaacauugccuuuucuaacugaggacuaguacuggcugcaucucccuuuccucuguccuccauccuucucccaggauggugaagggggaccugguacccagugauccccaccccaggauccuaaaucaugacuuaccugcuaauaaaaacucauuggaaaagugagaagaucuaaaaaaaaaaaaaaaaaaaaaaaaaaaaaaaaaaaaaaaaaaaaaaaaaaaaaaaaaaaaaaaaugcaucccccccccccccccccccccccccccccccaaaggcucuuuucagagccaccagaauu

SEQ ID NO: 12551 - RNA, 2127 nt, Artificial Sequence
  mRNA product Design b-5 comprising derived and/or modified sequence from HRSV(Memphis-37)__AIY60640.1__F0_DSCav1 (opt6)
gggagacuccugucgggcggaaguaggaggaguagaguuuaaaaacaguacucuuuuuccgguucgggacguaguugaagcaacgacaagccggauaaccgcucuugagacaggaagcuuaccauggaacucccaauccucaaaaccaaugccauaacaaccauacucgcugcaguaaccuuauguuucgcaaguagccaaaacauaaccgaagaauuuuaucaauccacaugcuccgcaguuucuaaaggauaucuaucagcauuaagaacuggaugguacacaucuguaauaacuauagaacuaagcaauauaaaagaaaacaaauguaacggaacugacgcuaaaguaaaacuuauaaaacaagaacuagauaaauacaaaaacgccguuaccgaacuacaacuauuaaugcaaucaacaccagccgcaaauaacagagcaagacgcgaauuaccaagauucaugaauuacacacuaaacaauacaaaaaauaacaauguaacacuaucaaaaaaaagaaaacgacgauucuuaggcuuccuacuaggagucggcucagcaauagcuuccggaauagccgucuguaaaguccuacaccuugaaggcgaaguaaacaaaaucaaaaacgcacuauuaucaacaaacaaagcagucguaucuuuauccaacggagucucaguccuaacauucaaaguacucgauuuaaaaaacuacaucgauaaacaacuccuucccauucuaaacaaacaauccugcucaauauccaacaucgaaacagucauagaauuucaacaaaaaaacaaccgccugcuagaaauaacaagagaauuuuccguaaaugccggcgucaccacaccaguaucaacauacaugcuaacaaacuccgaacuacucucccuaauaaacgauaugccaaucaccaacgaccaaaaaaaacuaaugucaaauaacguucaaauagucagacaacaaucauacagcauaaugugcauaauaaaagaagaagucuuagccuacguuguacaacucccauuauacggaguuaucgauacaccaugcuggaaauuacacacaucacccuuaugcaccacaaacacaaaagaaggauccaauauuugucuaacacgaacagacagaggaugguacugugauaacgcaggaucagugucauucuuuccacaagcagaaacauguaaaguucaaucuaacagaguauucugcgacaccaugaacucccuaaccuuacccucagaaguaaaucuaugcaacauagauaucuuuaacccaaaauacgacugcaaaaucaugacaucaaaaacugacguuucuucauccguuauaacuucccucggcgcuauaguguccugcuacggaaaaacuaaaugcacagcauccaacaaaaauagaggaauaauaaaaacauuuuccaacggcugcgacuauguuucaaacaaaggaguagauaccguaucagucggcaauacauuauauuauguuaacaaacaagaaggaaaaucccuauacguaaaaggagaaccuauaaucaacuucuacgacccacucguauuccccucagacgaauuugacgcaucuauaucucaaguaaaugaaaaaauaaaccaaucacucgcauuuauccgcaaaucugacgaauuacuccauaacgucaacgucggcaaaucaaccaccaacauaaugauaacaacaauuauaauaguaauaauugucauacuacuacuccuaauagcaguaggucuauuccuauacugcaaagcaagauccacccccguaacccuuuccaaagaucaacucucaggaauaaauaacauagccuuuucaaacuaaggacuaguacuggcugcaucucccuuuccucuguccuccauccuucucccaggauggugaagggggaccugguacccagugauccccaccccaggauccuaaaucaugacuuaccugcuaauaaaaacucauuggaaaagugagaagaucuaaaaaaaaaaaaaaaaaaaaaaaaaaaaaaaaaaaaaaaaaaaaaaaaaaaaaaaaaaaaaaaaugcaucccccccccccccccccccccccccccccccaaaggcucuuuucagagccaccagaauu

SEQ ID NO: 12552 - RNA, 2127 nt, Artificial Sequence
  mRNA product Design b-5 comprising derived and/or modified sequence from HRSV(Memphis-37)__AIY60640.1__F0_DSCav1 (opt11)
gggagacuccugucgggcggaaguaggaggaguagaguuuaaaaacaguacucuuuuuccgguucgggacguaguugaagcaacgacaagccggauaaccgcucuugagacaggaagcuuaccauggaacuccccauacucaagacuaaugccaucaccaccauccucgccgccgugacccucugcuucgcaucgucccaaaacauaacagaagaguucuaccaaagcacaugcuccgcagucuccaaaggauaccucuccgcacuacguaccggcugguacaccagcgucaucaccaucgaacuuuccaacaucaaagagaacaaaugcaacggcaccgacgccaaaguaaaacucauaaaacaagagcuagacaaauacaaaaacgccgucacagaacuccaacuacugaugcaauccacaccggccgccaacaaccgcgcucgacgugaacucccacgcuucaugaacuacacucuuaacaacaccaaaaauaacaacgucacccuauccaaaaagcgaaagcgcagauuccucggcuuccuacuuggcgucggcucggcgauagccucuggaaucgccguuugcaagguccuccaccuagaaggcgaaguaaacaaaaucaaaaacgcacuccuaagcaccaacaaagccgucgucucacuuuccaacggcgucucaguccucacauucaaaguucucgaccuaaagaacuacaucgacaagcaacuacuacccauacucaauaaacaauccugcuccaucagcaacaucgagacagucaucgaauuucaacaaaagaacaaccgccuccucgaaauuacacgcgaguucucagucaacgccggagucaccaccccagucucaacauacaugcucaccaacagcgaacuccugucucuaaucaacgacaugcccaucacuaacgaccagaagaaacucauguccaacaacguccaaaucgugcgacaacaaucauacucuaucaugugcaucaucaaagaagaaguccucgcauacgucguccagcucccacucuacggcguaaucgacacacccugcuggaaacuccacacaucaccccuaugcaccaccaacacaaaagaaggcuccaacaucugccuaacccgaaccgacagagguugguauugcgacaacgccggcucagucucauucuucccacaagccgaaaccuguaaaguccaaucaaaccgcgucuucugcgauaccaugaacucucucacacuccccuccgaagucaaucucugcaacauagacaucuucaauccaaaguacgacugcaaaauaaugaccucgaaaaccgacguaagcuccagcgucaucaccuccuuaggcgcaaucguauccugcuacggcaaaaccaaaugcaccgccucaaacaaaaacagaggcaucaucaaaacguucucgaacggaugcgacuacguuuccaauaaaggcguagauaccgucuccgucggcaacacacucuauuacgucaacaaacaagaaggcaaaucccucuacgucaaaggugaaccuaucaucaacuucuacgacccccucgucuuccccagcgacgaguucgaugccucaaucagccaagucaacgagaaaaucaaccaaucacuggcuuucauacgcaaauccgacgaacuccuccacaacgugaacgucggcaaauccacaaccaacaucaugauaaccacaauaaucaucgucauaaucguaauccuacuccuccuuauugccguaggacuauuccuauacugcaaagcccgauccacccccgucacccucucaaaagaccaacucuccggcaucaacaauauagccuucucuaacuaaggacuaguacuggcugcaucucccuuuccucuguccuccauccuucucccaggauggugaagggggaccugguacccagugauccccaccccaggauccuaaaucaugacuuaccugcuaauaaaaacucauuggaaaagugagaagaucuaaaaaaaaaaaaaaaaaaaaaaaaaaaaaaaaaaaaaaaaaaaaaaaaaaaaaaaaaaaaaaaaugcaucccccccccccccccccccccccccccccccaaaggcucuuuucagagccaccagaauu

SEQ ID NO: 12553 - RNA, 2033 nt, Artificial Sequence
  mRNA product Design c-1 comprising derived and/or modified sequence from HRSV(Memphis-37)__AIY60640.1__F0_DSCav1 (opt1)
gggagaguccgcucagccagguugcagaagcggcuuagcguguguccuaaucuucucucugcguguagguaggccugugccgcaaacaagcuuaccauggagcugcccauccucaagaccaacgccaucaccacgauccuggccgcggugacccugugcuucgccagcucccagaacaucaccgaggaguucuaccagagcacgugcuccgccgucagcaagggcuaccucuccgcccugcgcaccgggugguacaccagcgugaucaccaucgagcuguccaacaucaaggagaacaagugcaacggcaccgacgccaaggugaagcucaucaagcaggagcuggacaaguacaagaacgcggucacggagcugcagcuccugaugcagagcaccccggccgccaacaaccgggcccgccgggagcugccccgcuucaugaacuacacccucaacaacaccaagaacaacaacgugacgcuguccaagaagcggaagcgccgguuccugggguuccuccugggcguggggagcgcgaucgccuccggcaucgccgucugcaaggugcugcaccucgagggcgaggugaacaagaucaagaacgcccugcuguccaccaacaaggccgucgugagccucuccaacggggugagcguccugaccuucaaggugcuggaccucaagaacuacaucgacaagcagcugcugcccauccugaacaagcagagcugcuccaucagcaacaucgagaccgucaucgaguuccagcagaagaacaaccgccuccuggagaucacgcgggaguucagcgugaacgcgggcgugaccacccccgucuccaccuacaugcugacgaacagcgagcuccugucccugaucaacgacaugccgaucaccaacgaccagaagaagcucaugagcaacaacgugcagaucgugcgccagcaguccuacagcaucaugugcaucaucaaggaggagguccuggccuacguggugcagcugccccucuacggggucaucgacacccccugcuggaagcugcacaccagcccccugugcacgaccaacaccaaggagggcuccaacaucugccucacccggacggaccgcgggugguacugcgacaacgccggcagcguguccuucuucccgcaggccgagaccugcaagguccagagcaaccggguguucugcgacaccaugaacucccugacccugcccagcgaggugaaccucugcaacaucgacaucuucaaccccaaguacgacugcaagaucaugacguccaagaccgacgucagcuccagcgugaucaccucccugggcgccaucgugagcugcuacgggaagaccaagugcacggcgagcaacaagaaccgcggcaucaucaagaccuucuccaacgggugcgacuacgucagcaacaagggcguggacaccguguccgucggcaacacccuguacuacgugaacaagcaggagggcaagagccucuacgugaagggggagcccaucaucaacuucuacgacccgcuggucuuccccuccgacgaguucgacgccagcaucucccaggugaacgagaagaucaaccagagccuggccuucauccggaaguccgacgagcuccugcacaacgugaacgucggcaagagcaccacgaacaucaugaucaccaccaucaucaucgugaucaucgugauccugcugcuccugaucgccgucgggcuguuccucuacugcaaggcccgcuccacccccgugacgcugagcaaggaccagcuguccgggaucaacaacaucgcguucagcaacugaggacuaguguccaccugucccuccugggcugcuggauugucucguuuuccugccaaauaaacaggaucagcgcuuuacagaucuaaaaaaaaaaaaaaaaaaaaaaaaaaaaaaaaaaaaaaaaaaaaaaaaaaaaaaaaaaaaaaaaugcaucccccccccccccccccccccccccccccccaaaggcucuuuucagagccaccagaauu

SEQ ID NO: 12554 - RNA, 2033 nt, Artificial Sequence
  mRNA product Design c-1 comprising derived and/or modified sequence from HRSV(Memphis-37)__AIY60640.1__F0_DSCav1 (opt1)
gggagaguccgcucagccagguugcagaagcggcuuagcguguguccuaaucuucucucugcguguagguaggccugugccgcaaacaagcuuaccauggagcugcccauccucaagaccaacgccaucaccacgauccuggccgcggugacccugugcuucgccagcucccagaacaucaccgaggaguucuaccagagcacgugcuccgccgucagcaagggcuaccucuccgcccugcgcaccgggugguacaccagcgugaucaccaucgagcuguccaacaucaaggagaacaagugcaacggcaccgacgccaaggugaagcucaucaagcaggagcuggacaaguacaagaacgcggucacggagcugcagcuccugaugcagagcaccccggccgccaacaaccgggcccgccgggagcugccccgcuucaugaacuacacccucaacaacaccaagaacaacaacgugacgcuguccaagaagcggaagcgccgguuccugggguuccuccugggcguggggagcgcgaucgccuccggcaucgccgucugcaaggugcugcaccucgagggcgaggugaacaagaucaagaacgcccugcugagcaccaacaaggccgucgugucccucagcaacgggguguccguccugaccuucaaggugcuggaccucaagaacuacaucgacaagcagcugcugcccauccucaacaagcagagcugcuccaucagcaacaucgagaccgugaucgaguuccagcagaagaacaaccgccugcuggagaucacgcgggaguucuccgucaacgcgggcgugaccacccccgugagcaccuacaugcucacgaacagcgagcugcugucccucaucaacgacaugccgaucaccaacgaccagaagaagcugaugagcaacaacguccagaucgugcgccagcaguccuacagcaucaugugcaucaucaaggaggaggugcuggccuacgucgugcagcucccccuguacggggugaucgacacccccugcuggaagcugcacaccagcccccucugcacgaccaacaccaaggagggcagcaacaucugccugacccggacggaccgcgggugguacugcgacaacgccggcuccgucagcuucuucccgcaggccgagaccugcaaggugcaguccaaccgggucuucugcgacaccaugaacagccugacccuccccuccgaggugaaccugugcaacaucgacaucuucaaccccaaguacgacugcaagaucaugacgagcaagaccgacguguccagcuccgucaucaccagccugggcgccaucguguccugcuacgggaagaccaagugcacggcgagcaacaagaaccgcggcaucaucaagaccuucuccaacgggugcgacuacgugagcaacaagggcgucgacaccgugagcgugggcaacacccucuacuacgucaacaagcaggaggggaagucccuguacgugaagggcgagcccaucaucaacuucuacgacccgcugguguuccccagcgacgaguucgacgccuccaucagccaggucaacgagaagaucaaccagucccucgccuucauccggaaguccgacgagcugcugcacaacgugaacguggggaaguccaccacgaacaucaugaucaccaccaucaucaucgucaucaucgugauccugcuccugcugaucgccgugggccucuuccuguacugcaaggcccgcagcacccccgucacgcuguccaaggaccagcucagcgggaucaacaacaucgcguucuccaacugaggacuaguguccaccugucccuccugggcugcuggauugucucguuuuccugccaaauaaacaggaucagcgcuuuacagaucuaaaaaaaaaaaaaaaaaaaaaaaaaaaaaaaaaaaaaaaaaaaaaaaaaaaaaaaaaaaaaaaaugcaucccccccccccccccccccccccccccccccaaaggcucuuuucagagccaccagaauu

SEQ ID NO: 12555 - RNA, 2033 nt, Artificial Sequence
  mRNA product Design c-1 comprising derived and/or modified sequence from HRSV(Memphis-37)__AIY60640.1__F0_DSCav1 (opt2)
gggagaguccgcucagccagguugcagaagcggcuuagcguguguccuaaucuucucucugcguguagguaggccugugccgcaaacaagcuuaccauggagcuccccauccucaagaccaacgccaucaccaccauccucgccgccgucacccucugcuucgccuccucccagaacaucaccgaggaguucuaccaguccaccugcuccgccgucuccaagggcuaccucuccgcccuccgcaccggcugguacaccuccgucaucaccaucgagcucuccaacaucaaggagaacaagugcaacggcaccgacgccaaggucaagcucaucaagcaggagcucgacaaguacaagaacgccgucaccgagcuccagcuccucaugcaguccacccccgccgccaacaaccgcgcccgccgcgagcucccccgcuucaugaacuacacccucaacaacaccaagaacaacaacgucacccucuccaagaagcgcaagcgccgcuuccucggcuuccuccucggcgucggcuccgccaucgccuccggcaucgccgucugcaagguccuccaccucgagggcgaggucaacaagaucaagaacgcccuccucuccaccaacaaggccgucgucucccucuccaacggcgucuccguccucaccuucaagguccucgaccucaagaacuacaucgacaagcagcuccuccccauccucaacaagcaguccugcuccaucuccaacaucgagaccgucaucgaguuccagcagaagaacaaccgccuccucgagaucacccgcgaguucuccgucaacgccggcgucaccacccccgucuccaccuacaugcucaccaacuccgagcuccucucccucaucaacgacaugcccaucaccaacgaccagaagaagcucauguccaacaacguccagaucguccgccagcaguccuacuccaucaugugcaucaucaaggaggagguccucgccuacgucguccagcucccccucuacggcgucaucgacacccccugcuggaagcuccacaccuccccccucugcaccaccaacaccaaggagggcuccaacaucugccucacccgcaccgaccgcggcugguacugcgacaacgccggcuccgucuccuucuucccccaggccgagaccugcaagguccaguccaaccgcgucuucugcgacaccaugaacucccucacccuccccuccgaggucaaccucugcaacaucgacaucuucaaccccaaguacgacugcaagaucaugaccuccaagaccgacgucuccuccuccgucaucaccucccucggcgccaucgucuccugcuacggcaagaccaagugcaccgccuccaacaagaaccgcggcaucaucaagaccuucuccaacggcugcgacuacgucuccaacaagggcgucgacaccgucuccgucggcaacacccucuacuacgucaacaagcaggagggcaagucccucuacgucaagggcgagcccaucaucaacuucuacgacccccucgucuuccccuccgacgaguucgacgccuccaucucccaggucaacgagaagaucaaccagucccucgccuucauccgcaaguccgacgagcuccuccacaacgucaacgucggcaaguccaccaccaacaucaugaucaccaccaucaucaucgucaucaucgucauccuccuccuccucaucgccgucggccucuuccucuacugcaaggcccgcuccacccccgucacccucuccaaggaccagcucuccggcaucaacaacaucgccuucuccaacugaggacuaguguccaccugucccuccugggcugcuggauugucucguuuuccugccaaauaaacaggaucagcgcuuuacagaucuaaaaaaaaaaaaaaaaaaaaaaaaaaaaaaaaaaaaaaaaaaaaaaaaaaaaaaaaaaaaaaaaugcaucccccccccccccccccccccccccccccccaaaggcucuuuucagagccaccagaauu

SEQ ID NO: 12556 - RNA, 2033 nt, Artificial Sequence
  mRNA product Design c-1 comprising derived and/or modified sequence from HRSV(Memphis-37)__AIY60640.1__F0_DSCav1 (opt3)
gggagaguccgcucagccagguugcagaagcggcuuagcguguguccuaaucuucucucugcguguagguaggccugugccgcaaacaagcuuaccauggagcugcccauccucaagaccaacgccauuacaacuauacuugcugcagugacgcugugcuucgccagcucccagaauaucaccgaagaguuuuaccaaucuacauguucagcggucaguaaaggcuauuugagcgcuuuaagaacugggugguacaccuccguuauuacaaucgaacugucuaacauuaaggagaauaaaugcaacggaaccgacgccaaggugaaacuaaucaagcaggaacucgauaaguauaaaaaugcaguaacugagcugcagcuucugaugcagucgaccccugccgcuaacaauagggcacggcgcgaguugccacgauucaugaacuacacacucaauaacacgaagaauaacaaugugacucugagcaaaaagcguaaaagaagguuucuggguuuccucuuaggcgucgggucagccauagcuaguggaaucgccguguguaagguucugcaccuugaaggcgaggugaacaagauuaaaaaugcguugcuguccaccaacaaggcagucgugucucuaagcaacgguguauccguucucacauuuaaagugcuggaccuuaagaauuauaucgauaaacaacuguugccgauucucaacaagcagucaugcaguaucagcaauauagaaacugucauugaguuccagcagaaaaacaaucggcuguuagagaucacccgcgaauuuucugugaacgccggggugacaacccccgucuccacguacaugcugacuaauucagagcuccuuagccugauuaacgacaugccuaucacaaaugaucaaaagaaguugaugaguaacaauguucagaucgugagacagcagucuuauuccauuauguguauaaucaaagaagagguacuagcuuacgugguccaacugccacucuacggagugauugacacccccugcuggaagcugcauacuagcccucuuuguacaaccaacacgaaagaaggcucgaauaucugccugaccaggacagaucggggcugguauugugacaacgccgggucuguuuccuucuuuccacaggcagagacuugcaaggugcagucaaaucgcgucuucugugauaccaugaacaguuugacacuccccagcgaggugaaccugugcaauauagacauuuuuaacccuaaauacgauugcaagaucaugacuuccaagaccgacguaucuagcucaguuaucacaaguuuaggagcuauuguguccuguuaugguaaaaccaagugcacugccagcaauaaaaaccgaggcaucauuaagacguucucuaaugggugugauuacgucucaaacaaaggaguggacacagucagugugggcaauacccuguauuacguuaacaagcaagaagguaagagccuauaugugaaaggggagccaauaaucaauuuuuacgacccgcucguauuccccuccgaugaguucgacgcgucuauuucgcaggucaacgaaaagaucaaucagagccuggccuuuaucagaaaauccgaugaacuuuugcacaacgugaauguuggaaagucaacuaccaacauuaugauaacaaccaucauuaucgugauuaucgucauacugcuccugcuuaucgcagugggccuguucuuguacugcaaagcuaggaguacuccuguaacacucucuaaggaccagcugagcggcauuaauaacaucgccuuuuccaacugaggacuaguguccaccugucccuccugggcugcuggauugucucguuuuccugccaaauaaacaggaucagcgcuuuacagaucuaaaaaaaaaaaaaaaaaaaaaaaaaaaaaaaaaaaaaaaaaaaaaaaaaaaaaaaaaaaaaaaaugcaucccccccccccccccccccccccccccccccaaaggcucuuuucagagccaccagaauu

SEQ ID NO: 12557 - RNA, 2033 nt, Artificial Sequence
  mRNA product Design c-1 comprising derived and/or modified sequence from HRSV(Memphis-37)__AIY60640.1__F0_DSCav1 (opt4)
gggagaguccgcucagccagguugcagaagcggcuuagcguguguccuaaucuucucucugcguguagguaggccugugccgcaaacaagcuuaccauggagcugcccauccugaagaccaacgccaucaccaccauccuggccgccgugacccugugcuucgccagcagccagaacaucaccgaggaguucuaccagagcaccugcagcgccgugagcaagggcuaccugagcgcccugagaaccggcugguacaccagcgugaucaccaucgagcugagcaacaucaaggagaacaagugcaacggcaccgacgccaaggugaagcugaucaagcaggagcuggacaaguacaagaacgccgugaccgagcugcagcugcugaugcagagcacccccgccgccaacaacagagccagaagagagcugcccagauucaugaacuacacccugaacaacaccaagaacaacaacgugacccugagcaagaagagaaagagaagauuccugggcuuccugcugggcgugggcagcgccaucgccagcggcaucgccgugugcaaggugcugcaccuggagggcgaggugaacaagaucaagaacgcccugcugagcaccaacaaggccguggugagccugagcaacggcgugagcgugcugaccuucaaggugcuggaccugaagaacuacaucgacaagcagcugcugcccauccugaacaagcagagcugcagcaucagcaacaucgagaccgugaucgaguuccagcagaagaacaacagacugcuggagaucaccagagaguucagcgugaacgccggcgugaccacccccgugagcaccuacaugcugaccaacagcgagcugcugagccugaucaacgacaugcccaucaccaacgaccagaagaagcugaugagcaacaacgugcagaucgugagacagcagagcuacagcaucaugugcaucaucaaggaggaggugcuggccuacguggugcagcugccccuguacggcgugaucgacacccccugcuggaagcugcacaccagcccccugugcaccaccaacaccaaggagggcagcaacaucugccugaccagaaccgacagaggcugguacugcgacaacgccggcagcgugagcuucuucccccaggccgagaccugcaaggugcagagcaacagaguguucugcgacaccaugaacagccugacccugcccagcgaggugaaccugugcaacaucgacaucuucaaccccaaguacgacugcaagaucaugaccagcaagaccgacgugagcagcagcgugaucaccagccugggcgccaucgugagcugcuacggcaagaccaagugcaccgccagcaacaagaacagaggcaucaucaagaccuucagcaacggcugcgacuacgugagcaacaagggcguggacaccgugagcgugggcaacacccuguacuacgugaacaagcaggagggcaagagccuguacgugaagggcgagcccaucaucaacuucuacgacccccugguguuccccagcgacgaguucgacgccagcaucagccaggugaacgagaagaucaaccagagccuggccuucaucagaaagagcgacgagcugcugcacaacgugaacgugggcaagagcaccaccaacaucaugaucaccaccaucaucaucgugaucaucgugauccugcugcugcugaucgccgugggccuguuccuguacugcaaggccagaagcacccccgugacccugagcaaggaccagcugagcggcaucaacaacaucgccuucagcaacugaggacuaguguccaccugucccuccugggcugcuggauugucucguuuuccugccaaauaaacaggaucagcgcuuuacagaucuaaaaaaaaaaaaaaaaaaaaaaaaaaaaaaaaaaaaaaaaaaaaaaaaaaaaaaaaaaaaaaaaugcaucccccccccccccccccccccccccccccccaaaggcucuuuucagagccaccagaauu

SEQ ID NO: 12558 - RNA, 2033 nt, Artificial Sequence
  mRNA product Design c-1 comprising derived and/or modified sequence from HRSV(Memphis-37)__AIY60640.1__F0_DSCav1 (opt5)
gggagaguccgcucagccagguugcagaagcggcuuagcguguguccuaaucuucucucugcguguagguaggccugugccgcaaacaagcuuaccauggagcugcccauccucaagaccaacgccauuacaacgauccuggcugccgugacccuuugcuucgcgagcucccagaauauuacagaagaguuuuaccaaucuaccuguagcgcugucuccaaaggcuaucugucugcccucagaacagggugguacaccagcguuaucacaauugaacuguccaacaucaaggagaauaaaugcaacggaaccgacgccaaggugaaacuuaucaagcaggaacuggauaaguauaaaaaugcugugacggagcuccagcugcugaugcagucuaccccugccgcuaacaaucgggcccgcagagagcucccgcgguucaugaacuacacacugaauaacaccaagaauaacaaugucacacuuagcaaaaagcgcaaaagacgguuucugggcuuccuccugggggugggauccgcgauugccagcggcaucgcuguuuguaaggugcuucaccuggaaggggaggucaacaagauuaaaaaugcccuccugucuaccaacaaggcugugguuucccugagcaacggagugucuguccucacguuuaaagugcuggaccuuaagaauuauaucgauaaacaacugcuccccauucugaacaagcaguccugcagcaucucuaauauugaaacagugaucgaguuccagcagaaaaacaaucgccuucuggagaucaccagagaauuuuccgucaacgccggcguuacaaccccugugagcaccuacaugcucacaaauuccgagcugcugucucucauuaacgacaugcccaucacgaaugaucaaaagaagcugaugagcaacaaugugcagauuguccggcagcaguccuauagcaucauguguauuaucaaagaagaggugcuugcguacguugugcaacugccucucuacggcgucaucgacacccccugcuggaagcugcauacaucuccucuuuguaccacaaacaccaaagaaggguccaauauuugccugacgcgcacagauagaggaugguauugugacaacgccggcagcgugucuuucuuuccgcaggcugagaccugcaagguucagagcaaucggguguucugugauaccaugaacucccucacacugcccucugaggucaaccugugcaauaucgacauuuuuaacccuaaauacgauugcaagaucaugaccagcaagacagacguguccagcucugucauuacgucccucggggccaucgugagcuguuauggaaaaaccaagugcacagcuucuaauaaaaaccgcggcaucauuaagaccuucuccaaugggugugauuacguuagcaacaaaggaguggacacagucuccgugggcaauacccuguauuacguuaacaagcaagaaggcaagucucuuuaugugaaaggggagcccaucauuaauuuuuacgacccucuggucuuccccagcgaugaguucgacgccuccaucucucaggugaacgaaaagauuaaucagagccucgccuuuaucagaaaauccgaugaacugcugcacaacgugaauguuggaaagagcacgaccaacauuaugaucacaaccaucauuaucgucauuaucgugauucuucuccugcugaucgcugugggccucuuccuguacugcaaagcgcggucuacaccggucacccuuuccaaggaccagcugagcgggaucaauaacauugccuuuucuaacugaggacuaguguccaccugucccuccugggcugcuggauugucucguuuuccugccaaauaaacaggaucagcgcuuuacagaucuaaaaaaaaaaaaaaaaaaaaaaaaaaaaaaaaaaaaaaaaaaaaaaaaaaaaaaaaaaaaaaaaugcaucccccccccccccccccccccccccccccccaaaggcucuuuucagagccaccagaauu

SEQ ID NO: 12559 - RNA, 2033 nt, Artificial Sequence
  mRNA product Design c-1 comprising derived and/or modified sequence from HRSV(Memphis-37)__AIY60640.1__F0_DSCav1 (opt6)
gggagaguccgcucagccagguugcagaagcggcuuagcguguguccuaaucuucucucugcguguagguaggccugugccgcaaacaagcuuaccauggaacucccaauccucaaaaccaaugccauaacaaccauacucgcugcaguaaccuuauguuucgcaaguagccaaaacauaaccgaagaauuuuaucaauccacaugcuccgcaguuucuaaaggauaucuaucagcauuaagaacuggaugguacacaucuguaauaacuauagaacuaagcaauauaaaagaaaacaaauguaacggaacugacgcuaaaguaaaacuuauaaaacaagaacuagauaaauacaaaaacgccguuaccgaacuacaacuauuaaugcaaucaacaccagccgcaaauaacagagcaagacgcgaauuaccaagauucaugaauuacacacuaaacaauacaaaaaauaacaauguaacacuaucaaaaaaaagaaaacgacgauucuuaggcuuccuacuaggagucggcucagcaauagcuuccggaauagccgucuguaaaguccuacaccuugaaggcgaaguaaacaaaaucaaaaacgcacuauuaucaacaaacaaagcagucguaucuuuauccaacggagucucaguccuaacauucaaaguacucgauuuaaaaaacuacaucgauaaacaacuccuucccauucuaaacaaacaauccugcucaauauccaacaucgaaacagucauagaauuucaacaaaaaaacaaccgccugcuagaaauaacaagagaauuuuccguaaaugccggcgucaccacaccaguaucaacauacaugcuaacaaacuccgaacuacucucccuaauaaacgauaugccaaucaccaacgaccaaaaaaaacuaaugucaaauaacguucaaauagucagacaacaaucauacagcauaaugugcauaauaaaagaagaagucuuagccuacguuguacaacucccauuauacggaguuaucgauacaccaugcuggaaauuacacacaucacccuuaugcaccacaaacacaaaagaaggauccaauauuugucuaacacgaacagacagaggaugguacugugauaacgcaggaucagugucauucuuuccacaagcagaaacauguaaaguucaaucuaacagaguauucugcgacaccaugaacucccuaaccuuacccucagaaguaaaucuaugcaacauagauaucuuuaacccaaaauacgacugcaaaaucaugacaucaaaaacugacguuucuucauccguuauaacuucccucggcgcuauaguguccugcuacggaaaaacuaaaugcacagcauccaacaaaaauagaggaauaauaaaaacauuuuccaacggcugcgacuauguuucaaacaaaggaguagauaccguaucagucggcaauacauuauauuauguuaacaaacaagaaggaaaaucccuauacguaaaaggagaaccuauaaucaacuucuacgacccacucguauuccccucagacgaauuugacgcaucuauaucucaaguaaaugaaaaaauaaaccaaucacucgcauuuauccgcaaaucugacgaauuacuccauaacgucaacgucggcaaaucaaccaccaacauaaugauaacaacaauuauaauaguaauaauugucauacuacuacuccuaauagcaguaggucuauuccuauacugcaaagcaagauccacccccguaacccuuuccaaagaucaacucucaggaauaaauaacauagccuuuucaaacuaaggacuaguguccaccugucccuccugggcugcuggauugucucguuuuccugccaaauaaacaggaucagcgcuuuacagaucuaaaaaaaaaaaaaaaaaaaaaaaaaaaaaaaaaaaaaaaaaaaaaaaaaaaaaaaaaaaaaaaaugcaucccccccccccccccccccccccccccccccaaaggcucuuuucagagccaccagaauu

SEQ ID NO: 12560 - RNA, 2033 nt, Artificial Sequence
  mRNA product Design c-1 comprising derived and/or modified sequence from HRSV(Memphis-37)__AIY60640.1__F0_DSCav1 (opt11)
gggagaguccgcucagccagguugcagaagcggcuuagcguguguccuaaucuucucucugcguguagguaggccugugccgcaaacaagcuuaccauggaacuccccauacucaagacuaaugccaucaccaccauccucgccgccgugacccucugcuucgcaucgucccaaaacauaacagaagaguucuaccaaagcacaugcuccgcagucuccaaaggauaccucuccgcacuacguaccggcugguacaccagcgucaucaccaucgaacuuuccaacaucaaagagaacaaaugcaacggcaccgacgccaaaguaaaacucauaaaacaagagcuagacaaauacaaaaacgccgucacagaacuccaacuacugaugcaauccacaccggccgccaacaaccgcgcucgacgugaacucccacgcuucaugaacuacacucuuaacaacaccaaaaauaacaacgucacccuauccaaaaagcgaaagcgcagauuccucggcuuccuacuuggcgucggcucggcgauagccucuggaaucgccguuugcaagguccuccaccuagaaggcgaaguaaacaaaaucaaaaacgcacuccuaagcaccaacaaagccgucgucucacuuuccaacggcgucucaguccucacauucaaaguucucgaccuaaagaacuacaucgacaagcaacuacuacccauacucaauaaacaauccugcuccaucagcaacaucgagacagucaucgaauuucaacaaaagaacaaccgccuccucgaaauuacacgcgaguucucagucaacgccggagucaccaccccagucucaacauacaugcucaccaacagcgaacuccugucucuaaucaacgacaugcccaucacuaacgaccagaagaaacucauguccaacaacguccaaaucgugcgacaacaaucauacucuaucaugugcaucaucaaagaagaaguccucgcauacgucguccagcucccacucuacggcguaaucgacacacccugcuggaaacuccacacaucaccccuaugcaccaccaacacaaaagaaggcuccaacaucugccuaacccgaaccgacagagguugguauugcgacaacgccggcucagucucauucuucccacaagccgaaaccuguaaaguccaaucaaaccgcgucuucugcgauaccaugaacucucucacacuccccuccgaagucaaucucugcaacauagacaucuucaauccaaaguacgacugcaaaauaaugaccucgaaaaccgacguaagcuccagcgucaucaccuccuuaggcgcaaucguauccugcuacggcaaaaccaaaugcaccgccucaaacaaaaacagaggcaucaucaaaacguucucgaacggaugcgacuacguuuccaauaaaggcguagauaccgucuccgucggcaacacacucuauuacgucaacaaacaagaaggcaaaucccucuacgucaaaggugaaccuaucaucaacuucuacgacccccucgucuuccccagcgacgaguucgaugccucaaucagccaagucaacgagaaaaucaaccaaucacuggcuuucauacgcaaauccgacgaacuccuccacaacgugaacgucggcaaauccacaaccaacaucaugauaaccacaauaaucaucgucauaaucguaauccuacuccuccuuauugccguaggacuauuccuauacugcaaagcccgauccacccccgucacccucucaaaagaccaacucuccggcaucaacaauauagccuucucuaacuaaggacuaguguccaccugucccuccugggcugcuggauugucucguuuuccugccaaauaaacaggaucagcgcuuuacagaucuaaaaaaaaaaaaaaaaaaaaaaaaaaaaaaaaaaaaaaaaaaaaaaaaaaaaaaaaaaaaaaaaugcaucccccccccccccccccccccccccccccccaaaggcucuuuucagagccaccagaauu

SEQ ID NO: 12561 - RNA, 2123 nt, Artificial Sequence
  mRNA product Design c-2 comprising derived and/or modified sequence from HRSV(Memphis-37)__AIY60640.1__F0_DSCav1 (opt1)
gggagacuccugucgggcggaaguaggaggaguagaguuuaaaaacaguacucuuuuuccgguucgggacguaguugaagcaacgacaagccggauaaccgcucuugagacaggaagcuuaccauggagcugcccauccucaagaccaacgccaucaccacgauccuggccgcggugacccugugcuucgccagcucccagaacaucaccgaggaguucuaccagagcacgugcuccgccgucagcaagggcuaccucuccgcccugcgcaccgggugguacaccagcgugaucaccaucgagcuguccaacaucaaggagaacaagugcaacggcaccgacgccaaggugaagcucaucaagcaggagcuggacaaguacaagaacgcggucacggagcugcagcuccugaugcagagcaccccggccgccaacaaccgggcccgccgggagcugccccgcuucaugaacuacacccucaacaacaccaagaacaacaacgugacgcuguccaagaagcggaagcgccgguuccugggguuccuccugggcguggggagcgcgaucgccuccggcaucgccgucugcaaggugcugcaccucgagggcgaggugaacaagaucaagaacgcccugcuguccaccaacaaggccgucgugagccucuccaacggggugagcguccugaccuucaaggugcuggaccucaagaacuacaucgacaagcagcugcugcccauccugaacaagcagagcugcuccaucagcaacaucgagaccgucaucgaguuccagcagaagaacaaccgccuccuggagaucacgcgggaguucagcgugaacgcgggcgugaccacccccgucuccaccuacaugcugacgaacagcgagcuccugucccugaucaacgacaugccgaucaccaacgaccagaagaagcucaugagcaacaacgugcagaucgugcgccagcaguccuacagcaucaugugcaucaucaaggaggagguccuggccuacguggugcagcugccccucuacggggucaucgacacccccugcuggaagcugcacaccagcccccugugcacgaccaacaccaaggagggcuccaacaucugccucacccggacggaccgcgggugguacugcgacaacgccggcagcguguccuucuucccgcaggccgagaccugcaagguccagagcaaccggguguucugcgacaccaugaacucccugacccugcccagcgaggugaaccucugcaacaucgacaucuucaaccccaaguacgacugcaagaucaugacguccaagaccgacgucagcuccagcgugaucaccucccugggcgccaucgugagcugcuacgggaagaccaagugcacggcgagcaacaagaaccgcggcaucaucaagaccuucuccaacgggugcgacuacgucagcaacaagggcguggacaccguguccgucggcaacacccuguacuacgugaacaagcaggagggcaagagccucuacgugaagggggagcccaucaucaacuucuacgacccgcuggucuuccccuccgacgaguucgacgccagcaucucccaggugaacgagaagaucaaccagagccuggccuucauccggaaguccgacgagcuccugcacaacgugaacgucggcaagagcaccacgaacaucaugaucaccaccaucaucaucgugaucaucgugauccugcugcuccugaucgccgucgggcuguuccucuacugcaaggcccgcuccacccccgugacgcugagcaaggaccagcuguccgggaucaacaacaucgcguucagcaacugaggacuaguggaagcauuuuccuggcugauuaaaagaaauuacucagcuauggucaucuguuccuguuagaaggcuaugcagcauauuauauacuaugcgcauguuaugaaaugcauaauaaaaaauuuuaaaaaaucuaaaagaucuaaaaaaaaaaaaaaaaaaaaaaaaaaaaaaaaaaaaaaaaaaaaaaaaaaaaaaaaaaaaaaaaugcaucccccccccccccccccccccccccccccccaaaggcucuuuucagagccaccagaauu

SEQ ID NO: 12562 - RNA, 2123 nt, Artificial Sequence
  mRNA product Design c-2 comprising derived and/or modified sequence from HRSV(Memphis-37)__AIY60640.1__F0_DSCav1 (opt1)
gggagacuccugucgggcggaaguaggaggaguagaguuuaaaaacaguacucuuuuuccgguucgggacguaguugaagcaacgacaagccggauaaccgcucuugagacaggaagcuuaccauggagcugcccauccucaagaccaacgccaucaccacgauccuggccgcggugacccugugcuucgccagcucccagaacaucaccgaggaguucuaccagagcacgugcuccgccgucagcaagggcuaccucuccgcccugcgcaccgggugguacaccagcgugaucaccaucgagcuguccaacaucaaggagaacaagugcaacggcaccgacgccaaggugaagcucaucaagcaggagcuggacaaguacaagaacgcggucacggagcugcagcuccugaugcagagcaccccggccgccaacaaccgggcccgccgggagcugccccgcuucaugaacuacacccucaacaacaccaagaacaacaacgugacgcuguccaagaagcggaagcgccgguuccugggguuccuccugggcguggggagcgcgaucgccuccggcaucgccgucugcaaggugcugcaccucgagggcgaggugaacaagaucaagaacgcccugcugagcaccaacaaggccgucgugucccucagcaacgggguguccguccugaccuucaaggugcuggaccucaagaacuacaucgacaagcagcugcugcccauccucaacaagcagagcugcuccaucagcaacaucgagaccgugaucgaguuccagcagaagaacaaccgccugcuggagaucacgcgggaguucuccgucaacgcgggcgugaccacccccgugagcaccuacaugcucacgaacagcgagcugcugucccucaucaacgacaugccgaucaccaacgaccagaagaagcugaugagcaacaacguccagaucgugcgccagcaguccuacagcaucaugugcaucaucaaggaggaggugcuggccuacgucgugcagcucccccuguacggggugaucgacacccccugcuggaagcugcacaccagcccccucugcacgaccaacaccaaggagggcagcaacaucugccugacccggacggaccgcgggugguacugcgacaacgccggcuccgucagcuucuucccgcaggccgagaccugcaaggugcaguccaaccgggucuucugcgacaccaugaacagccugacccuccccuccgaggugaaccugugcaacaucgacaucuucaaccccaaguacgacugcaagaucaugacgagcaagaccgacguguccagcuccgucaucaccagccugggcgccaucguguccugcuacgggaagaccaagugcacggcgagcaacaagaaccgcggcaucaucaagaccuucuccaacgggugcgacuacgugagcaacaagggcgucgacaccgugagcgugggcaacacccucuacuacgucaacaagcaggaggggaagucccuguacgugaagggcgagcccaucaucaacuucuacgacccgcugguguuccccagcgacgaguucgacgccuccaucagccaggucaacgagaagaucaaccagucccucgccuucauccggaaguccgacgagcugcugcacaacgugaacguggggaaguccaccacgaacaucaugaucaccaccaucaucaucgucaucaucgugauccugcuccugcugaucgccgugggccucuuccuguacugcaaggcccgcagcacccccgucacgcuguccaaggaccagcucagcgggaucaacaacaucgcguucuccaacugaggacuaguggaagcauuuuccuggcugauuaaaagaaauuacucagcuauggucaucuguuccuguuagaaggcuaugcagcauauuauauacuaugcgcauguuaugaaaugcauaauaaaaaauuuuaaaaaaucuaaaagaucuaaaaaaaaaaaaaaaaaaaaaaaaaaaaaaaaaaaaaaaaaaaaaaaaaaaaaaaaaaaaaaaaugcaucccccccccccccccccccccccccccccccaaaggcucuuuucagagccaccagaauu

SEQ ID NO: 12563 - RNA, 2123 nt, Artificial Sequence
  mRNA product Design c-2 comprising derived and/or modified sequence from HRSV(Memphis-37)__AIY60640.1__F0_DSCav1 (opt2)
gggagacuccugucgggcggaaguaggaggaguagaguuuaaaaacaguacucuuuuuccgguucgggacguaguugaagcaacgacaagccggauaaccgcucuugagacaggaagcuuaccauggagcuccccauccucaagaccaacgccaucaccaccauccucgccgccgucacccucugcuucgccuccucccagaacaucaccgaggaguucuaccaguccaccugcuccgccgucuccaagggcuaccucuccgcccuccgcaccggcugguacaccuccgucaucaccaucgagcucuccaacaucaaggagaacaagugcaacggcaccgacgccaaggucaagcucaucaagcaggagcucgacaaguacaagaacgccgucaccgagcuccagcuccucaugcaguccacccccgccgccaacaaccgcgcccgccgcgagcucccccgcuucaugaacuacacccucaacaacaccaagaacaacaacgucacccucuccaagaagcgcaagcgccgcuuccucggcuuccuccucggcgucggcuccgccaucgccuccggcaucgccgucugcaagguccuccaccucgagggcgaggucaacaagaucaagaacgcccuccucuccaccaacaaggccgucgucucccucuccaacggcgucuccguccucaccuucaagguccucgaccucaagaacuacaucgacaagcagcuccuccccauccucaacaagcaguccugcuccaucuccaacaucgagaccgucaucgaguuccagcagaagaacaaccgccuccucgagaucacccgcgaguucuccgucaacgccggcgucaccacccccgucuccaccuacaugcucaccaacuccgagcuccucucccucaucaacgacaugcccaucaccaacgaccagaagaagcucauguccaacaacguccagaucguccgccagcaguccuacuccaucaugugcaucaucaaggaggagguccucgccuacgucguccagcucccccucuacggcgucaucgacacccccugcuggaagcuccacaccuccccccucugcaccaccaacaccaaggagggcuccaacaucugccucacccgcaccgaccgcggcugguacugcgacaacgccggcuccgucuccuucuucccccaggccgagaccugcaagguccaguccaaccgcgucuucugcgacaccaugaacucccucacccuccccuccgaggucaaccucugcaacaucgacaucuucaaccccaaguacgacugcaagaucaugaccuccaagaccgacgucuccuccuccgucaucaccucccucggcgccaucgucuccugcuacggcaagaccaagugcaccgccuccaacaagaaccgcggcaucaucaagaccuucuccaacggcugcgacuacgucuccaacaagggcgucgacaccgucuccgucggcaacacccucuacuacgucaacaagcaggagggcaagucccucuacgucaagggcgagcccaucaucaacuucuacgacccccucgucuuccccuccgacgaguucgacgccuccaucucccaggucaacgagaagaucaaccagucccucgccuucauccgcaaguccgacgagcuccuccacaacgucaacgucggcaaguccaccaccaacaucaugaucaccaccaucaucaucgucaucaucgucauccuccuccuccucaucgccgucggccucuuccucuacugcaaggcccgcuccacccccgucacccucuccaaggaccagcucuccggcaucaacaacaucgccuucuccaacugaggacuaguggaagcauuuuccuggcugauuaaaagaaauuacucagcuauggucaucuguuccuguuagaaggcuaugcagcauauuauauacuaugcgcauguuaugaaaugcauaauaaaaaauuuuaaaaaaucuaaaagaucuaaaaaaaaaaaaaaaaaaaaaaaaaaaaaaaaaaaaaaaaaaaaaaaaaaaaaaaaaaaaaaaaugcaucccccccccccccccccccccccccccccccaaaggcucuuuucagagccaccagaauu

SEQ ID NO: 12564 - RNA, 2123 nt, Artificial Sequence
  mRNA product Design c-2 comprising derived and/or modified sequence from HRSV(Memphis-37)__AIY60640.1__F0_DSCav1 (opt3)
gggagacuccugucgggcggaaguaggaggaguagaguuuaaaaacaguacucuuuuuccgguucgggacguaguugaagcaacgacaagccggauaaccgcucuugagacaggaagcuuaccauggagcugcccauccucaagaccaacgccauuacaacuauacuugcugcagugacgcugugcuucgccagcucccagaauaucaccgaagaguuuuaccaaucuacauguucagcggucaguaaaggcuauuugagcgcuuuaagaacugggugguacaccuccguuauuacaaucgaacugucuaacauuaaggagaauaaaugcaacggaaccgacgccaaggugaaacuaaucaagcaggaacucgauaaguauaaaaaugcaguaacugagcugcagcuucugaugcagucgaccccugccgcuaacaauagggcacggcgcgaguugccacgauucaugaacuacacacucaauaacacgaagaauaacaaugugacucugagcaaaaagcguaaaagaagguuucuggguuuccucuuaggcgucgggucagccauagcuaguggaaucgccguguguaagguucugcaccuugaaggcgaggugaacaagauuaaaaaugcguugcuguccaccaacaaggcagucgugucucuaagcaacgguguauccguucucacauuuaaagugcuggaccuuaagaauuauaucgauaaacaacuguugccgauucucaacaagcagucaugcaguaucagcaauauagaaacugucauugaguuccagcagaaaaacaaucggcuguuagagaucacccgcgaauuuucugugaacgccggggugacaacccccgucuccacguacaugcugacuaauucagagcuccuuagccugauuaacgacaugccuaucacaaaugaucaaaagaaguugaugaguaacaauguucagaucgugagacagcagucuuauuccauuauguguauaaucaaagaagagguacuagcuuacgugguccaacugccacucuacggagugauugacacccccugcuggaagcugcauacuagcccucuuuguacaaccaacacgaaagaaggcucgaauaucugccugaccaggacagaucggggcugguauugugacaacgccgggucuguuuccuucuuuccacaggcagagacuugcaaggugcagucaaaucgcgucuucugugauaccaugaacaguuugacacuccccagcgaggugaaccugugcaauauagacauuuuuaacccuaaauacgauugcaagaucaugacuuccaagaccgacguaucuagcucaguuaucacaaguuuaggagcuauuguguccuguuaugguaaaaccaagugcacugccagcaauaaaaaccgaggcaucauuaagacguucucuaaugggugugauuacgucucaaacaaaggaguggacacagucagugugggcaauacccuguauuacguuaacaagcaagaagguaagagccuauaugugaaaggggagccaauaaucaauuuuuacgacccgcucguauuccccuccgaugaguucgacgcgucuauuucgcaggucaacgaaaagaucaaucagagccuggccuuuaucagaaaauccgaugaacuuuugcacaacgugaauguuggaaagucaacuaccaacauuaugauaacaaccaucauuaucgugauuaucgucauacugcuccugcuuaucgcagugggccuguucuuguacugcaaagcuaggaguacuccuguaacacucucuaaggaccagcugagcggcauuaauaacaucgccuuuuccaacugaggacuaguggaagcauuuuccuggcugauuaaaagaaauuacucagcuauggucaucuguuccuguuagaaggcuaugcagcauauuauauacuaugcgcauguuaugaaaugcauaauaaaaaauuuuaaaaaaucuaaaagaucuaaaaaaaaaaaaaaaaaaaaaaaaaaaaaaaaaaaaaaaaaaaaaaaaaaaaaaaaaaaaaaaaugcaucccccccccccccccccccccccccccccccaaaggcucuuuucagagccaccagaauu

SEQ ID NO: 12565 - RNA, 2123 nt, Artificial Sequence
  mRNA product Design c-2 comprising derived and/or modified sequence from HRSV(Memphis-37)__AIY60640.1__F0_DSCav1 (opt4)
gggagacuccugucgggcggaaguaggaggaguagaguuuaaaaacaguacucuuuuuccgguucgggacguaguugaagcaacgacaagccggauaaccgcucuugagacaggaagcuuaccauggagcugcccauccugaagaccaacgccaucaccaccauccuggccgccgugacccugugcuucgccagcagccagaacaucaccgaggaguucuaccagagcaccugcagcgccgugagcaagggcuaccugagcgcccugagaaccggcugguacaccagcgugaucaccaucgagcugagcaacaucaaggagaacaagugcaacggcaccgacgccaaggugaagcugaucaagcaggagcuggacaaguacaagaacgccgugaccgagcugcagcugcugaugcagagcacccccgccgccaacaacagagccagaagagagcugcccagauucaugaacuacacccugaacaacaccaagaacaacaacgugacccugagcaagaagagaaagagaagauuccugggcuuccugcugggcgugggcagcgccaucgccagcggcaucgccgugugcaaggugcugcaccuggagggcgaggugaacaagaucaagaacgcccugcugagcaccaacaaggccguggugagccugagcaacggcgugagcgugcugaccuucaaggugcuggaccugaagaacuacaucgacaagcagcugcugcccauccugaacaagcagagcugcagcaucagcaacaucgagaccgugaucgaguuccagcagaagaacaacagacugcuggagaucaccagagaguucagcgugaacgccggcgugaccacccccgugagcaccuacaugcugaccaacagcgagcugcugagccugaucaacgacaugcccaucaccaacgaccagaagaagcugaugagcaacaacgugcagaucgugagacagcagagcuacagcaucaugugcaucaucaaggaggaggugcuggccuacguggugcagcugccccuguacggcgugaucgacacccccugcuggaagcugcacaccagcccccugugcaccaccaacaccaaggagggcagcaacaucugccugaccagaaccgacagaggcugguacugcgacaacgccggcagcgugagcuucuucccccaggccgagaccugcaaggugcagagcaacagaguguucugcgacaccaugaacagccugacccugcccagcgaggugaaccugugcaacaucgacaucuucaaccccaaguacgacugcaagaucaugaccagcaagaccgacgugagcagcagcgugaucaccagccugggcgccaucgugagcugcuacggcaagaccaagugcaccgccagcaacaagaacagaggcaucaucaagaccuucagcaacggcugcgacuacgugagcaacaagggcguggacaccgugagcgugggcaacacccuguacuacgugaacaagcaggagggcaagagccuguacgugaagggcgagcccaucaucaacuucuacgacccccugguguuccccagcgacgaguucgacgccagcaucagccaggugaacgagaagaucaaccagagccuggccuucaucagaaagagcgacgagcugcugcacaacgugaacgugggcaagagcaccaccaacaucaugaucaccaccaucaucaucgugaucaucgugauccugcugcugcugaucgccgugggccuguuccuguacugcaaggccagaagcacccccgugacccugagcaaggaccagcugagcggcaucaacaacaucgccuucagcaacugaggacuaguggaagcauuuuccuggcugauuaaaagaaauuacucagcuauggucaucuguuccuguuagaaggcuaugcagcauauuauauacuaugcgcauguuaugaaaugcauaauaaaaaauuuuaaaaaaucuaaaagaucuaaaaaaaaaaaaaaaaaaaaaaaaaaaaaaaaaaaaaaaaaaaaaaaaaaaaaaaaaaaaaaaaugcaucccccccccccccccccccccccccccccccaaaggcucuuuucagagccaccagaauu

SEQ ID NO: 12566 - RNA, 2123 nt, Artificial Sequence
  mRNA product Design c-2 comprising derived and/or modified sequence from HRSV(Memphis-37)__AIY60640.1__F0_DSCav1 (opt5)
gggagacuccugucgggcggaaguaggaggaguagaguuuaaaaacaguacucuuuuuccgguucgggacguaguugaagcaacgacaagccggauaaccgcucuugagacaggaagcuuaccauggagcugcccauccucaagaccaacgccauuacaacgauccuggcugccgugacccuuugcuucgcgagcucccagaauauuacagaagaguuuuaccaaucuaccuguagcgcugucuccaaaggcuaucugucugcccucagaacagggugguacaccagcguuaucacaauugaacuguccaacaucaaggagaauaaaugcaacggaaccgacgccaaggugaaacuuaucaagcaggaacuggauaaguauaaaaaugcugugacggagcuccagcugcugaugcagucuaccccugccgcuaacaaucgggcccgcagagagcucccgcgguucaugaacuacacacugaauaacaccaagaauaacaaugucacacuuagcaaaaagcgcaaaagacgguuucugggcuuccuccugggggugggauccgcgauugccagcggcaucgcuguuuguaaggugcuucaccuggaaggggaggucaacaagauuaaaaaugcccuccugucuaccaacaaggcugugguuucccugagcaacggagugucuguccucacguuuaaagugcuggaccuuaagaauuauaucgauaaacaacugcuccccauucugaacaagcaguccugcagcaucucuaauauugaaacagugaucgaguuccagcagaaaaacaaucgccuucuggagaucaccagagaauuuuccgucaacgccggcguuacaaccccugugagcaccuacaugcucacaaauuccgagcugcugucucucauuaacgacaugcccaucacgaaugaucaaaagaagcugaugagcaacaaugugcagauuguccggcagcaguccuauagcaucauguguauuaucaaagaagaggugcuugcguacguugugcaacugccucucuacggcgucaucgacacccccugcuggaagcugcauacaucuccucuuuguaccacaaacaccaaagaaggguccaauauuugccugacgcgcacagauagaggaugguauugugacaacgccggcagcgugucuuucuuuccgcaggcugagaccugcaagguucagagcaaucggguguucugugauaccaugaacucccucacacugcccucugaggucaaccugugcaauaucgacauuuuuaacccuaaauacgauugcaagaucaugaccagcaagacagacguguccagcucugucauuacgucccucggggccaucgugagcuguuauggaaaaaccaagugcacagcuucuaauaaaaaccgcggcaucauuaagaccuucuccaaugggugugauuacguuagcaacaaaggaguggacacagucuccgugggcaauacccuguauuacguuaacaagcaagaaggcaagucucuuuaugugaaaggggagcccaucauuaauuuuuacgacccucuggucuuccccagcgaugaguucgacgccuccaucucucaggugaacgaaaagauuaaucagagccucgccuuuaucagaaaauccgaugaacugcugcacaacgugaauguuggaaagagcacgaccaacauuaugaucacaaccaucauuaucgucauuaucgugauucuucuccugcugaucgcugugggccucuuccuguacugcaaagcgcggucuacaccggucacccuuuccaaggaccagcugagcgggaucaauaacauugccuuuucuaacugaggacuaguggaagcauuuuccuggcugauuaaaagaaauuacucagcuauggucaucuguuccuguuagaaggcuaugcagcauauuauauacuaugcgcauguuaugaaaugcauaauaaaaaauuuuaaaaaaucuaaaagaucuaaaaaaaaaaaaaaaaaaaaaaaaaaaaaaaaaaaaaaaaaaaaaaaaaaaaaaaaaaaaaaaaugcaucccccccccccccccccccccccccccccccaaaggcucuuuucagagccaccagaauu

SEQ ID NO: 12567 - RNA, 2123 nt, Artificial Sequence
  mRNA product Design c-2 comprising derived and/or modified sequence from HRSV(Memphis-37)__AIY60640.1__F0_DSCav1 (opt6)
gggagacuccugucgggcggaaguaggaggaguagaguuuaaaaacaguacucuuuuuccgguucgggacguaguugaagcaacgacaagccggauaaccgcucuugagacaggaagcuuaccauggaacucccaauccucaaaaccaaugccauaacaaccauacucgcugcaguaaccuuauguuucgcaaguagccaaaacauaaccgaagaauuuuaucaauccacaugcuccgcaguuucuaaaggauaucuaucagcauuaagaacuggaugguacacaucuguaauaacuauagaacuaagcaauauaaaagaaaacaaauguaacggaacugacgcuaaaguaaaacuuauaaaacaagaacuagauaaauacaaaaacgccguuaccgaacuacaacuauuaaugcaaucaacaccagccgcaaauaacagagcaagacgcgaauuaccaagauucaugaauuacacacuaaacaauacaaaaaauaacaauguaacacuaucaaaaaaaagaaaacgacgauucuuaggcuuccuacuaggagucggcucagcaauagcuuccggaauagccgucuguaaaguccuacaccuugaaggcgaaguaaacaaaaucaaaaacgcacuauuaucaacaaacaaagcagucguaucuuuauccaacggagucucaguccuaacauucaaaguacucgauuuaaaaaacuacaucgauaaacaacuccuucccauucuaaacaaacaauccugcucaauauccaacaucgaaacagucauagaauuucaacaaaaaaacaaccgccugcuagaaauaacaagagaauuuuccguaaaugccggcgucaccacaccaguaucaacauacaugcuaacaaacuccgaacuacucucccuaauaaacgauaugccaaucaccaacgaccaaaaaaaacuaaugucaaauaacguucaaauagucagacaacaaucauacagcauaaugugcauaauaaaagaagaagucuuagccuacguuguacaacucccauuauacggaguuaucgauacaccaugcuggaaauuacacacaucacccuuaugcaccacaaacacaaaagaaggauccaauauuugucuaacacgaacagacagaggaugguacugugauaacgcaggaucagugucauucuuuccacaagcagaaacauguaaaguucaaucuaacagaguauucugcgacaccaugaacucccuaaccuuacccucagaaguaaaucuaugcaacauagauaucuuuaacccaaaauacgacugcaaaaucaugacaucaaaaacugacguuucuucauccguuauaacuucccucggcgcuauaguguccugcuacggaaaaacuaaaugcacagcauccaacaaaaauagaggaauaauaaaaacauuuuccaacggcugcgacuauguuucaaacaaaggaguagauaccguaucagucggcaauacauuauauuauguuaacaaacaagaaggaaaaucccuauacguaaaaggagaaccuauaaucaacuucuacgacccacucguauuccccucagacgaauuugacgcaucuauaucucaaguaaaugaaaaaauaaaccaaucacucgcauuuauccgcaaaucugacgaauuacuccauaacgucaacgucggcaaaucaaccaccaacauaaugauaacaacaauuauaauaguaauaauugucauacuacuacuccuaauagcaguaggucuauuccuauacugcaaagcaagauccacccccguaacccuuuccaaagaucaacucucaggaauaaauaacauagccuuuucaaacuaaggacuaguggaagcauuuuccuggcugauuaaaagaaauuacucagcuauggucaucuguuccuguuagaaggcuaugcagcauauuauauacuaugcgcauguuaugaaaugcauaauaaaaaauuuuaaaaaaucuaaaagaucuaaaaaaaaaaaaaaaaaaaaaaaaaaaaaaaaaaaaaaaaaaaaaaaaaaaaaaaaaaaaaaaaugcaucccccccccccccccccccccccccccccccaaaggcucuuuucagagccaccagaauu

SEQ ID NO: 12568 - RNA, 2123 nt, Artificial Sequence
  mRNA product Design c-2 comprising derived and/or modified sequence from HRSV(Memphis-37)__AIY60640.1__F0_DSCav1 (opt11)
gggagacuccugucgggcggaaguaggaggaguagaguuuaaaaacaguacucuuuuuccgguucgggacguaguugaagcaacgacaagccggauaaccgcucuugagacaggaagcuuaccauggaacuccccauacucaagacuaaugccaucaccaccauccucgccgccgugacccucugcuucgcaucgucccaaaacauaacagaagaguucuaccaaagcacaugcuccgcagucuccaaaggauaccucuccgcacuacguaccggcugguacaccagcgucaucaccaucgaacuuuccaacaucaaagagaacaaaugcaacggcaccgacgccaaaguaaaacucauaaaacaagagcuagacaaauacaaaaacgccgucacagaacuccaacuacugaugcaauccacaccggccgccaacaaccgcgcucgacgugaacucccacgcuucaugaacuacacucuuaacaacaccaaaaauaacaacgucacccuauccaaaaagcgaaagcgcagauuccucggcuuccuacuuggcgucggcucggcgauagccucuggaaucgccguuugcaagguccuccaccuagaaggcgaaguaaacaaaaucaaaaacgcacuccuaagcaccaacaaagccgucgucucacuuuccaacggcgucucaguccucacauucaaaguucucgaccuaaagaacuacaucgacaagcaacuacuacccauacucaauaaacaauccugcuccaucagcaacaucgagacagucaucgaauuucaacaaaagaacaaccgccuccucgaaauuacacgcgaguucucagucaacgccggagucaccaccccagucucaacauacaugcucaccaacagcgaacuccugucucuaaucaacgacaugcccaucacuaacgaccagaagaaacucauguccaacaacguccaaaucgugcgacaacaaucauacucuaucaugugcaucaucaaagaagaaguccucgcauacgucguccagcucccacucuacggcguaaucgacacacccugcuggaaacuccacacaucaccccuaugcaccaccaacacaaaagaaggcuccaacaucugccuaacccgaaccgacagagguugguauugcgacaacgccggcucagucucauucuucccacaagccgaaaccuguaaaguccaaucaaaccgcgucuucugcgauaccaugaacucucucacacuccccuccgaagucaaucucugcaacauagacaucuucaauccaaaguacgacugcaaaauaaugaccucgaaaaccgacguaagcuccagcgucaucaccuccuuaggcgcaaucguauccugcuacggcaaaaccaaaugcaccgccucaaacaaaaacagaggcaucaucaaaacguucucgaacggaugcgacuacguuuccaauaaaggcguagauaccgucuccgucggcaacacacucuauuacgucaacaaacaagaaggcaaaucccucuacgucaaaggugaaccuaucaucaacuucuacgacccccucgucuuccccagcgacgaguucgaugccucaaucagccaagucaacgagaaaaucaaccaaucacuggcuuucauacgcaaauccgacgaacuccuccacaacgugaacgucggcaaauccacaaccaacaucaugauaaccacaauaaucaucgucauaaucguaauccuacuccuccuuauugccguaggacuauuccuauacugcaaagcccgauccacccccgucacccucucaaaagaccaacucuccggcaucaacaauauagccuucucuaacuaaggacuaguggaagcauuuuccuggcugauuaaaagaaauuacucagcuauggucaucuguuccuguuagaaggcuaugcagcauauuauauacuaugcgcauguuaugaaaugcauaauaaaaaauuuuaaaaaaucuaaaagaucuaaaaaaaaaaaaaaaaaaaaaaaaaaaaaaaaaaaaaaaaaaaaaaaaaaaaaaaaaaaaaaaaugcaucccccccccccccccccccccccccccccccaaaggcucuuuucagagccaccagaauu

SEQ ID NO: 12569 - RNA, 2100 nt, Artificial Sequence
  mRNA product Design c-3 comprising derived and/or modified sequence from HRSV(Memphis-37)__AIY60640.1__F0_DSCav1 (opt1)
gggagaguccgcucagccagguugcagaagcggcuuagcguguguccuaaucuucucucugcguguagguaggccugugccgcaaacaagcuuaccauggagcugcccauccucaagaccaacgccaucaccacgauccuggccgcggugacccugugcuucgccagcucccagaacaucaccgaggaguucuaccagagcacgugcuccgccgucagcaagggcuaccucuccgcccugcgcaccgggugguacaccagcgugaucaccaucgagcuguccaacaucaaggagaacaagugcaacggcaccgacgccaaggugaagcucaucaagcaggagcuggacaaguacaagaacgcggucacggagcugcagcuccugaugcagagcaccccggccgccaacaaccgggcccgccgggagcugccccgcuucaugaacuacacccucaacaacaccaagaacaacaacgugacgcuguccaagaagcggaagcgccgguuccugggguuccuccugggcguggggagcgcgaucgccuccggcaucgccgucugcaaggugcugcaccucgagggcgaggugaacaagaucaagaacgcccugcuguccaccaacaaggccgucgugagccucuccaacggggugagcguccugaccuucaaggugcuggaccucaagaacuacaucgacaagcagcugcugcccauccugaacaagcagagcugcuccaucagcaacaucgagaccgucaucgaguuccagcagaagaacaaccgccuccuggagaucacgcgggaguucagcgugaacgcgggcgugaccacccccgucuccaccuacaugcugacgaacagcgagcuccugucccugaucaacgacaugccgaucaccaacgaccagaagaagcucaugagcaacaacgugcagaucgugcgccagcaguccuacagcaucaugugcaucaucaaggaggagguccuggccuacguggugcagcugccccucuacggggucaucgacacccccugcuggaagcugcacaccagcccccugugcacgaccaacaccaaggagggcuccaacaucugccucacccggacggaccgcgggugguacugcgacaacgccggcagcguguccuucuucccgcaggccgagaccugcaagguccagagcaaccggguguucugcgacaccaugaacucccugacccugcccagcgaggugaaccucugcaacaucgacaucuucaaccccaaguacgacugcaagaucaugacguccaagaccgacgucagcuccagcgugaucaccucccugggcgccaucgugagcugcuacgggaagaccaagugcacggcgagcaacaagaaccgcggcaucaucaagaccuucuccaacgggugcgacuacgucagcaacaagggcguggacaccguguccgucggcaacacccuguacuacgugaacaagcaggagggcaagagccucuacgugaagggggagcccaucaucaacuucuacgacccgcuggucuuccccuccgacgaguucgacgccagcaucucccaggugaacgagaagaucaaccagagccuggccuucauccggaaguccgacgagcuccugcacaacgugaacgucggcaagagcaccacgaacaucaugaucaccaccaucaucaucgugaucaucgugauccugcugcuccugaucgccgucgggcuguuccucuacugcaaggcccgcuccacccccgugacgcugagcaaggaccagcuguccgggaucaacaacaucgcguucagcaacugaggacuaguacuggcugcaucucccuuuccucuguccuccauccuucucccaggauggugaagggggaccugguacccagugauccccaccccaggauccuaaaucaugacuuaccugcuaauaaaaacucauuggaaaagugagaagaucuaaaaaaaaaaaaaaaaaaaaaaaaaaaaaaaaaaaaaaaaaaaaaaaaaaaaaaaaaaaaaaaaugcaucccccccccccccccccccccccccccccccaaaggcucuuuucagagccaccagaauu

SEQ ID NO: 12570 - RNA, 2100 nt, Artificial Sequence
  mRNA product Design c-3 comprising derived and/or modified sequence from HRSV(Memphis-37)__AIY60640.1__F0_DSCav1 (opt1)
gggagaguccgcucagccagguugcagaagcggcuuagcguguguccuaaucuucucucugcguguagguaggccugugccgcaaacaagcuuaccauggagcugcccauccucaagaccaacgccaucaccacgauccuggccgcggugacccugugcuucgccagcucccagaacaucaccgaggaguucuaccagagcacgugcuccgccgucagcaagggcuaccucuccgcccugcgcaccgggugguacaccagcgugaucaccaucgagcuguccaacaucaaggagaacaagugcaacggcaccgacgccaaggugaagcucaucaagcaggagcuggacaaguacaagaacgcggucacggagcugcagcuccugaugcagagcaccccggccgccaacaaccgggcccgccgggagcugccccgcuucaugaacuacacccucaacaacaccaagaacaacaacgugacgcuguccaagaagcggaagcgccgguuccugggguuccuccugggcguggggagcgcgaucgccuccggcaucgccgucugcaaggugcugcaccucgagggcgaggugaacaagaucaagaacgcccugcugagcaccaacaaggccgucgugucccucagcaacgggguguccguccugaccuucaaggugcuggaccucaagaacuacaucgacaagcagcugcugcccauccucaacaagcagagcugcuccaucagcaacaucgagaccgugaucgaguuccagcagaagaacaaccgccugcuggagaucacgcgggaguucuccgucaacgcgggcgugaccacccccgugagcaccuacaugcucacgaacagcgagcugcugucccucaucaacgacaugccgaucaccaacgaccagaagaagcugaugagcaacaacguccagaucgugcgccagcaguccuacagcaucaugugcaucaucaaggaggaggugcuggccuacgucgugcagcucccccuguacggggugaucgacacccccugcuggaagcugcacaccagcccccucugcacgaccaacaccaaggagggcagcaacaucugccugacccggacggaccgcgggugguacugcgacaacgccggcuccgucagcuucuucccgcaggccgagaccugcaaggugcaguccaaccgggucuucugcgacaccaugaacagccugacccuccccuccgaggugaaccugugcaacaucgacaucuucaaccccaaguacgacugcaagaucaugacgagcaagaccgacguguccagcuccgucaucaccagccugggcgccaucguguccugcuacgggaagaccaagugcacggcgagcaacaagaaccgcggcaucaucaagaccuucuccaacgggugcgacuacgugagcaacaagggcgucgacaccgugagcgugggcaacacccucuacuacgucaacaagcaggaggggaagucccuguacgugaagggcgagcccaucaucaacuucuacgacccgcugguguuccccagcgacgaguucgacgccuccaucagccaggucaacgagaagaucaaccagucccucgccuucauccggaaguccgacgagcugcugcacaacgugaacguggggaaguccaccacgaacaucaugaucaccaccaucaucaucgucaucaucgugauccugcuccugcugaucgccgugggccucuuccuguacugcaaggcccgcagcacccccgucacgcuguccaaggaccagcucagcgggaucaacaacaucgcguucuccaacugaggacuaguacuggcugcaucucccuuuccucuguccuccauccuucucccaggauggugaagggggaccugguacccagugauccccaccccaggauccuaaaucaugacuuaccugcuaauaaaaacucauuggaaaagugagaagaucuaaaaaaaaaaaaaaaaaaaaaaaaaaaaaaaaaaaaaaaaaaaaaaaaaaaaaaaaaaaaaaaaugcaucccccccccccccccccccccccccccccccaaaggcucuuuucagagccaccagaauu

SEQ ID NO: 12571 - RNA, 2100 nt, Artificial Sequence
  mRNA product Design c-3 comprising derived and/or modified sequence from HRSV(Memphis-37)__AIY60640.1__F0_DSCav1 (opt2)
gggagaguccgcucagccagguugcagaagcggcuuagcguguguccuaaucuucucucugcguguagguaggccugugccgcaaacaagcuuaccauggagcuccccauccucaagaccaacgccaucaccaccauccucgccgccgucacccucugcuucgccuccucccagaacaucaccgaggaguucuaccaguccaccugcuccgccgucuccaagggcuaccucuccgcccuccgcaccggcugguacaccuccgucaucaccaucgagcucuccaacaucaaggagaacaagugcaacggcaccgacgccaaggucaagcucaucaagcaggagcucgacaaguacaagaacgccgucaccgagcuccagcuccucaugcaguccacccccgccgccaacaaccgcgcccgccgcgagcucccccgcuucaugaacuacacccucaacaacaccaagaacaacaacgucacccucuccaagaagcgcaagcgccgcuuccucggcuuccuccucggcgucggcuccgccaucgccuccggcaucgccgucugcaagguccuccaccucgagggcgaggucaacaagaucaagaacgcccuccucuccaccaacaaggccgucgucucccucuccaacggcgucuccguccucaccuucaagguccucgaccucaagaacuacaucgacaagcagcuccuccccauccucaacaagcaguccugcuccaucuccaacaucgagaccgucaucgaguuccagcagaagaacaaccgccuccucgagaucacccgcgaguucuccgucaacgccggcgucaccacccccgucuccaccuacaugcucaccaacuccgagcuccucucccucaucaacgacaugcccaucaccaacgaccagaagaagcucauguccaacaacguccagaucguccgccagcaguccuacuccaucaugugcaucaucaaggaggagguccucgccuacgucguccagcucccccucuacggcgucaucgacacccccugcuggaagcuccacaccuccccccucugcaccaccaacaccaaggagggcuccaacaucugccucacccgcaccgaccgcggcugguacugcgacaacgccggcuccgucuccuucuucccccaggccgagaccugcaagguccaguccaaccgcgucuucugcgacaccaugaacucccucacccuccccuccgaggucaaccucugcaacaucgacaucuucaaccccaaguacgacugcaagaucaugaccuccaagaccgacgucuccuccuccgucaucaccucccucggcgccaucgucuccugcuacggcaagaccaagugcaccgccuccaacaagaaccgcggcaucaucaagaccuucuccaacggcugcgacuacgucuccaacaagggcgucgacaccgucuccgucggcaacacccucuacuacgucaacaagcaggagggcaagucccucuacgucaagggcgagcccaucaucaacuucuacgacccccucgucuuccccuccgacgaguucgacgccuccaucucccaggucaacgagaagaucaaccagucccucgccuucauccgcaaguccgacgagcuccuccacaacgucaacgucggcaaguccaccaccaacaucaugaucaccaccaucaucaucgucaucaucgucauccuccuccuccucaucgccgucggccucuuccucuacugcaaggcccgcuccacccccgucacccucuccaaggaccagcucuccggcaucaacaacaucgccuucuccaacugaggacuaguacuggcugcaucucccuuuccucuguccuccauccuucucccaggauggugaagggggaccugguacccagugauccccaccccaggauccuaaaucaugacuuaccugcuaauaaaaacucauuggaaaagugagaagaucuaaaaaaaaaaaaaaaaaaaaaaaaaaaaaaaaaaaaaaaaaaaaaaaaaaaaaaaaaaaaaaaaugcaucccccccccccccccccccccccccccccccaaaggcucuuuucagagccaccagaauu

SEQ ID NO: 12572 - RNA, 2100 nt, Artificial Sequence
  mRNA product Design c-3 comprising derived and/or modified sequence from HRSV(Memphis-37)__AIY60640.1__F0_DSCav1 (opt3)
gggagaguccgcucagccagguugcagaagcggcuuagcguguguccuaaucuucucucugcguguagguaggccugugccgcaaacaagcuuaccauggagcugcccauccucaagaccaacgccauuacaacuauacuugcugcagugacgcugugcuucgccagcucccagaauaucaccgaagaguuuuaccaaucuacauguucagcggucaguaaaggcuauuugagcgcuuuaagaacugggugguacaccuccguuauuacaaucgaacugucuaacauuaaggagaauaaaugcaacggaaccgacgccaaggugaaacuaaucaagcaggaacucgauaaguauaaaaaugcaguaacugagcugcagcuucugaugcagucgaccccugccgcuaacaauagggcacggcgcgaguugccacgauucaugaacuacacacucaauaacacgaagaauaacaaugugacucugagcaaaaagcguaaaagaagguuucuggguuuccucuuaggcgucgggucagccauagcuaguggaaucgccguguguaagguucugcaccuugaaggcgaggugaacaagauuaaaaaugcguugcuguccaccaacaaggcagucgugucucuaagcaacgguguauccguucucacauuuaaagugcuggaccuuaagaauuauaucgauaaacaacuguugccgauucucaacaagcagucaugcaguaucagcaauauagaaacugucauugaguuccagcagaaaaacaaucggcuguuagagaucacccgcgaauuuucugugaacgccggggugacaacccccgucuccacguacaugcugacuaauucagagcuccuuagccugauuaacgacaugccuaucacaaaugaucaaaagaaguugaugaguaacaauguucagaucgugagacagcagucuuauuccauuauguguauaaucaaagaagagguacuagcuuacgugguccaacugccacucuacggagugauugacacccccugcuggaagcugcauacuagcccucuuuguacaaccaacacgaaagaaggcucgaauaucugccugaccaggacagaucggggcugguauugugacaacgccgggucuguuuccuucuuuccacaggcagagacuugcaaggugcagucaaaucgcgucuucugugauaccaugaacaguuugacacuccccagcgaggugaaccugugcaauauagacauuuuuaacccuaaauacgauugcaagaucaugacuuccaagaccgacguaucuagcucaguuaucacaaguuuaggagcuauuguguccuguuaugguaaaaccaagugcacugccagcaauaaaaaccgaggcaucauuaagacguucucuaaugggugugauuacgucucaaacaaaggaguggacacagucagugugggcaauacccuguauuacguuaacaagcaagaagguaagagccuauaugugaaaggggagccaauaaucaauuuuuacgacccgcucguauuccccuccgaugaguucgacgcgucuauuucgcaggucaacgaaaagaucaaucagagccuggccuuuaucagaaaauccgaugaacuuuugcacaacgugaauguuggaaagucaacuaccaacauuaugauaacaaccaucauuaucgugauuaucgucauacugcuccugcuuaucgcagugggccuguucuuguacugcaaagcuaggaguacuccuguaacacucucuaaggaccagcugagcggcauuaauaacaucgccuuuuccaacugaggacuaguacuggcugcaucucccuuuccucuguccuccauccuucucccaggauggugaagggggaccugguacccagugauccccaccccaggauccuaaaucaugacuuaccugcuaauaaaaacucauuggaaaagugagaagaucuaaaaaaaaaaaaaaaaaaaaaaaaaaaaaaaaaaaaaaaaaaaaaaaaaaaaaaaaaaaaaaaaugcaucccccccccccccccccccccccccccccccaaaggcucuuuucagagccaccagaauu

SEQ ID NO: 12573 - RNA, 2100 nt, Artificial Sequence
  mRNA product Design c-3 comprising derived and/or modified sequence from HRSV(Memphis-37)__AIY60640.1__F0_DSCav1 (opt4)
gggagaguccgcucagccagguugcagaagcggcuuagcguguguccuaaucuucucucugcguguagguaggccugugccgcaaacaagcuuaccauggagcugcccauccugaagaccaacgccaucaccaccauccuggccgccgugacccugugcuucgccagcagccagaacaucaccgaggaguucuaccagagcaccugcagcgccgugagcaagggcuaccugagcgcccugagaaccggcugguacaccagcgugaucaccaucgagcugagcaacaucaaggagaacaagugcaacggcaccgacgccaaggugaagcugaucaagcaggagcuggacaaguacaagaacgccgugaccgagcugcagcugcugaugcagagcacccccgccgccaacaacagagccagaagagagcugcccagauucaugaacuacacccugaacaacaccaagaacaacaacgugacccugagcaagaagagaaagagaagauuccugggcuuccugcugggcgugggcagcgccaucgccagcggcaucgccgugugcaaggugcugcaccuggagggcgaggugaacaagaucaagaacgcccugcugagcaccaacaaggccguggugagccugagcaacggcgugagcgugcugaccuucaaggugcuggaccugaagaacuacaucgacaagcagcugcugcccauccugaacaagcagagcugcagcaucagcaacaucgagaccgugaucgaguuccagcagaagaacaacagacugcuggagaucaccagagaguucagcgugaacgccggcgugaccacccccgugagcaccuacaugcugaccaacagcgagcugcugagccugaucaacgacaugcccaucaccaacgaccagaagaagcugaugagcaacaacgugcagaucgugagacagcagagcuacagcaucaugugcaucaucaaggaggaggugcuggccuacguggugcagcugccccuguacggcgugaucgacacccccugcuggaagcugcacaccagcccccugugcaccaccaacaccaaggagggcagcaacaucugccugaccagaaccgacagaggcugguacugcgacaacgccggcagcgugagcuucuucccccaggccgagaccugcaaggugcagagcaacagaguguucugcgacaccaugaacagccugacccugcccagcgaggugaaccugugcaacaucgacaucuucaaccccaaguacgacugcaagaucaugaccagcaagaccgacgugagcagcagcgugaucaccagccugggcgccaucgugagcugcuacggcaagaccaagugcaccgccagcaacaagaacagaggcaucaucaagaccuucagcaacggcugcgacuacgugagcaacaagggcguggacaccgugagcgugggcaacacccuguacuacgugaacaagcaggagggcaagagccuguacgugaagggcgagcccaucaucaacuucuacgacccccugguguuccccagcgacgaguucgacgccagcaucagccaggugaacgagaagaucaaccagagccuggccuucaucagaaagagcgacgagcugcugcacaacgugaacgugggcaagagcaccaccaacaucaugaucaccaccaucaucaucgugaucaucgugauccugcugcugcugaucgccgugggccuguuccuguacugcaaggccagaagcacccccgugacccugagcaaggaccagcugagcggcaucaacaacaucgccuucagcaacugaggacuaguacuggcugcaucucccuuuccucuguccuccauccuucucccaggauggugaagggggaccugguacccagugauccccaccccaggauccuaaaucaugacuuaccugcuaauaaaaacucauuggaaaagugagaagaucuaaaaaaaaaaaaaaaaaaaaaaaaaaaaaaaaaaaaaaaaaaaaaaaaaaaaaaaaaaaaaaaaugcaucccccccccccccccccccccccccccccccaaaggcucuuuucagagccaccagaauu

SEQ ID NO: 12574 - RNA, 2100 nt, Artificial Sequence
  mRNA product Design c-3 comprising derived and/or modified sequence from HRSV(Memphis-37)__AIY60640.1__F0_DSCav1 (opt5)
gggagaguccgcucagccagguugcagaagcggcuuagcguguguccuaaucuucucucugcguguagguaggccugugccgcaaacaagcuuaccauggagcugcccauccucaagaccaacgccauuacaacgauccuggcugccgugacccuuugcuucgcgagcucccagaauauuacagaagaguuuuaccaaucuaccuguagcgcugucuccaaaggcuaucugucugcccucagaacagggugguacaccagcguuaucacaauugaacuguccaacaucaaggagaauaaaugcaacggaaccgacgccaaggugaaacuuaucaagcaggaacuggauaaguauaaaaaugcugugacggagcuccagcugcugaugcagucuaccccugccgcuaacaaucgggcccgcagagagcucccgcgguucaugaacuacacacugaauaacaccaagaauaacaaugucacacuuagcaaaaagcgcaaaagacgguuucugggcuuccuccugggggugggauccgcgauugccagcggcaucgcuguuuguaaggugcuucaccuggaaggggaggucaacaagauuaaaaaugcccuccugucuaccaacaaggcugugguuucccugagcaacggagugucuguccucacguuuaaagugcuggaccuuaagaauuauaucgauaaacaacugcuccccauucugaacaagcaguccugcagcaucucuaauauugaaacagugaucgaguuccagcagaaaaacaaucgccuucuggagaucaccagagaauuuuccgucaacgccggcguuacaaccccugugagcaccuacaugcucacaaauuccgagcugcugucucucauuaacgacaugcccaucacgaaugaucaaaagaagcugaugagcaacaaugugcagauuguccggcagcaguccuauagcaucauguguauuaucaaagaagaggugcuugcguacguugugcaacugccucucuacggcgucaucgacacccccugcuggaagcugcauacaucuccucuuuguaccacaaacaccaaagaaggguccaauauuugccugacgcgcacagauagaggaugguauugugacaacgccggcagcgugucuuucuuuccgcaggcugagaccugcaagguucagagcaaucggguguucugugauaccaugaacucccucacacugcccucugaggucaaccugugcaauaucgacauuuuuaacccuaaauacgauugcaagaucaugaccagcaagacagacguguccagcucugucauuacgucccucggggccaucgugagcuguuauggaaaaaccaagugcacagcuucuaauaaaaaccgcggcaucauuaagaccuucuccaaugggugugauuacguuagcaacaaaggaguggacacagucuccgugggcaauacccuguauuacguuaacaagcaagaaggcaagucucuuuaugugaaaggggagcccaucauuaauuuuuacgacccucuggucuuccccagcgaugaguucgacgccuccaucucucaggugaacgaaaagauuaaucagagccucgccuuuaucagaaaauccgaugaacugcugcacaacgugaauguuggaaagagcacgaccaacauuaugaucacaaccaucauuaucgucauuaucgugauucuucuccugcugaucgcugugggccucuuccuguacugcaaagcgcggucuacaccggucacccuuuccaaggaccagcugagcgggaucaauaacauugccuuuucuaacugaggacuaguacuggcugcaucucccuuuccucuguccuccauccuucucccaggauggugaagggggaccugguacccagugauccccaccccaggauccuaaaucaugacuuaccugcuaauaaaaacucauuggaaaagugagaagaucuaaaaaaaaaaaaaaaaaaaaaaaaaaaaaaaaaaaaaaaaaaaaaaaaaaaaaaaaaaaaaaaaugcaucccccccccccccccccccccccccccccccaaaggcucuuuucagagccaccagaauu

SEQ ID NO: 12575 - RNA, 2100 nt, Artificial Sequence
  mRNA product Design c-3 comprising derived and/or modified sequence from HRSV(Memphis-37)__AIY60640.1__F0_DSCav1 (opt6)
gggagaguccgcucagccagguugcagaagcggcuuagcguguguccuaaucuucucucugcguguagguaggccugugccgcaaacaagcuuaccauggaacucccaauccucaaaaccaaugccauaacaaccauacucgcugcaguaaccuuauguuucgcaaguagccaaaacauaaccgaagaauuuuaucaauccacaugcuccgcaguuucuaaaggauaucuaucagcauuaagaacuggaugguacacaucuguaauaacuauagaacuaagcaauauaaaagaaaacaaauguaacggaacugacgcuaaaguaaaacuuauaaaacaagaacuagauaaauacaaaaacgccguuaccgaacuacaacuauuaaugcaaucaacaccagccgcaaauaacagagcaagacgcgaauuaccaagauucaugaauuacacacuaaacaauacaaaaaauaacaauguaacacuaucaaaaaaaagaaaacgacgauucuuaggcuuccuacuaggagucggcucagcaauagcuuccggaauagccgucuguaaaguccuacaccuugaaggcgaaguaaacaaaaucaaaaacgcacuauuaucaacaaacaaagcagucguaucuuuauccaacggagucucaguccuaacauucaaaguacucgauuuaaaaaacuacaucgauaaacaacuccuucccauucuaaacaaacaauccugcucaauauccaacaucgaaacagucauagaauuucaacaaaaaaacaaccgccugcuagaaauaacaagagaauuuuccguaaaugccggcgucaccacaccaguaucaacauacaugcuaacaaacuccgaacuacucucccuaauaaacgauaugccaaucaccaacgaccaaaaaaaacuaaugucaaauaacguucaaauagucagacaacaaucauacagcauaaugugcauaauaaaagaagaagucuuagccuacguuguacaacucccauuauacggaguuaucgauacaccaugcuggaaauuacacacaucacccuuaugcaccacaaacacaaaagaaggauccaauauuugucuaacacgaacagacagaggaugguacugugauaacgcaggaucagugucauucuuuccacaagcagaaacauguaaaguucaaucuaacagaguauucugcgacaccaugaacucccuaaccuuacccucagaaguaaaucuaugcaacauagauaucuuuaacccaaaauacgacugcaaaaucaugacaucaaaaacugacguuucuucauccguuauaacuucccucggcgcuauaguguccugcuacggaaaaacuaaaugcacagcauccaacaaaaauagaggaauaauaaaaacauuuuccaacggcugcgacuauguuucaaacaaaggaguagauaccguaucagucggcaauacauuauauuauguuaacaaacaagaaggaaaaucccuauacguaaaaggagaaccuauaaucaacuucuacgacccacucguauuccccucagacgaauuugacgcaucuauaucucaaguaaaugaaaaaauaaaccaaucacucgcauuuauccgcaaaucugacgaauuacuccauaacgucaacgucggcaaaucaaccaccaacauaaugauaacaacaauuauaauaguaauaauugucauacuacuacuccuaauagcaguaggucuauuccuauacugcaaagcaagauccacccccguaacccuuuccaaagaucaacucucaggaauaaauaacauagccuuuucaaacuaaggacuaguacuggcugcaucucccuuuccucuguccuccauccuucucccaggauggugaagggggaccugguacccagugauccccaccccaggauccuaaaucaugacuuaccugcuaauaaaaacucauuggaaaagugagaagaucuaaaaaaaaaaaaaaaaaaaaaaaaaaaaaaaaaaaaaaaaaaaaaaaaaaaaaaaaaaaaaaaaugcaucccccccccccccccccccccccccccccccaaaggcucuuuucagagccaccagaauu

SEQ ID NO: 12576 - RNA, 2100 nt, Artificial Sequence
  mRNA product Design c-3 comprising derived and/or modified sequence from HRSV(Memphis-37)__AIY60640.1__F0_DSCav1 (opt11)
gggagaguccgcucagccagguugcagaagcggcuuagcguguguccuaaucuucucucugcguguagguaggccugugccgcaaacaagcuuaccauggaacuccccauacucaagacuaaugccaucaccaccauccucgccgccgugacccucugcuucgcaucgucccaaaacauaacagaagaguucuaccaaagcacaugcuccgcagucuccaaaggauaccucuccgcacuacguaccggcugguacaccagcgucaucaccaucgaacuuuccaacaucaaagagaacaaaugcaacggcaccgacgccaaaguaaaacucauaaaacaagagcuagacaaauacaaaaacgccgucacagaacuccaacuacugaugcaauccacaccggccgccaacaaccgcgcucgacgugaacucccacgcuucaugaacuacacucuuaacaacaccaaaaauaacaacgucacccuauccaaaaagcgaaagcgcagauuccucggcuuccuacuuggcgucggcucggcgauagccucuggaaucgccguuugcaagguccuccaccuagaaggcgaaguaaacaaaaucaaaaacgcacuccuaagcaccaacaaagccgucgucucacuuuccaacggcgucucaguccucacauucaaaguucucgaccuaaagaacuacaucgacaagcaacuacuacccauacucaauaaacaauccugcuccaucagcaacaucgagacagucaucgaauuucaacaaaagaacaaccgccuccucgaaauuacacgcgaguucucagucaacgccggagucaccaccccagucucaacauacaugcucaccaacagcgaacuccugucucuaaucaacgacaugcccaucacuaacgaccagaagaaacucauguccaacaacguccaaaucgugcgacaacaaucauacucuaucaugugcaucaucaaagaagaaguccucgcauacgucguccagcucccacucuacggcguaaucgacacacccugcuggaaacuccacacaucaccccuaugcaccaccaacacaaaagaaggcuccaacaucugccuaacccgaaccgacagagguugguauugcgacaacgccggcucagucucauucuucccacaagccgaaaccuguaaaguccaaucaaaccgcgucuucugcgauaccaugaacucucucacacuccccuccgaagucaaucucugcaacauagacaucuucaauccaaaguacgacugcaaaauaaugaccucgaaaaccgacguaagcuccagcgucaucaccuccuuaggcgcaaucguauccugcuacggcaaaaccaaaugcaccgccucaaacaaaaacagaggcaucaucaaaacguucucgaacggaugcgacuacguuuccaauaaaggcguagauaccgucuccgucggcaacacacucuauuacgucaacaaacaagaaggcaaaucccucuacgucaaaggugaaccuaucaucaacuucuacgacccccucgucuuccccagcgacgaguucgaugccucaaucagccaagucaacgagaaaaucaaccaaucacuggcuuucauacgcaaauccgacgaacuccuccacaacgugaacgucggcaaauccacaaccaacaucaugauaaccacaauaaucaucgucauaaucguaauccuacuccuccuuauugccguaggacuauuccuauacugcaaagcccgauccacccccgucacccucucaaaagaccaacucuccggcaucaacaauauagccuucucuaacuaaggacuaguacuggcugcaucucccuuuccucuguccuccauccuucucccaggauggugaagggggaccugguacccagugauccccaccccaggauccuaaaucaugacuuaccugcuaauaaaaacucauuggaaaagugagaagaucuaaaaaaaaaaaaaaaaaaaaaaaaaaaaaaaaaaaaaaaaaaaaaaaaaaaaaaaaaaaaaaaaugcaucccccccccccccccccccccccccccccccaaaggcucuuuucagagccaccagaauu

SEQ ID NO: 12577 - RNA, 2096 nt, Artificial Sequence
  mRNA product Design c-4 comprising derived and/or modified sequence from HRSV(Memphis-37)__AIY60640.1__F0_DSCav1 (opt1)
gggagaguccgcucagccagguugcagaagcggcuuagcguguguccuaaucuucucucugcguguagguaggccugugccgcaaacaagcuuaccauggagcugcccauccucaagaccaacgccaucaccacgauccuggccgcggugacccugugcuucgccagcucccagaacaucaccgaggaguucuaccagagcacgugcuccgccgucagcaagggcuaccucuccgcccugcgcaccgggugguacaccagcgugaucaccaucgagcuguccaacaucaaggagaacaagugcaacggcaccgacgccaaggugaagcucaucaagcaggagcuggacaaguacaagaacgcggucacggagcugcagcuccugaugcagagcaccccggccgccaacaaccgggcccgccgggagcugccccgcuucaugaacuacacccucaacaacaccaagaacaacaacgugacgcuguccaagaagcggaagcgccgguuccugggguuccuccugggcguggggagcgcgaucgccuccggcaucgccgucugcaaggugcugcaccucgagggcgaggugaacaagaucaagaacgcccugcuguccaccaacaaggccgucgugagccucuccaacggggugagcguccugaccuucaaggugcuggaccucaagaacuacaucgacaagcagcugcugcccauccugaacaagcagagcugcuccaucagcaacaucgagaccgucaucgaguuccagcagaagaacaaccgccuccuggagaucacgcgggaguucagcgugaacgcgggcgugaccacccccgucuccaccuacaugcugacgaacagcgagcuccugucccugaucaacgacaugccgaucaccaacgaccagaagaagcucaugagcaacaacgugcagaucgugcgccagcaguccuacagcaucaugugcaucaucaaggaggagguccuggccuacguggugcagcugccccucuacggggucaucgacacccccugcuggaagcugcacaccagcccccugugcacgaccaacaccaaggagggcuccaacaucugccucacccggacggaccgcgggugguacugcgacaacgccggcagcguguccuucuucccgcaggccgagaccugcaagguccagagcaaccggguguucugcgacaccaugaacucccugacccugcccagcgaggugaaccucugcaacaucgacaucuucaaccccaaguacgacugcaagaucaugacguccaagaccgacgucagcuccagcgugaucaccucccugggcgccaucgugagcugcuacgggaagaccaagugcacggcgagcaacaagaaccgcggcaucaucaagaccuucuccaacgggugcgacuacgucagcaacaagggcguggacaccguguccgucggcaacacccuguacuacgugaacaagcaggagggcaagagccucuacgugaagggggagcccaucaucaacuucuacgacccgcuggucuuccccuccgacgaguucgacgccagcaucucccaggugaacgagaagaucaaccagagccuggccuucauccggaaguccgacgagcuccugcacaacgugaacgucggcaagagcaccacgaacaucaugaucaccaccaucaucaucgugaucaucgugauccugcugcuccugaucgccgucgggcuguuccucuacugcaaggcccgcuccacccccgugacgcugagcaaggaccagcuguccgggaucaacaacaucgcguucagcaacugaggacuaguggaagcauuuuccuggcugauuaaaagaaauuacucagcuauggucaucuguuccuguuagaaggcuaugcagcauauuauauacuaugcgcauguuaugaaaugcauaauaaaaaauuuuaaaaaaucuaaaagaucuaaaaaaaaaaaaaaaaaaaaaaaaaaaaaaaaaaaaaaaaaaaaaaaaaaaaaaaaaaaaaaaaugcaucccccccccccccccccccccccccccccccaaaggcucuuuucagagccaccagaauu

SEQ ID NO: 12578 - RNA, 2096 nt, Artificial Sequence
  mRNA product Design c-4 comprising derived and/or modified sequence from HRSV(Memphis-37)__AIY60640.1__F0_DSCav1 (opt1)
gggagaguccgcucagccagguugcagaagcggcuuagcguguguccuaaucuucucucugcguguagguaggccugugccgcaaacaagcuuaccauggagcugcccauccucaagaccaacgccaucaccacgauccuggccgcggugacccugugcuucgccagcucccagaacaucaccgaggaguucuaccagagcacgugcuccgccgucagcaagggcuaccucuccgcccugcgcaccgggugguacaccagcgugaucaccaucgagcuguccaacaucaaggagaacaagugcaacggcaccgacgccaaggugaagcucaucaagcaggagcuggacaaguacaagaacgcggucacggagcugcagcuccugaugcagagcaccccggccgccaacaaccgggcccgccgggagcugccccgcuucaugaacuacacccucaacaacaccaagaacaacaacgugacgcuguccaagaagcggaagcgccgguuccugggguuccuccugggcguggggagcgcgaucgccuccggcaucgccgucugcaaggugcugcaccucgagggcgaggugaacaagaucaagaacgcccugcugagcaccaacaaggccgucgugucccucagcaacgggguguccguccugaccuucaaggugcuggaccucaagaacuacaucgacaagcagcugcugcccauccucaacaagcagagcugcuccaucagcaacaucgagaccgugaucgaguuccagcagaagaacaaccgccugcuggagaucacgcgggaguucuccgucaacgcgggcgugaccacccccgugagcaccuacaugcucacgaacagcgagcugcugucccucaucaacgacaugccgaucaccaacgaccagaagaagcugaugagcaacaacguccagaucgugcgccagcaguccuacagcaucaugugcaucaucaaggaggaggugcuggccuacgucgugcagcucccccuguacggggugaucgacacccccugcuggaagcugcacaccagcccccucugcacgaccaacaccaaggagggcagcaacaucugccugacccggacggaccgcgggugguacugcgacaacgccggcuccgucagcuucuucccgcaggccgagaccugcaaggugcaguccaaccgggucuucugcgacaccaugaacagccugacccuccccuccgaggugaaccugugcaacaucgacaucuucaaccccaaguacgacugcaagaucaugacgagcaagaccgacguguccagcuccgucaucaccagccugggcgccaucguguccugcuacgggaagaccaagugcacggcgagcaacaagaaccgcggcaucaucaagaccuucuccaacgggugcgacuacgugagcaacaagggcgucgacaccgugagcgugggcaacacccucuacuacgucaacaagcaggaggggaagucccuguacgugaagggcgagcccaucaucaacuucuacgacccgcugguguuccccagcgacgaguucgacgccuccaucagccaggucaacgagaagaucaaccagucccucgccuucauccggaaguccgacgagcugcugcacaacgugaacguggggaaguccaccacgaacaucaugaucaccaccaucaucaucgucaucaucgugauccugcuccugcugaucgccgugggccucuuccuguacugcaaggcccgcagcacccccgucacgcuguccaaggaccagcucagcgggaucaacaacaucgcguucuccaacugaggacuaguggaagcauuuuccuggcugauuaaaagaaauuacucagcuauggucaucuguuccuguuagaaggcuaugcagcauauuauauacuaugcgcauguuaugaaaugcauaauaaaaaauuuuaaaaaaucuaaaagaucuaaaaaaaaaaaaaaaaaaaaaaaaaaaaaaaaaaaaaaaaaaaaaaaaaaaaaaaaaaaaaaaaugcaucccccccccccccccccccccccccccccccaaaggcucuuuucagagccaccagaauu

SEQ ID NO: 12579 - RNA, 2096 nt, Artificial Sequence
  mRNA product Design c-4 comprising derived and/or modified sequence from HRSV(Memphis-37)__AIY60640.1__F0_DSCav1 (opt2)
gggagaguccgcucagccagguugcagaagcggcuuagcguguguccuaaucuucucucugcguguagguaggccugugccgcaaacaagcuuaccauggagcuccccauccucaagaccaacgccaucaccaccauccucgccgccgucacccucugcuucgccuccucccagaacaucaccgaggaguucuaccaguccaccugcuccgccgucuccaagggcuaccucuccgcccuccgcaccggcugguacaccuccgucaucaccaucgagcucuccaacaucaaggagaacaagugcaacggcaccgacgccaaggucaagcucaucaagcaggagcucgacaaguacaagaacgccgucaccgagcuccagcuccucaugcaguccacccccgccgccaacaaccgcgcccgccgcgagcucccccgcuucaugaacuacacccucaacaacaccaagaacaacaacgucacccucuccaagaagcgcaagcgccgcuuccucggcuuccuccucggcgucggcuccgccaucgccuccggcaucgccgucugcaagguccuccaccucgagggcgaggucaacaagaucaagaacgcccuccucuccaccaacaaggccgucgucucccucuccaacggcgucuccguccucaccuucaagguccucgaccucaagaacuacaucgacaagcagcuccuccccauccucaacaagcaguccugcuccaucuccaacaucgagaccgucaucgaguuccagcagaagaacaaccgccuccucgagaucacccgcgaguucuccgucaacgccggcgucaccacccccgucuccaccuacaugcucaccaacuccgagcuccucucccucaucaacgacaugcccaucaccaacgaccagaagaagcucauguccaacaacguccagaucguccgccagcaguccuacuccaucaugugcaucaucaaggaggagguccucgccuacgucguccagcucccccucuacggcgucaucgacacccccugcuggaagcuccacaccuccccccucugcaccaccaacaccaaggagggcuccaacaucugccucacccgcaccgaccgcggcugguacugcgacaacgccggcuccgucuccuucuucccccaggccgagaccugcaagguccaguccaaccgcgucuucugcgacaccaugaacucccucacccuccccuccgaggucaaccucugcaacaucgacaucuucaaccccaaguacgacugcaagaucaugaccuccaagaccgacgucuccuccuccgucaucaccucccucggcgccaucgucuccugcuacggcaagaccaagugcaccgccuccaacaagaaccgcggcaucaucaagaccuucuccaacggcugcgacuacgucuccaacaagggcgucgacaccgucuccgucggcaacacccucuacuacgucaacaagcaggagggcaagucccucuacgucaagggcgagcccaucaucaacuucuacgacccccucgucuuccccuccgacgaguucgacgccuccaucucccaggucaacgagaagaucaaccagucccucgccuucauccgcaaguccgacgagcuccuccacaacgucaacgucggcaaguccaccaccaacaucaugaucaccaccaucaucaucgucaucaucgucauccuccuccuccucaucgccgucggccucuuccucuacugcaaggcccgcuccacccccgucacccucuccaaggaccagcucuccggcaucaacaacaucgccuucuccaacugaggacuaguggaagcauuuuccuggcugauuaaaagaaauuacucagcuauggucaucuguuccuguuagaaggcuaugcagcauauuauauacuaugcgcauguuaugaaaugcauaauaaaaaauuuuaaaaaaucuaaaagaucuaaaaaaaaaaaaaaaaaaaaaaaaaaaaaaaaaaaaaaaaaaaaaaaaaaaaaaaaaaaaaaaaugcaucccccccccccccccccccccccccccccccaaaggcucuuuucagagccaccagaauu

SEQ ID NO: 12580 - RNA, 2096 nt, Artificial Sequence
  mRNA product Design c-4 comprising derived and/or modified sequence from HRSV(Memphis-37)__AIY60640.1__F0_DSCav1 (opt3)
gggagaguccgcucagccagguugcagaagcggcuuagcguguguccuaaucuucucucugcguguagguaggccugugccgcaaacaagcuuaccauggagcugcccauccucaagaccaacgccauuacaacuauacuugcugcagugacgcugugcuucgccagcucccagaauaucaccgaagaguuuuaccaaucuacauguucagcggucaguaaaggcuauuugagcgcuuuaagaacugggugguacaccuccguuauuacaaucgaacugucuaacauuaaggagaauaaaugcaacggaaccgacgccaaggugaaacuaaucaagcaggaacucgauaaguauaaaaaugcaguaacugagcugcagcuucugaugcagucgaccccugccgcuaacaauagggcacggcgcgaguugccacgauucaugaacuacacacucaauaacacgaagaauaacaaugugacucugagcaaaaagcguaaaagaagguuucuggguuuccucuuaggcgucgggucagccauagcuaguggaaucgccguguguaagguucugcaccuugaaggcgaggugaacaagauuaaaaaugcguugcuguccaccaacaaggcagucgugucucuaagcaacgguguauccguucucacauuuaaagugcuggaccuuaagaauuauaucgauaaacaacuguugccgauucucaacaagcagucaugcaguaucagcaauauagaaacugucauugaguuccagcagaaaaacaaucggcuguuagagaucacccgcgaauuuucugugaacgccggggugacaacccccgucuccacguacaugcugacuaauucagagcuccuuagccugauuaacgacaugccuaucacaaaugaucaaaagaaguugaugaguaacaauguucagaucgugagacagcagucuuauuccauuauguguauaaucaaagaagagguacuagcuuacgugguccaacugccacucuacggagugauugacacccccugcuggaagcugcauacuagcccucuuuguacaaccaacacgaaagaaggcucgaauaucugccugaccaggacagaucggggcugguauugugacaacgccgggucuguuuccuucuuuccacaggcagagacuugcaaggugcagucaaaucgcgucuucugugauaccaugaacaguuugacacuccccagcgaggugaaccugugcaauauagacauuuuuaacccuaaauacgauugcaagaucaugacuuccaagaccgacguaucuagcucaguuaucacaaguuuaggagcuauuguguccuguuaugguaaaaccaagugcacugccagcaauaaaaaccgaggcaucauuaagacguucucuaaugggugugauuacgucucaaacaaaggaguggacacagucagugugggcaauacccuguauuacguuaacaagcaagaagguaagagccuauaugugaaaggggagccaauaaucaauuuuuacgacccgcucguauuccccuccgaugaguucgacgcgucuauuucgcaggucaacgaaaagaucaaucagagccuggccuuuaucagaaaauccgaugaacuuuugcacaacgugaauguuggaaagucaacuaccaacauuaugauaacaaccaucauuaucgugauuaucgucauacugcuccugcuuaucgcagugggccuguucuuguacugcaaagcuaggaguacuccuguaacacucucuaaggaccagcugagcggcauuaauaacaucgccuuuuccaacugaggacuaguggaagcauuuuccuggcugauuaaaagaaauuacucagcuauggucaucuguuccuguuagaaggcuaugcagcauauuauauacuaugcgcauguuaugaaaugcauaauaaaaaauuuuaaaaaaucuaaaagaucuaaaaaaaaaaaaaaaaaaaaaaaaaaaaaaaaaaaaaaaaaaaaaaaaaaaaaaaaaaaaaaaaugcaucccccccccccccccccccccccccccccccaaaggcucuuuucagagccaccagaauu

SEQ ID NO: 12581 - RNA, 2096 nt, Artificial Sequence
  mRNA product Design c-4 comprising derived and/or modified sequence from HRSV(Memphis-37)__AIY60640.1__F0_DSCav1 (opt4)
gggagaguccgcucagccagguugcagaagcggcuuagcguguguccuaaucuucucucugcguguagguaggccugugccgcaaacaagcuuaccauggagcugcccauccugaagaccaacgccaucaccaccauccuggccgccgugacccugugcuucgccagcagccagaacaucaccgaggaguucuaccagagcaccugcagcgccgugagcaagggcuaccugagcgcccugagaaccggcugguacaccagcgugaucaccaucgagcugagcaacaucaaggagaacaagugcaacggcaccgacgccaaggugaagcugaucaagcaggagcuggacaaguacaagaacgccgugaccgagcugcagcugcugaugcagagcacccccgccgccaacaacagagccagaagagagcugcccagauucaugaacuacacccugaacaacaccaagaacaacaacgugacccugagcaagaagagaaagagaagauuccugggcuuccugcugggcgugggcagcgccaucgccagcggcaucgccgugugcaaggugcugcaccuggagggcgaggugaacaagaucaagaacgcccugcugagcaccaacaaggccguggugagccugagcaacggcgugagcgugcugaccuucaaggugcuggaccugaagaacuacaucgacaagcagcugcugcccauccugaacaagcagagcugcagcaucagcaacaucgagaccgugaucgaguuccagcagaagaacaacagacugcuggagaucaccagagaguucagcgugaacgccggcgugaccacccccgugagcaccuacaugcugaccaacagcgagcugcugagccugaucaacgacaugcccaucaccaacgaccagaagaagcugaugagcaacaacgugcagaucgugagacagcagagcuacagcaucaugugcaucaucaaggaggaggugcuggccuacguggugcagcugccccuguacggcgugaucgacacccccugcuggaagcugcacaccagcccccugugcaccaccaacaccaaggagggcagcaacaucugccugaccagaaccgacagaggcugguacugcgacaacgccggcagcgugagcuucuucccccaggccgagaccugcaaggugcagagcaacagaguguucugcgacaccaugaacagccugacccugcccagcgaggugaaccugugcaacaucgacaucuucaaccccaaguacgacugcaagaucaugaccagcaagaccgacgugagcagcagcgugaucaccagccugggcgccaucgugagcugcuacggcaagaccaagugcaccgccagcaacaagaacagaggcaucaucaagaccuucagcaacggcugcgacuacgugagcaacaagggcguggacaccgugagcgugggcaacacccuguacuacgugaacaagcaggagggcaagagccuguacgugaagggcgagcccaucaucaacuucuacgacccccugguguuccccagcgacgaguucgacgccagcaucagccaggugaacgagaagaucaaccagagccuggccuucaucagaaagagcgacgagcugcugcacaacgugaacgugggcaagagcaccaccaacaucaugaucaccaccaucaucaucgugaucaucgugauccugcugcugcugaucgccgugggccuguuccuguacugcaaggccagaagcacccccgugacccugagcaaggaccagcugagcggcaucaacaacaucgccuucagcaacugaggacuaguggaagcauuuuccuggcugauuaaaagaaauuacucagcuauggucaucuguuccuguuagaaggcuaugcagcauauuauauacuaugcgcauguuaugaaaugcauaauaaaaaauuuuaaaaaaucuaaaagaucuaaaaaaaaaaaaaaaaaaaaaaaaaaaaaaaaaaaaaaaaaaaaaaaaaaaaaaaaaaaaaaaaugcaucccccccccccccccccccccccccccccccaaaggcucuuuucagagccaccagaauu

SEQ ID NO: 12582 - RNA, 2096 nt, Artificial Sequence
  mRNA product Design c-4 comprising derived and/or modified sequence from HRSV(Memphis-37)__AIY60640.1__F0_DSCav1 (opt5)
gggagaguccgcucagccagguugcagaagcggcuuagcguguguccuaaucuucucucugcguguagguaggccugugccgcaaacaagcuuaccauggagcugcccauccucaagaccaacgccauuacaacgauccuggcugccgugacccuuugcuucgcgagcucccagaauauuacagaagaguuuuaccaaucuaccuguagcgcugucuccaaaggcuaucugucugcccucagaacagggugguacaccagcguuaucacaauugaacuguccaacaucaaggagaauaaaugcaacggaaccgacgccaaggugaaacuuaucaagcaggaacuggauaaguauaaaaaugcugugacggagcuccagcugcugaugcagucuaccccugccgcuaacaaucgggcccgcagagagcucccgcgguucaugaacuacacacugaauaacaccaagaauaacaaugucacacuuagcaaaaagcgcaaaagacgguuucugggcuuccuccugggggugggauccgcgauugccagcggcaucgcuguuuguaaggugcuucaccuggaaggggaggucaacaagauuaaaaaugcccuccugucuaccaacaaggcugugguuucccugagcaacggagugucuguccucacguuuaaagugcuggaccuuaagaauuauaucgauaaacaacugcuccccauucugaacaagcaguccugcagcaucucuaauauugaaacagugaucgaguuccagcagaaaaacaaucgccuucuggagaucaccagagaauuuuccgucaacgccggcguuacaaccccugugagcaccuacaugcucacaaauuccgagcugcugucucucauuaacgacaugcccaucacgaaugaucaaaagaagcugaugagcaacaaugugcagauuguccggcagcaguccuauagcaucauguguauuaucaaagaagaggugcuugcguacguugugcaacugccucucuacggcgucaucgacacccccugcuggaagcugcauacaucuccucuuuguaccacaaacaccaaagaaggguccaauauuugccugacgcgcacagauagaggaugguauugugacaacgccggcagcgugucuuucuuuccgcaggcugagaccugcaagguucagagcaaucggguguucugugauaccaugaacucccucacacugcccucugaggucaaccugugcaauaucgacauuuuuaacccuaaauacgauugcaagaucaugaccagcaagacagacguguccagcucugucauuacgucccucggggccaucgugagcuguuauggaaaaaccaagugcacagcuucuaauaaaaaccgcggcaucauuaagaccuucuccaaugggugugauuacguuagcaacaaaggaguggacacagucuccgugggcaauacccuguauuacguuaacaagcaagaaggcaagucucuuuaugugaaaggggagcccaucauuaauuuuuacgacccucuggucuuccccagcgaugaguucgacgccuccaucucucaggugaacgaaaagauuaaucagagccucgccuuuaucagaaaauccgaugaacugcugcacaacgugaauguuggaaagagcacgaccaacauuaugaucacaaccaucauuaucgucauuaucgugauucuucuccugcugaucgcugugggccucuuccuguacugcaaagcgcggucuacaccggucacccuuuccaaggaccagcugagcgggaucaauaacauugccuuuucuaacugaggacuaguggaagcauuuuccuggcugauuaaaagaaauuacucagcuauggucaucuguuccuguuagaaggcuaugcagcauauuauauacuaugcgcauguuaugaaaugcauaauaaaaaauuuuaaaaaaucuaaaagaucuaaaaaaaaaaaaaaaaaaaaaaaaaaaaaaaaaaaaaaaaaaaaaaaaaaaaaaaaaaaaaaaaugcaucccccccccccccccccccccccccccccccaaaggcucuuuucagagccaccagaauu

SEQ ID NO: 12583 - RNA, 2096 nt, Artificial Sequence
  mRNA product Design c-4 comprising derived and/or modified sequence from HRSV(Memphis-37)__AIY60640.1__F0_DSCav1 (opt6)
gggagaguccgcucagccagguugcagaagcggcuuagcguguguccuaaucuucucucugcguguagguaggccugugccgcaaacaagcuuaccauggaacucccaauccucaaaaccaaugccauaacaaccauacucgcugcaguaaccuuauguuucgcaaguagccaaaacauaaccgaagaauuuuaucaauccacaugcuccgcaguuucuaaaggauaucuaucagcauuaagaacuggaugguacacaucuguaauaacuauagaacuaagcaauauaaaagaaaacaaauguaacggaacugacgcuaaaguaaaacuuauaaaacaagaacuagauaaauacaaaaacgccguuaccgaacuacaacuauuaaugcaaucaacaccagccgcaaauaacagagcaagacgcgaauuaccaagauucaugaauuacacacuaaacaauacaaaaaauaacaauguaacacuaucaaaaaaaagaaaacgacgauucuuaggcuuccuacuaggagucggcucagcaauagcuuccggaauagccgucuguaaaguccuacaccuugaaggcgaaguaaacaaaaucaaaaacgcacuauuaucaacaaacaaagcagucguaucuuuauccaacggagucucaguccuaacauucaaaguacucgauuuaaaaaacuacaucgauaaacaacuccuucccauucuaaacaaacaauccugcucaauauccaacaucgaaacagucauagaauuucaacaaaaaaacaaccgccugcuagaaauaacaagagaauuuuccguaaaugccggcgucaccacaccaguaucaacauacaugcuaacaaacuccgaacuacucucccuaauaaacgauaugccaaucaccaacgaccaaaaaaaacuaaugucaaauaacguucaaauagucagacaacaaucauacagcauaaugugcauaauaaaagaagaagucuuagccuacguuguacaacucccauuauacggaguuaucgauacaccaugcuggaaauuacacacaucacccuuaugcaccacaaacacaaaagaaggauccaauauuugucuaacacgaacagacagaggaugguacugugauaacgcaggaucagugucauucuuuccacaagcagaaacauguaaaguucaaucuaacagaguauucugcgacaccaugaacucccuaaccuuacccucagaaguaaaucuaugcaacauagauaucuuuaacccaaaauacgacugcaaaaucaugacaucaaaaacugacguuucuucauccguuauaacuucccucggcgcuauaguguccugcuacggaaaaacuaaaugcacagcauccaacaaaaauagaggaauaauaaaaacauuuuccaacggcugcgacuauguuucaaacaaaggaguagauaccguaucagucggcaauacauuauauuauguuaacaaacaagaaggaaaaucccuauacguaaaaggagaaccuauaaucaacuucuacgacccacucguauuccccucagacgaauuugacgcaucuauaucucaaguaaaugaaaaaauaaaccaaucacucgcauuuauccgcaaaucugacgaauuacuccauaacgucaacgucggcaaaucaaccaccaacauaaugauaacaacaauuauaauaguaauaauugucauacuacuacuccuaauagcaguaggucuauuccuauacugcaaagcaagauccacccccguaacccuuuccaaagaucaacucucaggaauaaauaacauagccuuuucaaacuaaggacuaguggaagcauuuuccuggcugauuaaaagaaauuacucagcuauggucaucuguuccuguuagaaggcuaugcagcauauuauauacuaugcgcauguuaugaaaugcauaauaaaaaauuuuaaaaaaucuaaaagaucuaaaaaaaaaaaaaaaaaaaaaaaaaaaaaaaaaaaaaaaaaaaaaaaaaaaaaaaaaaaaaaaaugcaucccccccccccccccccccccccccccccccaaaggcucuuuucagagccaccagaauu

SEQ ID NO: 12584 - RNA, 2096 nt, Artificial Sequence
  mRNA product Design c-4 comprising derived and/or modified sequence from HRSV(Memphis-37)__AIY60640.1__F0_DSCav1 (opt11)
gggagaguccgcucagccagguugcagaagcggcuuagcguguguccuaaucuucucucugcguguagguaggccugugccgcaaacaagcuuaccauggaacuccccauacucaagacuaaugccaucaccaccauccucgccgccgugacccucugcuucgcaucgucccaaaacauaacagaagaguucuaccaaagcacaugcuccgcagucuccaaaggauaccucuccgcacuacguaccggcugguacaccagcgucaucaccaucgaacuuuccaacaucaaagagaacaaaugcaacggcaccgacgccaaaguaaaacucauaaaacaagagcuagacaaauacaaaaacgccgucacagaacuccaacuacugaugcaauccacaccggccgccaacaaccgcgcucgacgugaacucccacgcuucaugaacuacacucuuaacaacaccaaaaauaacaacgucacccuauccaaaaagcgaaagcgcagauuccucggcuuccuacuuggcgucggcucggcgauagccucuggaaucgccguuugcaagguccuccaccuagaaggcgaaguaaacaaaaucaaaaacgcacuccuaagcaccaacaaagccgucgucucacuuuccaacggcgucucaguccucacauucaaaguucucgaccuaaagaacuacaucgacaagcaacuacuacccauacucaauaaacaauccugcuccaucagcaacaucgagacagucaucgaauuucaacaaaagaacaaccgccuccucgaaauuacacgcgaguucucagucaacgccggagucaccaccccagucucaacauacaugcucaccaacagcgaacuccugucucuaaucaacgacaugcccaucacuaacgaccagaagaaacucauguccaacaacguccaaaucgugcgacaacaaucauacucuaucaugugcaucaucaaagaagaaguccucgcauacgucguccagcucccacucuacggcguaaucgacacacccugcuggaaacuccacacaucaccccuaugcaccaccaacacaaaagaaggcuccaacaucugccuaacccgaaccgacagagguugguauugcgacaacgccggcucagucucauucuucccacaagccgaaaccuguaaaguccaaucaaaccgcgucuucugcgauaccaugaacucucucacacuccccuccgaagucaaucucugcaacauagacaucuucaauccaaaguacgacugcaaaauaaugaccucgaaaaccgacguaagcuccagcgucaucaccuccuuaggcgcaaucguauccugcuacggcaaaaccaaaugcaccgccucaaacaaaaacagaggcaucaucaaaacguucucgaacggaugcgacuacguuuccaauaaaggcguagauaccgucuccgucggcaacacacucuauuacgucaacaaacaagaaggcaaaucccucuacgucaaaggugaaccuaucaucaacuucuacgacccccucgucuuccccagcgacgaguucgaugccucaaucagccaagucaacgagaaaaucaaccaaucacuggcuuucauacgcaaauccgacgaacuccuccacaacgugaacgucggcaaauccacaaccaacaucaugauaaccacaauaaucaucgucauaaucguaauccuacuccuccuuauugccguaggacuauuccuauacugcaaagcccgauccacccccgucacccucucaaaagaccaacucuccggcaucaacaauauagccuucucuaacuaaggacuaguggaagcauuuuccuggcugauuaaaagaaauuacucagcuauggucaucuguuccuguuagaaggcuaugcagcauauuauauacuaugcgcauguuaugaaaugcauaauaaaaaauuuuaaaaaaucuaaaagaucuaaaaaaaaaaaaaaaaaaaaaaaaaaaaaaaaaaaaaaaaaaaaaaaaaaaaaaaaaaaaaaaaugcaucccccccccccccccccccccccccccccccaaaggcucuuuucagagccaccagaauu

SEQ ID NO: 12585 - RNA, 2014 nt, Artificial Sequence
  mRNA product Design c-5 comprising derived and/or modified sequence from HRSV(Memphis-37)__AIY60640.1__F0_DSCav1 (opt1)
gggagagcggcucggccauuuugucccagucaguccggaggcugcggcugcagaaguaccgccugcggaguaacugcaaagaagcuuaccauggagcugcccauccucaagaccaacgccaucaccacgauccuggccgcggugacccugugcuucgccagcucccagaacaucaccgaggaguucuaccagagcacgugcuccgccgucagcaagggcuaccucuccgcccugcgcaccgggugguacaccagcgugaucaccaucgagcuguccaacaucaaggagaacaagugcaacggcaccgacgccaaggugaagcucaucaagcaggagcuggacaaguacaagaacgcggucacggagcugcagcuccugaugcagagcaccccggccgccaacaaccgggcccgccgggagcugccccgcuucaugaacuacacccucaacaacaccaagaacaacaacgugacgcuguccaagaagcggaagcgccgguuccugggguuccuccugggcguggggagcgcgaucgccuccggcaucgccgucugcaaggugcugcaccucgagggcgaggugaacaagaucaagaacgcccugcuguccaccaacaaggccgucgugagccucuccaacggggugagcguccugaccuucaaggugcuggaccucaagaacuacaucgacaagcagcugcugcccauccugaacaagcagagcugcuccaucagcaacaucgagaccgucaucgaguuccagcagaagaacaaccgccuccuggagaucacgcgggaguucagcgugaacgcgggcgugaccacccccgucuccaccuacaugcugacgaacagcgagcuccugucccugaucaacgacaugccgaucaccaacgaccagaagaagcucaugagcaacaacgugcagaucgugcgccagcaguccuacagcaucaugugcaucaucaaggaggagguccuggccuacguggugcagcugccccucuacggggucaucgacacccccugcuggaagcugcacaccagcccccugugcacgaccaacaccaaggagggcuccaacaucugccucacccggacggaccgcgggugguacugcgacaacgccggcagcguguccuucuucccgcaggccgagaccugcaagguccagagcaaccggguguucugcgacaccaugaacucccugacccugcccagcgaggugaaccucugcaacaucgacaucuucaaccccaaguacgacugcaagaucaugacguccaagaccgacgucagcuccagcgugaucaccucccugggcgccaucgugagcugcuacgggaagaccaagugcacggcgagcaacaagaaccgcggcaucaucaagaccuucuccaacgggugcgacuacgucagcaacaagggcguggacaccguguccgucggcaacacccuguacuacgugaacaagcaggagggcaagagccucuacgugaagggggagcccaucaucaacuucuacgacccgcuggucuuccccuccgacgaguucgacgccagcaucucccaggugaacgagaagaucaaccagagccuggccuucauccggaaguccgacgagcuccugcacaacgugaacgucggcaagagcaccacgaacaucaugaucaccaccaucaucaucgugaucaucgugauccugcugcuccugaucgccgucgggcuguuccucuacugcaaggcccgcuccacccccgugacgcugagcaaggaccagcuguccgggaucaacaacaucgcguucagcaacugaggacuagucccuguucccagagcccacuuuuuuuucuuuuuuugaaauaaaauagccugucuuucagaucuaaaaaaaaaaaaaaaaaaaaaaaaaaaaaaaaaaaaaaaaaaaaaaaaaaaaaaaaaaaaaaaaugcaucccccccccccccccccccccccccccccccaaaggcucuuuucagagccaccagaauu

SEQ ID NO: 12586 - RNA, 2014 nt, Artificial Sequence
  mRNA product Design c-5 comprising derived and/or modified sequence from HRSV(Memphis-37)__AIY60640.1__F0_DSCav1 (opt1)
gggagagcggcucggccauuuugucccagucaguccggaggcugcggcugcagaaguaccgccugcggaguaacugcaaagaagcuuaccauggagcugcccauccucaagaccaacgccaucaccacgauccuggccgcggugacccugugcuucgccagcucccagaacaucaccgaggaguucuaccagagcacgugcuccgccgucagcaagggcuaccucuccgcccugcgcaccgggugguacaccagcgugaucaccaucgagcuguccaacaucaaggagaacaagugcaacggcaccgacgccaaggugaagcucaucaagcaggagcuggacaaguacaagaacgcggucacggagcugcagcuccugaugcagagcaccccggccgccaacaaccgggcccgccgggagcugccccgcuucaugaacuacacccucaacaacaccaagaacaacaacgugacgcuguccaagaagcggaagcgccgguuccugggguuccuccugggcguggggagcgcgaucgccuccggcaucgccgucugcaaggugcugcaccucgagggcgaggugaacaagaucaagaacgcccugcugagcaccaacaaggccgucgugucccucagcaacgggguguccguccugaccuucaaggugcuggaccucaagaacuacaucgacaagcagcugcugcccauccucaacaagcagagcugcuccaucagcaacaucgagaccgugaucgaguuccagcagaagaacaaccgccugcuggagaucacgcgggaguucuccgucaacgcgggcgugaccacccccgugagcaccuacaugcucacgaacagcgagcugcugucccucaucaacgacaugccgaucaccaacgaccagaagaagcugaugagcaacaacguccagaucgugcgccagcaguccuacagcaucaugugcaucaucaaggaggaggugcuggccuacgucgugcagcucccccuguacggggugaucgacacccccugcuggaagcugcacaccagcccccucugcacgaccaacaccaaggagggcagcaacaucugccugacccggacggaccgcgggugguacugcgacaacgccggcuccgucagcuucuucccgcaggccgagaccugcaaggugcaguccaaccgggucuucugcgacaccaugaacagccugacccuccccuccgaggugaaccugugcaacaucgacaucuucaaccccaaguacgacugcaagaucaugacgagcaagaccgacguguccagcuccgucaucaccagccugggcgccaucguguccugcuacgggaagaccaagugcacggcgagcaacaagaaccgcggcaucaucaagaccuucuccaacgggugcgacuacgugagcaacaagggcgucgacaccgugagcgugggcaacacccucuacuacgucaacaagcaggaggggaagucccuguacgugaagggcgagcccaucaucaacuucuacgacccgcugguguuccccagcgacgaguucgacgccuccaucagccaggucaacgagaagaucaaccagucccucgccuucauccggaaguccgacgagcugcugcacaacgugaacguggggaaguccaccacgaacaucaugaucaccaccaucaucaucgucaucaucgugauccugcuccugcugaucgccgugggccucuuccuguacugcaaggcccgcagcacccccgucacgcuguccaaggaccagcucagcgggaucaacaacaucgcguucuccaacugaggacuagucccuguucccagagcccacuuuuuuuucuuuuuuugaaauaaaauagccugucuuucagaucuaaaaaaaaaaaaaaaaaaaaaaaaaaaaaaaaaaaaaaaaaaaaaaaaaaaaaaaaaaaaaaaaugcaucccccccccccccccccccccccccccccccaaaggcucuuuucagagccaccagaauu

SEQ ID NO: 12587 - RNA, 2014 nt, Artificial Sequence
  mRNA product Design c-5 comprising derived and/or modified sequence from HRSV(Memphis-37)__AIY60640.1__F0_DSCav1 (opt2)
gggagagcggcucggccauuuugucccagucaguccggaggcugcggcugcagaaguaccgccugcggaguaacugcaaagaagcuuaccauggagcuccccauccucaagaccaacgccaucaccaccauccucgccgccgucacccucugcuucgccuccucccagaacaucaccgaggaguucuaccaguccaccugcuccgccgucuccaagggcuaccucuccgcccuccgcaccggcugguacaccuccgucaucaccaucgagcucuccaacaucaaggagaacaagugcaacggcaccgacgccaaggucaagcucaucaagcaggagcucgacaaguacaagaacgccgucaccgagcuccagcuccucaugcaguccacccccgccgccaacaaccgcgcccgccgcgagcucccccgcuucaugaacuacacccucaacaacaccaagaacaacaacgucacccucuccaagaagcgcaagcgccgcuuccucggcuuccuccucggcgucggcuccgccaucgccuccggcaucgccgucugcaagguccuccaccucgagggcgaggucaacaagaucaagaacgcccuccucuccaccaacaaggccgucgucucccucuccaacggcgucuccguccucaccuucaagguccucgaccucaagaacuacaucgacaagcagcuccuccccauccucaacaagcaguccugcuccaucuccaacaucgagaccgucaucgaguuccagcagaagaacaaccgccuccucgagaucacccgcgaguucuccgucaacgccggcgucaccacccccgucuccaccuacaugcucaccaacuccgagcuccucucccucaucaacgacaugcccaucaccaacgaccagaagaagcucauguccaacaacguccagaucguccgccagcaguccuacuccaucaugugcaucaucaaggaggagguccucgccuacgucguccagcucccccucuacggcgucaucgacacccccugcuggaagcuccacaccuccccccucugcaccaccaacaccaaggagggcuccaacaucugccucacccgcaccgaccgcggcugguacugcgacaacgccggcuccgucuccuucuucccccaggccgagaccugcaagguccaguccaaccgcgucuucugcgacaccaugaacucccucacccuccccuccgaggucaaccucugcaacaucgacaucuucaaccccaaguacgacugcaagaucaugaccuccaagaccgacgucuccuccuccgucaucaccucccucggcgccaucgucuccugcuacggcaagaccaagugcaccgccuccaacaagaaccgcggcaucaucaagaccuucuccaacggcugcgacuacgucuccaacaagggcgucgacaccgucuccgucggcaacacccucuacuacgucaacaagcaggagggcaagucccucuacgucaagggcgagcccaucaucaacuucuacgacccccucgucuuccccuccgacgaguucgacgccuccaucucccaggucaacgagaagaucaaccagucccucgccuucauccgcaaguccgacgagcuccuccacaacgucaacgucggcaaguccaccaccaacaucaugaucaccaccaucaucaucgucaucaucgucauccuccuccuccucaucgccgucggccucuuccucuacugcaaggcccgcuccacccccgucacccucuccaaggaccagcucuccggcaucaacaacaucgccuucuccaacugaggacuagucccuguucccagagcccacuuuuuuuucuuuuuuugaaauaaaauagccugucuuucagaucuaaaaaaaaaaaaaaaaaaaaaaaaaaaaaaaaaaaaaaaaaaaaaaaaaaaaaaaaaaaaaaaaugcaucccccccccccccccccccccccccccccccaaaggcucuuuucagagccaccagaauu

SEQ ID NO: 12588 - RNA, 2014 nt, Artificial Sequence
  mRNA product Design c-5 comprising derived and/or modified sequence from HRSV(Memphis-37)__AIY60640.1__F0_DSCav1 (opt3)
gggagagcggcucggccauuuugucccagucaguccggaggcugcggcugcagaaguaccgccugcggaguaacugcaaagaagcuuaccauggagcugcccauccucaagaccaacgccauuacaacuauacuugcugcagugacgcugugcuucgccagcucccagaauaucaccgaagaguuuuaccaaucuacauguucagcggucaguaaaggcuauuugagcgcuuuaagaacugggugguacaccuccguuauuacaaucgaacugucuaacauuaaggagaauaaaugcaacggaaccgacgccaaggugaaacuaaucaagcaggaacucgauaaguauaaaaaugcaguaacugagcugcagcuucugaugcagucgaccccugccgcuaacaauagggcacggcgcgaguugccacgauucaugaacuacacacucaauaacacgaagaauaacaaugugacucugagcaaaaagcguaaaagaagguuucuggguuuccucuuaggcgucgggucagccauagcuaguggaaucgccguguguaagguucugcaccuugaaggcgaggugaacaagauuaaaaaugcguugcuguccaccaacaaggcagucgugucucuaagcaacgguguauccguucucacauuuaaagugcuggaccuuaagaauuauaucgauaaacaacuguugccgauucucaacaagcagucaugcaguaucagcaauauagaaacugucauugaguuccagcagaaaaacaaucggcuguuagagaucacccgcgaauuuucugugaacgccggggugacaacccccgucuccacguacaugcugacuaauucagagcuccuuagccugauuaacgacaugccuaucacaaaugaucaaaagaaguugaugaguaacaauguucagaucgugagacagcagucuuauuccauuauguguauaaucaaagaagagguacuagcuuacgugguccaacugccacucuacggagugauugacacccccugcuggaagcugcauacuagcccucuuuguacaaccaacacgaaagaaggcucgaauaucugccugaccaggacagaucggggcugguauugugacaacgccgggucuguuuccuucuuuccacaggcagagacuugcaaggugcagucaaaucgcgucuucugugauaccaugaacaguuugacacuccccagcgaggugaaccugugcaauauagacauuuuuaacccuaaauacgauugcaagaucaugacuuccaagaccgacguaucuagcucaguuaucacaaguuuaggagcuauuguguccuguuaugguaaaaccaagugcacugccagcaauaaaaaccgaggcaucauuaagacguucucuaaugggugugauuacgucucaaacaaaggaguggacacagucagugugggcaauacccuguauuacguuaacaagcaagaagguaagagccuauaugugaaaggggagccaauaaucaauuuuuacgacccgcucguauuccccuccgaugaguucgacgcgucuauuucgcaggucaacgaaaagaucaaucagagccuggccuuuaucagaaaauccgaugaacuuuugcacaacgugaauguuggaaagucaacuaccaacauuaugauaacaaccaucauuaucgugauuaucgucauacugcuccugcuuaucgcagugggccuguucuuguacugcaaagcuaggaguacuccuguaacacucucuaaggaccagcugagcggcauuaauaacaucgccuuuuccaacugaggacuagucccuguucccagagcccacuuuuuuuucuuuuuuugaaauaaaauagccugucuuucagaucuaaaaaaaaaaaaaaaaaaaaaaaaaaaaaaaaaaaaaaaaaaaaaaaaaaaaaaaaaaaaaaaaugcaucccccccccccccccccccccccccccccccaaaggcucuuuucagagccaccagaauu

SEQ ID NO: 12589 - RNA, 2014 nt, Artificial Sequence
  mRNA product Design c-5 comprising derived and/or modified sequence from HRSV(Memphis-37)__AIY60640.1__F0_DSCav1 (opt4)
gggagagcggcucggccauuuugucccagucaguccggaggcugcggcugcagaaguaccgccugcggaguaacugcaaagaagcuuaccauggagcugcccauccugaagaccaacgccaucaccaccauccuggccgccgugacccugugcuucgccagcagccagaacaucaccgaggaguucuaccagagcaccugcagcgccgugagcaagggcuaccugagcgcccugagaaccggcugguacaccagcgugaucaccaucgagcugagcaacaucaaggagaacaagugcaacggcaccgacgccaaggugaagcugaucaagcaggagcuggacaaguacaagaacgccgugaccgagcugcagcugcugaugcagagcacccccgccgccaacaacagagccagaagagagcugcccagauucaugaacuacacccugaacaacaccaagaacaacaacgugacccugagcaagaagagaaagagaagauuccugggcuuccugcugggcgugggcagcgccaucgccagcggcaucgccgugugcaaggugcugcaccuggagggcgaggugaacaagaucaagaacgcccugcugagcaccaacaaggccguggugagccugagcaacggcgugagcgugcugaccuucaaggugcuggaccugaagaacuacaucgacaagcagcugcugcccauccugaacaagcagagcugcagcaucagcaacaucgagaccgugaucgaguuccagcagaagaacaacagacugcuggagaucaccagagaguucagcgugaacgccggcgugaccacccccgugagcaccuacaugcugaccaacagcgagcugcugagccugaucaacgacaugcccaucaccaacgaccagaagaagcugaugagcaacaacgugcagaucgugagacagcagagcuacagcaucaugugcaucaucaaggaggaggugcuggccuacguggugcagcugccccuguacggcgugaucgacacccccugcuggaagcugcacaccagcccccugugcaccaccaacaccaaggagggcagcaacaucugccugaccagaaccgacagaggcugguacugcgacaacgccggcagcgugagcuucuucccccaggccgagaccugcaaggugcagagcaacagaguguucugcgacaccaugaacagccugacccugcccagcgaggugaaccugugcaacaucgacaucuucaaccccaaguacgacugcaagaucaugaccagcaagaccgacgugagcagcagcgugaucaccagccugggcgccaucgugagcugcuacggcaagaccaagugcaccgccagcaacaagaacagaggcaucaucaagaccuucagcaacggcugcgacuacgugagcaacaagggcguggacaccgugagcgugggcaacacccuguacuacgugaacaagcaggagggcaagagccuguacgugaagggcgagcccaucaucaacuucuacgacccccugguguuccccagcgacgaguucgacgccagcaucagccaggugaacgagaagaucaaccagagccuggccuucaucagaaagagcgacgagcugcugcacaacgugaacgugggcaagagcaccaccaacaucaugaucaccaccaucaucaucgugaucaucgugauccugcugcugcugaucgccgugggccuguuccuguacugcaaggccagaagcacccccgugacccugagcaaggaccagcugagcggcaucaacaacaucgccuucagcaacugaggacuagucccuguucccagagcccacuuuuuuuucuuuuuuugaaauaaaauagccugucuuucagaucuaaaaaaaaaaaaaaaaaaaaaaaaaaaaaaaaaaaaaaaaaaaaaaaaaaaaaaaaaaaaaaaaugcaucccccccccccccccccccccccccccccccaaaggcucuuuucagagccaccagaauu

SEQ ID NO: 12590 - RNA, 2014 nt, Artificial Sequence
  mRNA product Design c-5 comprising derived and/or modified sequence from HRSV(Memphis-37)__AIY60640.1__F0_DSCav1 (opt5)
gggagagcggcucggccauuuugucccagucaguccggaggcugcggcugcagaaguaccgccugcggaguaacugcaaagaagcuuaccauggagcugcccauccucaagaccaacgccauuacaacgauccuggcugccgugacccuuugcuucgcgagcucccagaauauuacagaagaguuuuaccaaucuaccuguagcgcugucuccaaaggcuaucugucugcccucagaacagggugguacaccagcguuaucacaauugaacuguccaacaucaaggagaauaaaugcaacggaaccgacgccaaggugaaacuuaucaagcaggaacuggauaaguauaaaaaugcugugacggagcuccagcugcugaugcagucuaccccugccgcuaacaaucgggcccgcagagagcucccgcgguucaugaacuacacacugaauaacaccaagaauaacaaugucacacuuagcaaaaagcgcaaaagacgguuucugggcuuccuccugggggugggauccgcgauugccagcggcaucgcuguuuguaaggugcuucaccuggaaggggaggucaacaagauuaaaaaugcccuccugucuaccaacaaggcugugguuucccugagcaacggagugucuguccucacguuuaaagugcuggaccuuaagaauuauaucgauaaacaacugcuccccauucugaacaagcaguccugcagcaucucuaauauugaaacagugaucgaguuccagcagaaaaacaaucgccuucuggagaucaccagagaauuuuccgucaacgccggcguuacaaccccugugagcaccuacaugcucacaaauuccgagcugcugucucucauuaacgacaugcccaucacgaaugaucaaaagaagcugaugagcaacaaugugcagauuguccggcagcaguccuauagcaucauguguauuaucaaagaagaggugcuugcguacguugugcaacugccucucuacggcgucaucgacacccccugcuggaagcugcauacaucuccucuuuguaccacaaacaccaaagaaggguccaauauuugccugacgcgcacagauagaggaugguauugugacaacgccggcagcgugucuuucuuuccgcaggcugagaccugcaagguucagagcaaucggguguucugugauaccaugaacucccucacacugcccucugaggucaaccugugcaauaucgacauuuuuaacccuaaauacgauugcaagaucaugaccagcaagacagacguguccagcucugucauuacgucccucggggccaucgugagcuguuauggaaaaaccaagugcacagcuucuaauaaaaaccgcggcaucauuaagaccuucuccaaugggugugauuacguuagcaacaaaggaguggacacagucuccgugggcaauacccuguauuacguuaacaagcaagaaggcaagucucuuuaugugaaaggggagcccaucauuaauuuuuacgacccucuggucuuccccagcgaugaguucgacgccuccaucucucaggugaacgaaaagauuaaucagagccucgccuuuaucagaaaauccgaugaacugcugcacaacgugaauguuggaaagagcacgaccaacauuaugaucacaaccaucauuaucgucauuaucgugauucuucuccugcugaucgcugugggccucuuccuguacugcaaagcgcggucuacaccggucacccuuuccaaggaccagcugagcgggaucaauaacauugccuuuucuaacugaggacuagucccuguucccagagcccacuuuuuuuucuuuuuuugaaauaaaauagccugucuuucagaucuaaaaaaaaaaaaaaaaaaaaaaaaaaaaaaaaaaaaaaaaaaaaaaaaaaaaaaaaaaaaaaaaugcaucccccccccccccccccccccccccccccccaaaggcucuuuucagagccaccagaauu

SEQ ID NO: 12591 - RNA, 2014 nt, Artificial Sequence
  mRNA product Design c-5 comprising derived and/or modified sequence from HRSV(Memphis-37)__AIY60640.1__F0_DSCav1 (opt6)
gggagagcggcucggccauuuugucccagucaguccggaggcugcggcugcagaaguaccgccugcggaguaacugcaaagaagcuuaccauggaacucccaauccucaaaaccaaugccauaacaaccauacucgcugcaguaaccuuauguuucgcaaguagccaaaacauaaccgaagaauuuuaucaauccacaugcuccgcaguuucuaaaggauaucuaucagcauuaagaacuggaugguacacaucuguaauaacuauagaacuaagcaauauaaaagaaaacaaauguaacggaacugacgcuaaaguaaaacuuauaaaacaagaacuagauaaauacaaaaacgccguuaccgaacuacaacuauuaaugcaaucaacaccagccgcaaauaacagagcaagacgcgaauuaccaagauucaugaauuacacacuaaacaauacaaaaaauaacaauguaacacuaucaaaaaaaagaaaacgacgauucuuaggcuuccuacuaggagucggcucagcaauagcuuccggaauagccgucuguaaaguccuacaccuugaaggcgaaguaaacaaaaucaaaaacgcacuauuaucaacaaacaaagcagucguaucuuuauccaacggagucucaguccuaacauucaaaguacucgauuuaaaaaacuacaucgauaaacaacuccuucccauucuaaacaaacaauccugcucaauauccaacaucgaaacagucauagaauuucaacaaaaaaacaaccgccugcuagaaauaacaagagaauuuuccguaaaugccggcgucaccacaccaguaucaacauacaugcuaacaaacuccgaacuacucucccuaauaaacgauaugccaaucaccaacgaccaaaaaaaacuaaugucaaauaacguucaaauagucagacaacaaucauacagcauaaugugcauaauaaaagaagaagucuuagccuacguuguacaacucccauuauacggaguuaucgauacaccaugcuggaaauuacacacaucacccuuaugcaccacaaacacaaaagaaggauccaauauuugucuaacacgaacagacagaggaugguacugugauaacgcaggaucagugucauucuuuccacaagcagaaacauguaaaguucaaucuaacagaguauucugcgacaccaugaacucccuaaccuuacccucagaaguaaaucuaugcaacauagauaucuuuaacccaaaauacgacugcaaaaucaugacaucaaaaacugacguuucuucauccguuauaacuucccucggcgcuauaguguccugcuacggaaaaacuaaaugcacagcauccaacaaaaauagaggaauaauaaaaacauuuuccaacggcugcgacuauguuucaaacaaaggaguagauaccguaucagucggcaauacauuauauuauguuaacaaacaagaaggaaaaucccuauacguaaaaggagaaccuauaaucaacuucuacgacccacucguauuccccucagacgaauuugacgcaucuauaucucaaguaaaugaaaaaauaaaccaaucacucgcauuuauccgcaaaucugacgaauuacuccauaacgucaacgucggcaaaucaaccaccaacauaaugauaacaacaauuauaauaguaauaauugucauacuacuacuccuaauagcaguaggucuauuccuauacugcaaagcaagauccacccccguaacccuuuccaaagaucaacucucaggaauaaauaacauagccuuuucaaacuaaggacuagucccuguucccagagcccacuuuuuuuucuuuuuuugaaauaaaauagccugucuuucagaucuaaaaaaaaaaaaaaaaaaaaaaaaaaaaaaaaaaaaaaaaaaaaaaaaaaaaaaaaaaaaaaaaugcaucccccccccccccccccccccccccccccccaaaggcucuuuucagagccaccagaauu

SEQ ID NO: 12592 - RNA, 2014 nt, Artificial Sequence
  mRNA product Design c-5 comprising derived and/or modified sequence from HRSV(Memphis-37)__AIY60640.1__F0_DSCav1 (opt11)
gggagagcggcucggccauuuugucccagucaguccggaggcugcggcugcagaaguaccgccugcggaguaacugcaaagaagcuuaccauggaacuccccauacucaagacuaaugccaucaccaccauccucgccgccgugacccucugcuucgcaucgucccaaaacauaacagaagaguucuaccaaagcacaugcuccgcagucuccaaaggauaccucuccgcacuacguaccggcugguacaccagcgucaucaccaucgaacuuuccaacaucaaagagaacaaaugcaacggcaccgacgccaaaguaaaacucauaaaacaagagcuagacaaauacaaaaacgccgucacagaacuccaacuacugaugcaauccacaccggccgccaacaaccgcgcucgacgugaacucccacgcuucaugaacuacacucuuaacaacaccaaaaauaacaacgucacccuauccaaaaagcgaaagcgcagauuccucggcuuccuacuuggcgucggcucggcgauagccucuggaaucgccguuugcaagguccuccaccuagaaggcgaaguaaacaaaaucaaaaacgcacuccuaagcaccaacaaagccgucgucucacuuuccaacggcgucucaguccucacauucaaaguucucgaccuaaagaacuacaucgacaagcaacuacuacccauacucaauaaacaauccugcuccaucagcaacaucgagacagucaucgaauuucaacaaaagaacaaccgccuccucgaaauuacacgcgaguucucagucaacgccggagucaccaccccagucucaacauacaugcucaccaacagcgaacuccugucucuaaucaacgacaugcccaucacuaacgaccagaagaaacucauguccaacaacguccaaaucgugcgacaacaaucauacucuaucaugugcaucaucaaagaagaaguccucgcauacgucguccagcucccacucuacggcguaaucgacacacccugcuggaaacuccacacaucaccccuaugcaccaccaacacaaaagaaggcuccaacaucugccuaacccgaaccgacagagguugguauugcgacaacgccggcucagucucauucuucccacaagccgaaaccuguaaaguccaaucaaaccgcgucuucugcgauaccaugaacucucucacacuccccuccgaagucaaucucugcaacauagacaucuucaauccaaaguacgacugcaaaauaaugaccucgaaaaccgacguaagcuccagcgucaucaccuccuuaggcgcaaucguauccugcuacggcaaaaccaaaugcaccgccucaaacaaaaacagaggcaucaucaaaacguucucgaacggaugcgacuacguuuccaauaaaggcguagauaccgucuccgucggcaacacacucuauuacgucaacaaacaagaaggcaaaucccucuacgucaaaggugaaccuaucaucaacuucuacgacccccucgucuuccccagcgacgaguucgaugccucaaucagccaagucaacgagaaaaucaaccaaucacuggcuuucauacgcaaauccgacgaacuccuccacaacgugaacgucggcaaauccacaaccaacaucaugauaaccacaauaaucaucgucauaaucguaauccuacuccuccuuauugccguaggacuauuccuauacugcaaagcccgauccacccccgucacccucucaaaagaccaacucuccggcaucaacaauauagccuucucuaacuaaggacuagucccuguucccagagcccacuuuuuuuucuuuuuuugaaauaaaauagccugucuuucagaucuaaaaaaaaaaaaaaaaaaaaaaaaaaaaaaaaaaaaaaaaaaaaaaaaaaaaaaaaaaaaaaaaugcaucccccccccccccccccccccccccccccccaaaggcucuuuucagagccaccagaauu

SEQ ID NO: 12593 - RNA, 2023 nt, Artificial Sequence
  mRNA product Design d-1 comprising derived and/or modified sequence from HRSV(Memphis-37)__AIY60640.1__F0_DSCav1 (opt1)
gggagacccgugacccggaaguuguacggcuacgcgacuuucccucccacaaacccucgcgcccuuccuuuccuacuugggcccggcagaaagcuuaccauggagcugcccauccucaagaccaacgccaucaccacgauccuggccgcggugacccugugcuucgccagcucccagaacaucaccgaggaguucuaccagagcacgugcuccgccgucagcaagggcuaccucuccgcccugcgcaccgggugguacaccagcgugaucaccaucgagcuguccaacaucaaggagaacaagugcaacggcaccgacgccaaggugaagcucaucaagcaggagcuggacaaguacaagaacgcggucacggagcugcagcuccugaugcagagcaccccggccgccaacaaccgggcccgccgggagcugccccgcuucaugaacuacacccucaacaacaccaagaacaacaacgugacgcuguccaagaagcggaagcgccgguuccugggguuccuccugggcguggggagcgcgaucgccuccggcaucgccgucugcaaggugcugcaccucgagggcgaggugaacaagaucaagaacgcccugcuguccaccaacaaggccgucgugagccucuccaacggggugagcguccugaccuucaaggugcuggaccucaagaacuacaucgacaagcagcugcugcccauccugaacaagcagagcugcuccaucagcaacaucgagaccgucaucgaguuccagcagaagaacaaccgccuccuggagaucacgcgggaguucagcgugaacgcgggcgugaccacccccgucuccaccuacaugcugacgaacagcgagcuccugucccugaucaacgacaugccgaucaccaacgaccagaagaagcucaugagcaacaacgugcagaucgugcgccagcaguccuacagcaucaugugcaucaucaaggaggagguccuggccuacguggugcagcugccccucuacggggucaucgacacccccugcuggaagcugcacaccagcccccugugcacgaccaacaccaaggagggcuccaacaucugccucacccggacggaccgcgggugguacugcgacaacgccggcagcguguccuucuucccgcaggccgagaccugcaagguccagagcaaccggguguucugcgacaccaugaacucccugacccugcccagcgaggugaaccucugcaacaucgacaucuucaaccccaaguacgacugcaagaucaugacguccaagaccgacgucagcuccagcgugaucaccucccugggcgccaucgugagcugcuacgggaagaccaagugcacggcgagcaacaagaaccgcggcaucaucaagaccuucuccaacgggugcgacuacgucagcaacaagggcguggacaccguguccgucggcaacacccuguacuacgugaacaagcaggagggcaagagccucuacgugaagggggagcccaucaucaacuucuacgacccgcuggucuuccccuccgacgaguucgacgccagcaucucccaggugaacgagaagaucaaccagagccuggccuucauccggaaguccgacgagcuccugcacaacgugaacgucggcaagagcaccacgaacaucaugaucaccaccaucaucaucgugaucaucgugauccugcugcuccugaucgccgucgggcuguuccucuacugcaaggcccgcuccacccccgugacgcugagcaaggaccagcuguccgggaucaacaacaucgcguucagcaacugaggacuagucccuguucccagagcccacuuuuuuuucuuuuuuugaaauaaaauagccugucuuucagaucuaaaaaaaaaaaaaaaaaaaaaaaaaaaaaaaaaaaaaaaaaaaaaaaaaaaaaaaaaaaaaaaaugcaucccccccccccccccccccccccccccccccaaaggcucuuuucagagccaccagaauu

SEQ ID NO: 12594 - RNA, 2023 nt, Artificial Sequence
  mRNA product Design d-1 comprising derived and/or modified sequence from HRSV(Memphis-37)__AIY60640.1__F0_DSCav1 (opt1)
gggagacccgugacccggaaguuguacggcuacgcgacuuucccucccacaaacccucgcgcccuuccuuuccuacuugggcccggcagaaagcuuaccauggagcugcccauccucaagaccaacgccaucaccacgauccuggccgcggugacccugugcuucgccagcucccagaacaucaccgaggaguucuaccagagcacgugcuccgccgucagcaagggcuaccucuccgcccugcgcaccgggugguacaccagcgugaucaccaucgagcuguccaacaucaaggagaacaagugcaacggcaccgacgccaaggugaagcucaucaagcaggagcuggacaaguacaagaacgcggucacggagcugcagcuccugaugcagagcaccccggccgccaacaaccgggcccgccgggagcugccccgcuucaugaacuacacccucaacaacaccaagaacaacaacgugacgcuguccaagaagcggaagcgccgguuccugggguuccuccugggcguggggagcgcgaucgccuccggcaucgccgucugcaaggugcugcaccucgagggcgaggugaacaagaucaagaacgcccugcugagcaccaacaaggccgucgugucccucagcaacgggguguccguccugaccuucaaggugcuggaccucaagaacuacaucgacaagcagcugcugcccauccucaacaagcagagcugcuccaucagcaacaucgagaccgugaucgaguuccagcagaagaacaaccgccugcuggagaucacgcgggaguucuccgucaacgcgggcgugaccacccccgugagcaccuacaugcucacgaacagcgagcugcugucccucaucaacgacaugccgaucaccaacgaccagaagaagcugaugagcaacaacguccagaucgugcgccagcaguccuacagcaucaugugcaucaucaaggaggaggugcuggccuacgucgugcagcucccccuguacggggugaucgacacccccugcuggaagcugcacaccagcccccucugcacgaccaacaccaaggagggcagcaacaucugccugacccggacggaccgcgggugguacugcgacaacgccggcuccgucagcuucuucccgcaggccgagaccugcaaggugcaguccaaccgggucuucugcgacaccaugaacagccugacccuccccuccgaggugaaccugugcaacaucgacaucuucaaccccaaguacgacugcaagaucaugacgagcaagaccgacguguccagcuccgucaucaccagccugggcgccaucguguccugcuacgggaagaccaagugcacggcgagcaacaagaaccgcggcaucaucaagaccuucuccaacgggugcgacuacgugagcaacaagggcgucgacaccgugagcgugggcaacacccucuacuacgucaacaagcaggaggggaagucccuguacgugaagggcgagcccaucaucaacuucuacgacccgcugguguuccccagcgacgaguucgacgccuccaucagccaggucaacgagaagaucaaccagucccucgccuucauccggaaguccgacgagcugcugcacaacgugaacguggggaaguccaccacgaacaucaugaucaccaccaucaucaucgucaucaucgugauccugcuccugcugaucgccgugggccucuuccuguacugcaaggcccgcagcacccccgucacgcuguccaaggaccagcucagcgggaucaacaacaucgcguucuccaacugaggacuagucccuguucccagagcccacuuuuuuuucuuuuuuugaaauaaaauagccugucuuucagaucuaaaaaaaaaaaaaaaaaaaaaaaaaaaaaaaaaaaaaaaaaaaaaaaaaaaaaaaaaaaaaaaaugcaucccccccccccccccccccccccccccccccaaaggcucuuuucagagccaccagaauu

SEQ ID NO: 12595 - RNA, 2023 nt, Artificial Sequence
  mRNA product Design d-1 comprising derived and/or modified sequence from HRSV(Memphis-37)__AIY60640.1__F0_DSCav1 (opt2)
gggagacccgugacccggaaguuguacggcuacgcgacuuucccucccacaaacccucgcgcccuuccuuuccuacuugggcccggcagaaagcuuaccauggagcuccccauccucaagaccaacgccaucaccaccauccucgccgccgucacccucugcuucgccuccucccagaacaucaccgaggaguucuaccaguccaccugcuccgccgucuccaagggcuaccucuccgcccuccgcaccggcugguacaccuccgucaucaccaucgagcucuccaacaucaaggagaacaagugcaacggcaccgacgccaaggucaagcucaucaagcaggagcucgacaaguacaagaacgccgucaccgagcuccagcuccucaugcaguccacccccgccgccaacaaccgcgcccgccgcgagcucccccgcuucaugaacuacacccucaacaacaccaagaacaacaacgucacccucuccaagaagcgcaagcgccgcuuccucggcuuccuccucggcgucggcuccgccaucgccuccggcaucgccgucugcaagguccuccaccucgagggcgaggucaacaagaucaagaacgcccuccucuccaccaacaaggccgucgucucccucuccaacggcgucuccguccucaccuucaagguccucgaccucaagaacuacaucgacaagcagcuccuccccauccucaacaagcaguccugcuccaucuccaacaucgagaccgucaucgaguuccagcagaagaacaaccgccuccucgagaucacccgcgaguucuccgucaacgccggcgucaccacccccgucuccaccuacaugcucaccaacuccgagcuccucucccucaucaacgacaugcccaucaccaacgaccagaagaagcucauguccaacaacguccagaucguccgccagcaguccuacuccaucaugugcaucaucaaggaggagguccucgccuacgucguccagcucccccucuacggcgucaucgacacccccugcuggaagcuccacaccuccccccucugcaccaccaacaccaaggagggcuccaacaucugccucacccgcaccgaccgcggcugguacugcgacaacgccggcuccgucuccuucuucccccaggccgagaccugcaagguccaguccaaccgcgucuucugcgacaccaugaacucccucacccuccccuccgaggucaaccucugcaacaucgacaucuucaaccccaaguacgacugcaagaucaugaccuccaagaccgacgucuccuccuccgucaucaccucccucggcgccaucgucuccugcuacggcaagaccaagugcaccgccuccaacaagaaccgcggcaucaucaagaccuucuccaacggcugcgacuacgucuccaacaagggcgucgacaccgucuccgucggcaacacccucuacuacgucaacaagcaggagggcaagucccucuacgucaagggcgagcccaucaucaacuucuacgacccccucgucuuccccuccgacgaguucgacgccuccaucucccaggucaacgagaagaucaaccagucccucgccuucauccgcaaguccgacgagcuccuccacaacgucaacgucggcaaguccaccaccaacaucaugaucaccaccaucaucaucgucaucaucgucauccuccuccuccucaucgccgucggccucuuccucuacugcaaggcccgcuccacccccgucacccucuccaaggaccagcucuccggcaucaacaacaucgccuucuccaacugaggacuagucccuguucccagagcccacuuuuuuuucuuuuuuugaaauaaaauagccugucuuucagaucuaaaaaaaaaaaaaaaaaaaaaaaaaaaaaaaaaaaaaaaaaaaaaaaaaaaaaaaaaaaaaaaaugcaucccccccccccccccccccccccccccccccaaaggcucuuuucagagccaccagaauu

SEQ ID NO: 12596 - RNA, 2023 nt, Artificial Sequence
  mRNA product Design d-1 comprising derived and/or modified sequence from HRSV(Memphis-37)__AIY60640.1__F0_DSCav1 (opt3)
gggagacccgugacccggaaguuguacggcuacgcgacuuucccucccacaaacccucgcgcccuuccuuuccuacuugggcccggcagaaagcuuaccauggagcugcccauccucaagaccaacgccauuacaacuauacuugcugcagugacgcugugcuucgccagcucccagaauaucaccgaagaguuuuaccaaucuacauguucagcggucaguaaaggcuauuugagcgcuuuaagaacugggugguacaccuccguuauuacaaucgaacugucuaacauuaaggagaauaaaugcaacggaaccgacgccaaggugaaacuaaucaagcaggaacucgauaaguauaaaaaugcaguaacugagcugcagcuucugaugcagucgaccccugccgcuaacaauagggcacggcgcgaguugccacgauucaugaacuacacacucaauaacacgaagaauaacaaugugacucugagcaaaaagcguaaaagaagguuucuggguuuccucuuaggcgucgggucagccauagcuaguggaaucgccguguguaagguucugcaccuugaaggcgaggugaacaagauuaaaaaugcguugcuguccaccaacaaggcagucgugucucuaagcaacgguguauccguucucacauuuaaagugcuggaccuuaagaauuauaucgauaaacaacuguugccgauucucaacaagcagucaugcaguaucagcaauauagaaacugucauugaguuccagcagaaaaacaaucggcuguuagagaucacccgcgaauuuucugugaacgccggggugacaacccccgucuccacguacaugcugacuaauucagagcuccuuagccugauuaacgacaugccuaucacaaaugaucaaaagaaguugaugaguaacaauguucagaucgugagacagcagucuuauuccauuauguguauaaucaaagaagagguacuagcuuacgugguccaacugccacucuacggagugauugacacccccugcuggaagcugcauacuagcccucuuuguacaaccaacacgaaagaaggcucgaauaucugccugaccaggacagaucggggcugguauugugacaacgccgggucuguuuccuucuuuccacaggcagagacuugcaaggugcagucaaaucgcgucuucugugauaccaugaacaguuugacacuccccagcgaggugaaccugugcaauauagacauuuuuaacccuaaauacgauugcaagaucaugacuuccaagaccgacguaucuagcucaguuaucacaaguuuaggagcuauuguguccuguuaugguaaaaccaagugcacugccagcaauaaaaaccgaggcaucauuaagacguucucuaaugggugugauuacgucucaaacaaaggaguggacacagucagugugggcaauacccuguauuacguuaacaagcaagaagguaagagccuauaugugaaaggggagccaauaaucaauuuuuacgacccgcucguauuccccuccgaugaguucgacgcgucuauuucgcaggucaacgaaaagaucaaucagagccuggccuuuaucagaaaauccgaugaacuuuugcacaacgugaauguuggaaagucaacuaccaacauuaugauaacaaccaucauuaucgugauuaucgucauacugcuccugcuuaucgcagugggccuguucuuguacugcaaagcuaggaguacuccuguaacacucucuaaggaccagcugagcggcauuaauaacaucgccuuuuccaacugaggacuagucccuguucccagagcccacuuuuuuuucuuuuuuugaaauaaaauagccugucuuucagaucuaaaaaaaaaaaaaaaaaaaaaaaaaaaaaaaaaaaaaaaaaaaaaaaaaaaaaaaaaaaaaaaaugcaucccccccccccccccccccccccccccccccaaaggcucuuuucagagccaccagaauu

SEQ ID NO: 12597 - RNA, 2023 nt, Artificial Sequence
  mRNA product Design d-1 comprising derived and/or modified sequence from HRSV(Memphis-37)__AIY60640.1__F0_DSCav1 (opt4)
gggagacccgugacccggaaguuguacggcuacgcgacuuucccucccacaaacccucgcgcccuuccuuuccuacuugggcccggcagaaagcuuaccauggagcugcccauccugaagaccaacgccaucaccaccauccuggccgccgugacccugugcuucgccagcagccagaacaucaccgaggaguucuaccagagcaccugcagcgccgugagcaagggcuaccugagcgcccugagaaccggcugguacaccagcgugaucaccaucgagcugagcaacaucaaggagaacaagugcaacggcaccgacgccaaggugaagcugaucaagcaggagcuggacaaguacaagaacgccgugaccgagcugcagcugcugaugcagagcacccccgccgccaacaacagagccagaagagagcugcccagauucaugaacuacacccugaacaacaccaagaacaacaacgugacccugagcaagaagagaaagagaagauuccugggcuuccugcugggcgugggcagcgccaucgccagcggcaucgccgugugcaaggugcugcaccuggagggcgaggugaacaagaucaagaacgcccugcugagcaccaacaaggccguggugagccugagcaacggcgugagcgugcugaccuucaaggugcuggaccugaagaacuacaucgacaagcagcugcugcccauccugaacaagcagagcugcagcaucagcaacaucgagaccgugaucgaguuccagcagaagaacaacagacugcuggagaucaccagagaguucagcgugaacgccggcgugaccacccccgugagcaccuacaugcugaccaacagcgagcugcugagccugaucaacgacaugcccaucaccaacgaccagaagaagcugaugagcaacaacgugcagaucgugagacagcagagcuacagcaucaugugcaucaucaaggaggaggugcuggccuacguggugcagcugccccuguacggcgugaucgacacccccugcuggaagcugcacaccagcccccugugcaccaccaacaccaaggagggcagcaacaucugccugaccagaaccgacagaggcugguacugcgacaacgccggcagcgugagcuucuucccccaggccgagaccugcaaggugcagagcaacagaguguucugcgacaccaugaacagccugacccugcccagcgaggugaaccugugcaacaucgacaucuucaaccccaaguacgacugcaagaucaugaccagcaagaccgacgugagcagcagcgugaucaccagccugggcgccaucgugagcugcuacggcaagaccaagugcaccgccagcaacaagaacagaggcaucaucaagaccuucagcaacggcugcgacuacgugagcaacaagggcguggacaccgugagcgugggcaacacccuguacuacgugaacaagcaggagggcaagagccuguacgugaagggcgagcccaucaucaacuucuacgacccccugguguuccccagcgacgaguucgacgccagcaucagccaggugaacgagaagaucaaccagagccuggccuucaucagaaagagcgacgagcugcugcacaacgugaacgugggcaagagcaccaccaacaucaugaucaccaccaucaucaucgugaucaucgugauccugcugcugcugaucgccgugggccuguuccuguacugcaaggccagaagcacccccgugacccugagcaaggaccagcugagcggcaucaacaacaucgccuucagcaacugaggacuagucccuguucccagagcccacuuuuuuuucuuuuuuugaaauaaaauagccugucuuucagaucuaaaaaaaaaaaaaaaaaaaaaaaaaaaaaaaaaaaaaaaaaaaaaaaaaaaaaaaaaaaaaaaaugcaucccccccccccccccccccccccccccccccaaaggcucuuuucagagccaccagaauu

SEQ ID NO: 12598 - RNA, 2023 nt, Artificial Sequence
  mRNA product Design d-1 comprising derived and/or modified sequence from HRSV(Memphis-37)__AIY60640.1__F0_DSCav1 (opt5)
gggagacccgugacccggaaguuguacggcuacgcgacuuucccucccacaaacccucgcgcccuuccuuuccuacuugggcccggcagaaagcuuaccauggagcugcccauccucaagaccaacgccauuacaacgauccuggcugccgugacccuuugcuucgcgagcucccagaauauuacagaagaguuuuaccaaucuaccuguagcgcugucuccaaaggcuaucugucugcccucagaacagggugguacaccagcguuaucacaauugaacuguccaacaucaaggagaauaaaugcaacggaaccgacgccaaggugaaacuuaucaagcaggaacuggauaaguauaaaaaugcugugacggagcuccagcugcugaugcagucuaccccugccgcuaacaaucgggcccgcagagagcucccgcgguucaugaacuacacacugaauaacaccaagaauaacaaugucacacuuagcaaaaagcgcaaaagacgguuucugggcuuccuccugggggugggauccgcgauugccagcggcaucgcuguuuguaaggugcuucaccuggaaggggaggucaacaagauuaaaaaugcccuccugucuaccaacaaggcugugguuucccugagcaacggagugucuguccucacguuuaaagugcuggaccuuaagaauuauaucgauaaacaacugcuccccauucugaacaagcaguccugcagcaucucuaauauugaaacagugaucgaguuccagcagaaaaacaaucgccuucuggagaucaccagagaauuuuccgucaacgccggcguuacaaccccugugagcaccuacaugcucacaaauuccgagcugcugucucucauuaacgacaugcccaucacgaaugaucaaaagaagcugaugagcaacaaugugcagauuguccggcagcaguccuauagcaucauguguauuaucaaagaagaggugcuugcguacguugugcaacugccucucuacggcgucaucgacacccccugcuggaagcugcauacaucuccucuuuguaccacaaacaccaaagaaggguccaauauuugccugacgcgcacagauagaggaugguauugugacaacgccggcagcgugucuuucuuuccgcaggcugagaccugcaagguucagagcaaucggguguucugugauaccaugaacucccucacacugcccucugaggucaaccugugcaauaucgacauuuuuaacccuaaauacgauugcaagaucaugaccagcaagacagacguguccagcucugucauuacgucccucggggccaucgugagcuguuauggaaaaaccaagugcacagcuucuaauaaaaaccgcggcaucauuaagaccuucuccaaugggugugauuacguuagcaacaaaggaguggacacagucuccgugggcaauacccuguauuacguuaacaagcaagaaggcaagucucuuuaugugaaaggggagcccaucauuaauuuuuacgacccucuggucuuccccagcgaugaguucgacgccuccaucucucaggugaacgaaaagauuaaucagagccucgccuuuaucagaaaauccgaugaacugcugcacaacgugaauguuggaaagagcacgaccaacauuaugaucacaaccaucauuaucgucauuaucgugauucuucuccugcugaucgcugugggccucuuccuguacugcaaagcgcggucuacaccggucacccuuuccaaggaccagcugagcgggaucaauaacauugccuuuucuaacugaggacuagucccuguucccagagcccacuuuuuuuucuuuuuuugaaauaaaauagccugucuuucagaucuaaaaaaaaaaaaaaaaaaaaaaaaaaaaaaaaaaaaaaaaaaaaaaaaaaaaaaaaaaaaaaaaugcaucccccccccccccccccccccccccccccccaaaggcucuuuucagagccaccagaauu

SEQ ID NO: 12599 - RNA, 2023 nt, Artificial Sequence
  mRNA product Design d-1 comprising derived and/or modified sequence from HRSV(Memphis-37)__AIY60640.1__F0_DSCav1 (opt6)
gggagacccgugacccggaaguuguacggcuacgcgacuuucccucccacaaacccucgcgcccuuccuuuccuacuugggcccggcagaaagcuuaccauggaacucccaauccucaaaaccaaugccauaacaaccauacucgcugcaguaaccuuauguuucgcaaguagccaaaacauaaccgaagaauuuuaucaauccacaugcuccgcaguuucuaaaggauaucuaucagcauuaagaacuggaugguacacaucuguaauaacuauagaacuaagcaauauaaaagaaaacaaauguaacggaacugacgcuaaaguaaaacuuauaaaacaagaacuagauaaauacaaaaacgccguuaccgaacuacaacuauuaaugcaaucaacaccagccgcaaauaacagagcaagacgcgaauuaccaagauucaugaauuacacacuaaacaauacaaaaaauaacaauguaacacuaucaaaaaaaagaaaacgacgauucuuaggcuuccuacuaggagucggcucagcaauagcuuccggaauagccgucuguaaaguccuacaccuugaaggcgaaguaaacaaaaucaaaaacgcacuauuaucaacaaacaaagcagucguaucuuuauccaacggagucucaguccuaacauucaaaguacucgauuuaaaaaacuacaucgauaaacaacuccuucccauucuaaacaaacaauccugcucaauauccaacaucgaaacagucauagaauuucaacaaaaaaacaaccgccugcuagaaauaacaagagaauuuuccguaaaugccggcgucaccacaccaguaucaacauacaugcuaacaaacuccgaacuacucucccuaauaaacgauaugccaaucaccaacgaccaaaaaaaacuaaugucaaauaacguucaaauagucagacaacaaucauacagcauaaugugcauaauaaaagaagaagucuuagccuacguuguacaacucccauuauacggaguuaucgauacaccaugcuggaaauuacacacaucacccuuaugcaccacaaacacaaaagaaggauccaauauuugucuaacacgaacagacagaggaugguacugugauaacgcaggaucagugucauucuuuccacaagcagaaacauguaaaguucaaucuaacagaguauucugcgacaccaugaacucccuaaccuuacccucagaaguaaaucuaugcaacauagauaucuuuaacccaaaauacgacugcaaaaucaugacaucaaaaacugacguuucuucauccguuauaacuucccucggcgcuauaguguccugcuacggaaaaacuaaaugcacagcauccaacaaaaauagaggaauaauaaaaacauuuuccaacggcugcgacuauguuucaaacaaaggaguagauaccguaucagucggcaauacauuauauuauguuaacaaacaagaaggaaaaucccuauacguaaaaggagaaccuauaaucaacuucuacgacccacucguauuccccucagacgaauuugacgcaucuauaucucaaguaaaugaaaaaauaaaccaaucacucgcauuuauccgcaaaucugacgaauuacuccauaacgucaacgucggcaaaucaaccaccaacauaaugauaacaacaauuauaauaguaauaauugucauacuacuacuccuaauagcaguaggucuauuccuauacugcaaagcaagauccacccccguaacccuuuccaaagaucaacucucaggaauaaauaacauagccuuuucaaacuaaggacuagucccuguucccagagcccacuuuuuuuucuuuuuuugaaauaaaauagccugucuuucagaucuaaaaaaaaaaaaaaaaaaaaaaaaaaaaaaaaaaaaaaaaaaaaaaaaaaaaaaaaaaaaaaaaugcaucccccccccccccccccccccccccccccccaaaggcucuuuucagagccaccagaauu

SEQ ID NO: 12600 - RNA, 2023 nt, Artificial Sequence
  mRNA product Design d-1 comprising derived and/or modified sequence from HRSV(Memphis-37)__AIY60640.1__F0_DSCav1 (opt11)
gggagacccgugacccggaaguuguacggcuacgcgacuuucccucccacaaacccucgcgcccuuccuuuccuacuugggcccggcagaaagcuuaccauggaacuccccauacucaagacuaaugccaucaccaccauccucgccgccgugacccucugcuucgcaucgucccaaaacauaacagaagaguucuaccaaagcacaugcuccgcagucuccaaaggauaccucuccgcacuacguaccggcugguacaccagcgucaucaccaucgaacuuuccaacaucaaagagaacaaaugcaacggcaccgacgccaaaguaaaacucauaaaacaagagcuagacaaauacaaaaacgccgucacagaacuccaacuacugaugcaauccacaccggccgccaacaaccgcgcucgacgugaacucccacgcuucaugaacuacacucuuaacaacaccaaaaauaacaacgucacccuauccaaaaagcgaaagcgcagauuccucggcuuccuacuuggcgucggcucggcgauagccucuggaaucgccguuugcaagguccuccaccuagaaggcgaaguaaacaaaaucaaaaacgcacuccuaagcaccaacaaagccgucgucucacuuuccaacggcgucucaguccucacauucaaaguucucgaccuaaagaacuacaucgacaagcaacuacuacccauacucaauaaacaauccugcuccaucagcaacaucgagacagucaucgaauuucaacaaaagaacaaccgccuccucgaaauuacacgcgaguucucagucaacgccggagucaccaccccagucucaacauacaugcucaccaacagcgaacuccugucucuaaucaacgacaugcccaucacuaacgaccagaagaaacucauguccaacaacguccaaaucgugcgacaacaaucauacucuaucaugugcaucaucaaagaagaaguccucgcauacgucguccagcucccacucuacggcguaaucgacacacccugcuggaaacuccacacaucaccccuaugcaccaccaacacaaaagaaggcuccaacaucugccuaacccgaaccgacagagguugguauugcgacaacgccggcucagucucauucuucccacaagccgaaaccuguaaaguccaaucaaaccgcgucuucugcgauaccaugaacucucucacacuccccuccgaagucaaucucugcaacauagacaucuucaauccaaaguacgacugcaaaauaaugaccucgaaaaccgacguaagcuccagcgucaucaccuccuuaggcgcaaucguauccugcuacggcaaaaccaaaugcaccgccucaaacaaaaacagaggcaucaucaaaacguucucgaacggaugcgacuacguuuccaauaaaggcguagauaccgucuccgucggcaacacacucuauuacgucaacaaacaagaaggcaaaucccucuacgucaaaggugaaccuaucaucaacuucuacgacccccucgucuuccccagcgacgaguucgaugccucaaucagccaagucaacgagaaaaucaaccaaucacuggcuuucauacgcaaauccgacgaacuccuccacaacgugaacgucggcaaauccacaaccaacaucaugauaaccacaauaaucaucgucauaaucguaauccuacuccuccuuauugccguaggacuauuccuauacugcaaagcccgauccacccccgucacccucucaaaagaccaacucuccggcaucaacaauauagccuucucuaacuaaggacuagucccuguucccagagcccacuuuuuuuucuuuuuuugaaauaaaauagccugucuuucagaucuaaaaaaaaaaaaaaaaaaaaaaaaaaaaaaaaaaaaaaaaaaaaaaaaaaaaaaaaaaaaaaaaugcaucccccccccccccccccccccccccccccccaaaggcucuuuucagagccaccagaauu

SEQ ID NO: 12601 - RNA, 2078 nt, Artificial Sequence
  mRNA product Design d-2 comprising derived and/or modified sequence from HRSV(Memphis-37)__AIY60640.1__F0_DSCav1 (opt1)
gggagagcggcucggccauuuugucccagucaguccggaggcugcggcugcagaaguaccgccugcggaguaacugcaaagaagcuuaccauggagcugcccauccucaagaccaacgccaucaccacgauccuggccgcggugacccugugcuucgccagcucccagaacaucaccgaggaguucuaccagagcacgugcuccgccgucagcaagggcuaccucuccgcccugcgcaccgggugguacaccagcgugaucaccaucgagcuguccaacaucaaggagaacaagugcaacggcaccgacgccaaggugaagcucaucaagcaggagcuggacaaguacaagaacgcggucacggagcugcagcuccugaugcagagcaccccggccgccaacaaccgggcccgccgggagcugccccgcuucaugaacuacacccucaacaacaccaagaacaacaacgugacgcuguccaagaagcggaagcgccgguuccugggguuccuccugggcguggggagcgcgaucgccuccggcaucgccgucugcaaggugcugcaccucgagggcgaggugaacaagaucaagaacgcccugcuguccaccaacaaggccgucgugagccucuccaacggggugagcguccugaccuucaaggugcuggaccucaagaacuacaucgacaagcagcugcugcccauccugaacaagcagagcugcuccaucagcaacaucgagaccgucaucgaguuccagcagaagaacaaccgccuccuggagaucacgcgggaguucagcgugaacgcgggcgugaccacccccgucuccaccuacaugcugacgaacagcgagcuccugucccugaucaacgacaugccgaucaccaacgaccagaagaagcucaugagcaacaacgugcagaucgugcgccagcaguccuacagcaucaugugcaucaucaaggaggagguccuggccuacguggugcagcugccccucuacggggucaucgacacccccugcuggaagcugcacaccagcccccugugcacgaccaacaccaaggagggcuccaacaucugccucacccggacggaccgcgggugguacugcgacaacgccggcagcguguccuucuucccgcaggccgagaccugcaagguccagagcaaccggguguucugcgacaccaugaacucccugacccugcccagcgaggugaaccucugcaacaucgacaucuucaaccccaaguacgacugcaagaucaugacguccaagaccgacgucagcuccagcgugaucaccucccugggcgccaucgugagcugcuacgggaagaccaagugcacggcgagcaacaagaaccgcggcaucaucaagaccuucuccaacgggugcgacuacgucagcaacaagggcguggacaccguguccgucggcaacacccuguacuacgugaacaagcaggagggcaagagccucuacgugaagggggagcccaucaucaacuucuacgacccgcuggucuuccccuccgacgaguucgacgccagcaucucccaggugaacgagaagaucaaccagagccuggccuucauccggaaguccgacgagcuccugcacaacgugaacgucggcaagagcaccacgaacaucaugaucaccaccaucaucaucgugaucaucgugauccugcugcuccugaucgccgucgggcuguuccucuacugcaaggcccgcuccacccccgugacgcugagcaaggaccagcuguccgggaucaacaacaucgcguucagcaacugaggacuaguaauaaggaaacuguaugaaugucugugggcaggaagugaagagauccuucuguaaagguuuuuggaauuaugucugcugaauaauaaacuuuuuugaaauaauaaaucugguagaaaaaugagaucuaaaaaaaaaaaaaaaaaaaaaaaaaaaaaaaaaaaaaaaaaaaaaaaaaaaaaaaaaaaaaaaaugcaucccccccccccccccccccccccccccccccaaaggcucuuuucagagccaccagaauu

SEQ ID NO: 12602 - RNA, 2078 nt, Artificial Sequence
  mRNA product Design d-2 comprising derived and/or modified sequence from HRSV(Memphis-37)__AIY60640.1__F0_DSCav1 (opt1)
gggagagcggcucggccauuuugucccagucaguccggaggcugcggcugcagaaguaccgccugcggaguaacugcaaagaagcuuaccauggagcugcccauccucaagaccaacgccaucaccacgauccuggccgcggugacccugugcuucgccagcucccagaacaucaccgaggaguucuaccagagcacgugcuccgccgucagcaagggcuaccucuccgcccugcgcaccgggugguacaccagcgugaucaccaucgagcuguccaacaucaaggagaacaagugcaacggcaccgacgccaaggugaagcucaucaagcaggagcuggacaaguacaagaacgcggucacggagcugcagcuccugaugcagagcaccccggccgccaacaaccgggcccgccgggagcugccccgcuucaugaacuacacccucaacaacaccaagaacaacaacgugacgcuguccaagaagcggaagcgccgguuccugggguuccuccugggcguggggagcgcgaucgccuccggcaucgccgucugcaaggugcugcaccucgagggcgaggugaacaagaucaagaacgcccugcugagcaccaacaaggccgucgugucccucagcaacgggguguccguccugaccuucaaggugcuggaccucaagaacuacaucgacaagcagcugcugcccauccucaacaagcagagcugcuccaucagcaacaucgagaccgugaucgaguuccagcagaagaacaaccgccugcuggagaucacgcgggaguucuccgucaacgcgggcgugaccacccccgugagcaccuacaugcucacgaacagcgagcugcugucccucaucaacgacaugccgaucaccaacgaccagaagaagcugaugagcaacaacguccagaucgugcgccagcaguccuacagcaucaugugcaucaucaaggaggaggugcuggccuacgucgugcagcucccccuguacggggugaucgacacccccugcuggaagcugcacaccagcccccucugcacgaccaacaccaaggagggcagcaacaucugccugacccggacggaccgcgggugguacugcgacaacgccggcuccgucagcuucuucccgcaggccgagaccugcaaggugcaguccaaccgggucuucugcgacaccaugaacagccugacccuccccuccgaggugaaccugugcaacaucgacaucuucaaccccaaguacgacugcaagaucaugacgagcaagaccgacguguccagcuccgucaucaccagccugggcgccaucguguccugcuacgggaagaccaagugcacggcgagcaacaagaaccgcggcaucaucaagaccuucuccaacgggugcgacuacgugagcaacaagggcgucgacaccgugagcgugggcaacacccucuacuacgucaacaagcaggaggggaagucccuguacgugaagggcgagcccaucaucaacuucuacgacccgcugguguuccccagcgacgaguucgacgccuccaucagccaggucaacgagaagaucaaccagucccucgccuucauccggaaguccgacgagcugcugcacaacgugaacguggggaaguccaccacgaacaucaugaucaccaccaucaucaucgucaucaucgugauccugcuccugcugaucgccgugggccucuuccuguacugcaaggcccgcagcacccccgucacgcuguccaaggaccagcucagcgggaucaacaacaucgcguucuccaacugaggacuaguaauaaggaaacuguaugaaugucugugggcaggaagugaagagauccuucuguaaagguuuuuggaauuaugucugcugaauaauaaacuuuuuugaaauaauaaaucugguagaaaaaugagaucuaaaaaaaaaaaaaaaaaaaaaaaaaaaaaaaaaaaaaaaaaaaaaaaaaaaaaaaaaaaaaaaaugcaucccccccccccccccccccccccccccccccaaaggcucuuuucagagccaccagaauu

SEQ ID NO: 12603 - RNA, 2078 nt, Artificial Sequence
  mRNA product Design d-2 comprising derived and/or modified sequence from HRSV(Memphis-37)__AIY60640.1__F0_DSCav1 (opt2)
gggagagcggcucggccauuuugucccagucaguccggaggcugcggcugcagaaguaccgccugcggaguaacugcaaagaagcuuaccauggagcuccccauccucaagaccaacgccaucaccaccauccucgccgccgucacccucugcuucgccuccucccagaacaucaccgaggaguucuaccaguccaccugcuccgccgucuccaagggcuaccucuccgcccuccgcaccggcugguacaccuccgucaucaccaucgagcucuccaacaucaaggagaacaagugcaacggcaccgacgccaaggucaagcucaucaagcaggagcucgacaaguacaagaacgccgucaccgagcuccagcuccucaugcaguccacccccgccgccaacaaccgcgcccgccgcgagcucccccgcuucaugaacuacacccucaacaacaccaagaacaacaacgucacccucuccaagaagcgcaagcgccgcuuccucggcuuccuccucggcgucggcuccgccaucgccuccggcaucgccgucugcaagguccuccaccucgagggcgaggucaacaagaucaagaacgcccuccucuccaccaacaaggccgucgucucccucuccaacggcgucuccguccucaccuucaagguccucgaccucaagaacuacaucgacaagcagcuccuccccauccucaacaagcaguccugcuccaucuccaacaucgagaccgucaucgaguuccagcagaagaacaaccgccuccucgagaucacccgcgaguucuccgucaacgccggcgucaccacccccgucuccaccuacaugcucaccaacuccgagcuccucucccucaucaacgacaugcccaucaccaacgaccagaagaagcucauguccaacaacguccagaucguccgccagcaguccuacuccaucaugugcaucaucaaggaggagguccucgccuacgucguccagcucccccucuacggcgucaucgacacccccugcuggaagcuccacaccuccccccucugcaccaccaacaccaaggagggcuccaacaucugccucacccgcaccgaccgcggcugguacugcgacaacgccggcuccgucuccuucuucccccaggccgagaccugcaagguccaguccaaccgcgucuucugcgacaccaugaacucccucacccuccccuccgaggucaaccucugcaacaucgacaucuucaaccccaaguacgacugcaagaucaugaccuccaagaccgacgucuccuccuccgucaucaccucccucggcgccaucgucuccugcuacggcaagaccaagugcaccgccuccaacaagaaccgcggcaucaucaagaccuucuccaacggcugcgacuacgucuccaacaagggcgucgacaccgucuccgucggcaacacccucuacuacgucaacaagcaggagggcaagucccucuacgucaagggcgagcccaucaucaacuucuacgacccccucgucuuccccuccgacgaguucgacgccuccaucucccaggucaacgagaagaucaaccagucccucgccuucauccgcaaguccgacgagcuccuccacaacgucaacgucggcaaguccaccaccaacaucaugaucaccaccaucaucaucgucaucaucgucauccuccuccuccucaucgccgucggccucuuccucuacugcaaggcccgcuccacccccgucacccucuccaaggaccagcucuccggcaucaacaacaucgccuucuccaacugaggacuaguaauaaggaaacuguaugaaugucugugggcaggaagugaagagauccuucuguaaagguuuuuggaauuaugucugcugaauaauaaacuuuuuugaaauaauaaaucugguagaaaaaugagaucuaaaaaaaaaaaaaaaaaaaaaaaaaaaaaaaaaaaaaaaaaaaaaaaaaaaaaaaaaaaaaaaaugcaucccccccccccccccccccccccccccccccaaaggcucuuuucagagccaccagaauu

SEQ ID NO: 12604 - RNA, 2078 nt, Artificial Sequence
  mRNA product Design d-2 comprising derived and/or modified sequence from HRSV(Memphis-37)__AIY60640.1__F0_DSCav1 (opt3)
gggagagcggcucggccauuuugucccagucaguccggaggcugcggcugcagaaguaccgccugcggaguaacugcaaagaagcuuaccauggagcugcccauccucaagaccaacgccauuacaacuauacuugcugcagugacgcugugcuucgccagcucccagaauaucaccgaagaguuuuaccaaucuacauguucagcggucaguaaaggcuauuugagcgcuuuaagaacugggugguacaccuccguuauuacaaucgaacugucuaacauuaaggagaauaaaugcaacggaaccgacgccaaggugaaacuaaucaagcaggaacucgauaaguauaaaaaugcaguaacugagcugcagcuucugaugcagucgaccccugccgcuaacaauagggcacggcgcgaguugccacgauucaugaacuacacacucaauaacacgaagaauaacaaugugacucugagcaaaaagcguaaaagaagguuucuggguuuccucuuaggcgucgggucagccauagcuaguggaaucgccguguguaagguucugcaccuugaaggcgaggugaacaagauuaaaaaugcguugcuguccaccaacaaggcagucgugucucuaagcaacgguguauccguucucacauuuaaagugcuggaccuuaagaauuauaucgauaaacaacuguugccgauucucaacaagcagucaugcaguaucagcaauauagaaacugucauugaguuccagcagaaaaacaaucggcuguuagagaucacccgcgaauuuucugugaacgccggggugacaacccccgucuccacguacaugcugacuaauucagagcuccuuagccugauuaacgacaugccuaucacaaaugaucaaaagaaguugaugaguaacaauguucagaucgugagacagcagucuuauuccauuauguguauaaucaaagaagagguacuagcuuacgugguccaacugccacucuacggagugauugacacccccugcuggaagcugcauacuagcccucuuuguacaaccaacacgaaagaaggcucgaauaucugccugaccaggacagaucggggcugguauugugacaacgccgggucuguuuccuucuuuccacaggcagagacuugcaaggugcagucaaaucgcgucuucugugauaccaugaacaguuugacacuccccagcgaggugaaccugugcaauauagacauuuuuaacccuaaauacgauugcaagaucaugacuuccaagaccgacguaucuagcucaguuaucacaaguuuaggagcuauuguguccuguuaugguaaaaccaagugcacugccagcaauaaaaaccgaggcaucauuaagacguucucuaaugggugugauuacgucucaaacaaaggaguggacacagucagugugggcaauacccuguauuacguuaacaagcaagaagguaagagccuauaugugaaaggggagccaauaaucaauuuuuacgacccgcucguauuccccuccgaugaguucgacgcgucuauuucgcaggucaacgaaaagaucaaucagagccuggccuuuaucagaaaauccgaugaacuuuugcacaacgugaauguuggaaagucaacuaccaacauuaugauaacaaccaucauuaucgugauuaucgucauacugcuccugcuuaucgcagugggccuguucuuguacugcaaagcuaggaguacuccuguaacacucucuaaggaccagcugagcggcauuaauaacaucgccuuuuccaacugaggacuaguaauaaggaaacuguaugaaugucugugggcaggaagugaagagauccuucuguaaagguuuuuggaauuaugucugcugaauaauaaacuuuuuugaaauaauaaaucugguagaaaaaugagaucuaaaaaaaaaaaaaaaaaaaaaaaaaaaaaaaaaaaaaaaaaaaaaaaaaaaaaaaaaaaaaaaaugcaucccccccccccccccccccccccccccccccaaaggcucuuuucagagccaccagaauu

SEQ ID NO: 12605 - RNA, 2078 nt, Artificial Sequence
  mRNA product Design d-2 comprising derived and/or modified sequence from HRSV(Memphis-37)__AIY60640.1__F0_DSCav1 (opt4)
gggagagcggcucggccauuuugucccagucaguccggaggcugcggcugcagaaguaccgccugcggaguaacugcaaagaagcuuaccauggagcugcccauccugaagaccaacgccaucaccaccauccuggccgccgugacccugugcuucgccagcagccagaacaucaccgaggaguucuaccagagcaccugcagcgccgugagcaagggcuaccugagcgcccugagaaccggcugguacaccagcgugaucaccaucgagcugagcaacaucaaggagaacaagugcaacggcaccgacgccaaggugaagcugaucaagcaggagcuggacaaguacaagaacgccgugaccgagcugcagcugcugaugcagagcacccccgccgccaacaacagagccagaagagagcugcccagauucaugaacuacacccugaacaacaccaagaacaacaacgugacccugagcaagaagagaaagagaagauuccugggcuuccugcugggcgugggcagcgccaucgccagcggcaucgccgugugcaaggugcugcaccuggagggcgaggugaacaagaucaagaacgcccugcugagcaccaacaaggccguggugagccugagcaacggcgugagcgugcugaccuucaaggugcuggaccugaagaacuacaucgacaagcagcugcugcccauccugaacaagcagagcugcagcaucagcaacaucgagaccgugaucgaguuccagcagaagaacaacagacugcuggagaucaccagagaguucagcgugaacgccggcgugaccacccccgugagcaccuacaugcugaccaacagcgagcugcugagccugaucaacgacaugcccaucaccaacgaccagaagaagcugaugagcaacaacgugcagaucgugagacagcagagcuacagcaucaugugcaucaucaaggaggaggugcuggccuacguggugcagcugccccuguacggcgugaucgacacccccugcuggaagcugcacaccagcccccugugcaccaccaacaccaaggagggcagcaacaucugccugaccagaaccgacagaggcugguacugcgacaacgccggcagcgugagcuucuucccccaggccgagaccugcaaggugcagagcaacagaguguucugcgacaccaugaacagccugacccugcccagcgaggugaaccugugcaacaucgacaucuucaaccccaaguacgacugcaagaucaugaccagcaagaccgacgugagcagcagcgugaucaccagccugggcgccaucgugagcugcuacggcaagaccaagugcaccgccagcaacaagaacagaggcaucaucaagaccuucagcaacggcugcgacuacgugagcaacaagggcguggacaccgugagcgugggcaacacccuguacuacgugaacaagcaggagggcaagagccuguacgugaagggcgagcccaucaucaacuucuacgacccccugguguuccccagcgacgaguucgacgccagcaucagccaggugaacgagaagaucaaccagagccuggccuucaucagaaagagcgacgagcugcugcacaacgugaacgugggcaagagcaccaccaacaucaugaucaccaccaucaucaucgugaucaucgugauccugcugcugcugaucgccgugggccuguuccuguacugcaaggccagaagcacccccgugacccugagcaaggaccagcugagcggcaucaacaacaucgccuucagcaacugaggacuaguaauaaggaaacuguaugaaugucugugggcaggaagugaagagauccuucuguaaagguuuuuggaauuaugucugcugaauaauaaacuuuuuugaaauaauaaaucugguagaaaaaugagaucuaaaaaaaaaaaaaaaaaaaaaaaaaaaaaaaaaaaaaaaaaaaaaaaaaaaaaaaaaaaaaaaaugcaucccccccccccccccccccccccccccccccaaaggcucuuuucagagccaccagaauu

SEQ ID NO: 12606 - RNA, 2078 nt, Artificial Sequence
  mRNA product Design d-2 comprising derived and/or modified sequence from HRSV(Memphis-37)__AIY60640.1__F0_DSCav1 (opt5)
gggagagcggcucggccauuuugucccagucaguccggaggcugcggcugcagaaguaccgccugcggaguaacugcaaagaagcuuaccauggagcugcccauccucaagaccaacgccauuacaacgauccuggcugccgugacccuuugcuucgcgagcucccagaauauuacagaagaguuuuaccaaucuaccuguagcgcugucuccaaaggcuaucugucugcccucagaacagggugguacaccagcguuaucacaauugaacuguccaacaucaaggagaauaaaugcaacggaaccgacgccaaggugaaacuuaucaagcaggaacuggauaaguauaaaaaugcugugacggagcuccagcugcugaugcagucuaccccugccgcuaacaaucgggcccgcagagagcucccgcgguucaugaacuacacacugaauaacaccaagaauaacaaugucacacuuagcaaaaagcgcaaaagacgguuucugggcuuccuccugggggugggauccgcgauugccagcggcaucgcuguuuguaaggugcuucaccuggaaggggaggucaacaagauuaaaaaugcccuccugucuaccaacaaggcugugguuucccugagcaacggagugucuguccucacguuuaaagugcuggaccuuaagaauuauaucgauaaacaacugcuccccauucugaacaagcaguccugcagcaucucuaauauugaaacagugaucgaguuccagcagaaaaacaaucgccuucuggagaucaccagagaauuuuccgucaacgccggcguuacaaccccugugagcaccuacaugcucacaaauuccgagcugcugucucucauuaacgacaugcccaucacgaaugaucaaaagaagcugaugagcaacaaugugcagauuguccggcagcaguccuauagcaucauguguauuaucaaagaagaggugcuugcguacguugugcaacugccucucuacggcgucaucgacacccccugcuggaagcugcauacaucuccucuuuguaccacaaacaccaaagaaggguccaauauuugccugacgcgcacagauagaggaugguauugugacaacgccggcagcgugucuuucuuuccgcaggcugagaccugcaagguucagagcaaucggguguucugugauaccaugaacucccucacacugcccucugaggucaaccugugcaauaucgacauuuuuaacccuaaauacgauugcaagaucaugaccagcaagacagacguguccagcucugucauuacgucccucggggccaucgugagcuguuauggaaaaaccaagugcacagcuucuaauaaaaaccgcggcaucauuaagaccuucuccaaugggugugauuacguuagcaacaaaggaguggacacagucuccgugggcaauacccuguauuacguuaacaagcaagaaggcaagucucuuuaugugaaaggggagcccaucauuaauuuuuacgacccucuggucuuccccagcgaugaguucgacgccuccaucucucaggugaacgaaaagauuaaucagagccucgccuuuaucagaaaauccgaugaacugcugcacaacgugaauguuggaaagagcacgaccaacauuaugaucacaaccaucauuaucgucauuaucgugauucuucuccugcugaucgcugugggccucuuccuguacugcaaagcgcggucuacaccggucacccuuuccaaggaccagcugagcgggaucaauaacauugccuuuucuaacugaggacuaguaauaaggaaacuguaugaaugucugugggcaggaagugaagagauccuucuguaaagguuuuuggaauuaugucugcugaauaauaaacuuuuuugaaauaauaaaucugguagaaaaaugagaucuaaaaaaaaaaaaaaaaaaaaaaaaaaaaaaaaaaaaaaaaaaaaaaaaaaaaaaaaaaaaaaaaugcaucccccccccccccccccccccccccccccccaaaggcucuuuucagagccaccagaauu

SEQ ID NO: 12607 - RNA, 2078 nt, Artificial Sequence
  mRNA product Design d-2 comprising derived and/or modified sequence from HRSV(Memphis-37)__AIY60640.1__F0_DSCav1 (opt6)
gggagagcggcucggccauuuugucccagucaguccggaggcugcggcugcagaaguaccgccugcggaguaacugcaaagaagcuuaccauggaacucccaauccucaaaaccaaugccauaacaaccauacucgcugcaguaaccuuauguuucgcaaguagccaaaacauaaccgaagaauuuuaucaauccacaugcuccgcaguuucuaaaggauaucuaucagcauuaagaacuggaugguacacaucuguaauaacuauagaacuaagcaauauaaaagaaaacaaauguaacggaacugacgcuaaaguaaaacuuauaaaacaagaacuagauaaauacaaaaacgccguuaccgaacuacaacuauuaaugcaaucaacaccagccgcaaauaacagagcaagacgcgaauuaccaagauucaugaauuacacacuaaacaauacaaaaaauaacaauguaacacuaucaaaaaaaagaaaacgacgauucuuaggcuuccuacuaggagucggcucagcaauagcuuccggaauagccgucuguaaaguccuacaccuugaaggcgaaguaaacaaaaucaaaaacgcacuauuaucaacaaacaaagcagucguaucuuuauccaacggagucucaguccuaacauucaaaguacucgauuuaaaaaacuacaucgauaaacaacuccuucccauucuaaacaaacaauccugcucaauauccaacaucgaaacagucauagaauuucaacaaaaaaacaaccgccugcuagaaauaacaagagaauuuuccguaaaugccggcgucaccacaccaguaucaacauacaugcuaacaaacuccgaacuacucucccuaauaaacgauaugccaaucaccaacgaccaaaaaaaacuaaugucaaauaacguucaaauagucagacaacaaucauacagcauaaugugcauaauaaaagaagaagucuuagccuacguuguacaacucccauuauacggaguuaucgauacaccaugcuggaaauuacacacaucacccuuaugcaccacaaacacaaaagaaggauccaauauuugucuaacacgaacagacagaggaugguacugugauaacgcaggaucagugucauucuuuccacaagcagaaacauguaaaguucaaucuaacagaguauucugcgacaccaugaacucccuaaccuuacccucagaaguaaaucuaugcaacauagauaucuuuaacccaaaauacgacugcaaaaucaugacaucaaaaacugacguuucuucauccguuauaacuucccucggcgcuauaguguccugcuacggaaaaacuaaaugcacagcauccaacaaaaauagaggaauaauaaaaacauuuuccaacggcugcgacuauguuucaaacaaaggaguagauaccguaucagucggcaauacauuauauuauguuaacaaacaagaaggaaaaucccuauacguaaaaggagaaccuauaaucaacuucuacgacccacucguauuccccucagacgaauuugacgcaucuauaucucaaguaaaugaaaaaauaaaccaaucacucgcauuuauccgcaaaucugacgaauuacuccauaacgucaacgucggcaaaucaaccaccaacauaaugauaacaacaauuauaauaguaauaauugucauacuacuacuccuaauagcaguaggucuauuccuauacugcaaagcaagauccacccccguaacccuuuccaaagaucaacucucaggaauaaauaacauagccuuuucaaacuaaggacuaguaauaaggaaacuguaugaaugucugugggcaggaagugaagagauccuucuguaaagguuuuuggaauuaugucugcugaauaauaaacuuuuuugaaauaauaaaucugguagaaaaaugagaucuaaaaaaaaaaaaaaaaaaaaaaaaaaaaaaaaaaaaaaaaaaaaaaaaaaaaaaaaaaaaaaaaugcaucccccccccccccccccccccccccccccccaaaggcucuuuucagagccaccagaauu

SEQ ID NO: 12608 - RNA, 2078 nt, Artificial Sequence
  mRNA product Design d-2 comprising derived and/or modified sequence from HRSV(Memphis-37)__AIY60640.1__F0_DSCav1 (opt11)
gggagagcggcucggccauuuugucccagucaguccggaggcugcggcugcagaaguaccgccugcggaguaacugcaaagaagcuuaccauggaacuccccauacucaagacuaaugccaucaccaccauccucgccgccgugacccucugcuucgcaucgucccaaaacauaacagaagaguucuaccaaagcacaugcuccgcagucuccaaaggauaccucuccgcacuacguaccggcugguacaccagcgucaucaccaucgaacuuuccaacaucaaagagaacaaaugcaacggcaccgacgccaaaguaaaacucauaaaacaagagcuagacaaauacaaaaacgccgucacagaacuccaacuacugaugcaauccacaccggccgccaacaaccgcgcucgacgugaacucccacgcuucaugaacuacacucuuaacaacaccaaaaauaacaacgucacccuauccaaaaagcgaaagcgcagauuccucggcuuccuacuuggcgucggcucggcgauagccucuggaaucgccguuugcaagguccuccaccuagaaggcgaaguaaacaaaaucaaaaacgcacuccuaagcaccaacaaagccgucgucucacuuuccaacggcgucucaguccucacauucaaaguucucgaccuaaagaacuacaucgacaagcaacuacuacccauacucaauaaacaauccugcuccaucagcaacaucgagacagucaucgaauuucaacaaaagaacaaccgccuccucgaaauuacacgcgaguucucagucaacgccggagucaccaccccagucucaacauacaugcucaccaacagcgaacuccugucucuaaucaacgacaugcccaucacuaacgaccagaagaaacucauguccaacaacguccaaaucgugcgacaacaaucauacucuaucaugugcaucaucaaagaagaaguccucgcauacgucguccagcucccacucuacggcguaaucgacacacccugcuggaaacuccacacaucaccccuaugcaccaccaacacaaaagaaggcuccaacaucugccuaacccgaaccgacagagguugguauugcgacaacgccggcucagucucauucuucccacaagccgaaaccuguaaaguccaaucaaaccgcgucuucugcgauaccaugaacucucucacacuccccuccgaagucaaucucugcaacauagacaucuucaauccaaaguacgacugcaaaauaaugaccucgaaaaccgacguaagcuccagcgucaucaccuccuuaggcgcaaucguauccugcuacggcaaaaccaaaugcaccgccucaaacaaaaacagaggcaucaucaaaacguucucgaacggaugcgacuacguuuccaauaaaggcguagauaccgucuccgucggcaacacacucuauuacgucaacaaacaagaaggcaaaucccucuacgucaaaggugaaccuaucaucaacuucuacgacccccucgucuuccccagcgacgaguucgaugccucaaucagccaagucaacgagaaaaucaaccaaucacuggcuuucauacgcaaauccgacgaacuccuccacaacgugaacgucggcaaauccacaaccaacaucaugauaaccacaauaaucaucgucauaaucguaauccuacuccuccuuauugccguaggacuauuccuauacugcaaagcccgauccacccccgucacccucucaaaagaccaacucuccggcaucaacaauauagccuucucuaacuaaggacuaguaauaaggaaacuguaugaaugucugugggcaggaagugaagagauccuucuguaaagguuuuuggaauuaugucugcugaauaauaaacuuuuuugaaauaauaaaucugguagaaaaaugagaucuaaaaaaaaaaaaaaaaaaaaaaaaaaaaaaaaaaaaaaaaaaaaaaaaaaaaaaaaaaaaaaaaugcaucccccccccccccccccccccccccccccccaaaggcucuuuucagagccaccagaauu

SEQ ID NO: 12609 - RNA, 2394 nt, Artificial Sequence
  mRNA product Design d-3 comprising derived and/or modified sequence from HRSV(Memphis-37)__AIY60640.1__F0_DSCav1 (opt1)
gggagagggcgcuuggcuugcaaggacccugagcugcggcauugaagcacacccaacccaacucgacugaagucagccucacugaaccggaucugagaaucuucucucucugggcuugccagggcucuccgaaccuagcuagcauccucuucaauuccaacuagaaagcuuaccauggagcugcccauccucaagaccaacgccaucaccacgauccuggccgcggugacccugugcuucgccagcucccagaacaucaccgaggaguucuaccagagcacgugcuccgccgucagcaagggcuaccucuccgcccugcgcaccgggugguacaccagcgugaucaccaucgagcuguccaacaucaaggagaacaagugcaacggcaccgacgccaaggugaagcucaucaagcaggagcuggacaaguacaagaacgcggucacggagcugcagcuccugaugcagagcaccccggccgccaacaaccgggcccgccgggagcugccccgcuucaugaacuacacccucaacaacaccaagaacaacaacgugacgcuguccaagaagcggaagcgccgguuccugggguuccuccugggcguggggagcgcgaucgccuccggcaucgccgucugcaaggugcugcaccucgagggcgaggugaacaagaucaagaacgcccugcuguccaccaacaaggccgucgugagccucuccaacggggugagcguccugaccuucaaggugcuggaccucaagaacuacaucgacaagcagcugcugcccauccugaacaagcagagcugcuccaucagcaacaucgagaccgucaucgaguuccagcagaagaacaaccgccuccuggagaucacgcgggaguucagcgugaacgcgggcgugaccacccccgucuccaccuacaugcugacgaacagcgagcuccugucccugaucaacgacaugccgaucaccaacgaccagaagaagcucaugagcaacaacgugcagaucgugcgccagcaguccuacagcaucaugugcaucaucaaggaggagguccuggccuacguggugcagcugccccucuacggggucaucgacacccccugcuggaagcugcacaccagcccccugugcacgaccaacaccaaggagggcuccaacaucugccucacccggacggaccgcgggugguacugcgacaacgccggcagcguguccuucuucccgcaggccgagaccugcaagguccagagcaaccggguguucugcgacaccaugaacucccugacccugcccagcgaggugaaccucugcaacaucgacaucuucaaccccaaguacgacugcaagaucaugacguccaagaccgacgucagcuccagcgugaucaccucccugggcgccaucgugagcugcuacgggaagaccaagugcacggcgagcaacaagaaccgcggcaucaucaagaccuucuccaacgggugcgacuacgucagcaacaagggcguggacaccguguccgucggcaacacccuguacuacgugaacaagcaggagggcaagagccucuacgugaagggggagcccaucaucaacuucuacgacccgcuggucuuccccuccgacgaguucgacgccagcaucucccaggugaacgagaagaucaaccagagccuggccuucauccggaaguccgacgagcuccugcacaacgugaacgucggcaagagcaccacgaacaucaugaucaccaccaucaucaucgugaucaucgugauccugcugcuccugaucgccgucgggcuguuccucuacugcaaggcccgcuccacccccgugacgcugagcaaggaccagcuguccgggaucaacaacaucgcguucagcaacugaggacuagugaagggaacacccaaauuuaauucagccuuaagcacaauuaauuaagagugaaacguaauuguacaagcaguuggucacccaccauagggcaugaucaacaccgcaaccuuuccuuuuucccccagugauucugaaaaaccccucuucccuucagcuugcuuagauguuccaaauuuaguaagcuuaaggcggccuacagaagaaaaagaaaaaaaaggccacaaaaguucccucucacuuucaguaaauaaaauaaaagcagcaacagaaauaaagaaauaaaugaaauucaaaaugaaauaaauauuguguugugcagcauuaaaaaaucaauaaaaauuaaaaaugagcaagaucuaaaaaaaaaaaaaaaaaaaaaaaaaaaaaaaaaaaaaaaaaaaaaaaaaaaaaaaaaaaaaaaaugcaucccccccccccccccccccccccccccccccaaaggcucuuuucagagccaccagaauu

SEQ ID NO: 12610 - RNA, 2394 nt, Artificial Sequence
  mRNA product Design d-3 comprising derived and/or modified sequence from HRSV(Memphis-37)__AIY60640.1__F0_DSCav1 (opt1)
gggagagggcgcuuggcuugcaaggacccugagcugcggcauugaagcacacccaacccaacucgacugaagucagccucacugaaccggaucugagaaucuucucucucugggcuugccagggcucuccgaaccuagcuagcauccucuucaauuccaacuagaaagcuuaccauggagcugcccauccucaagaccaacgccaucaccacgauccuggccgcggugacccugugcuucgccagcucccagaacaucaccgaggaguucuaccagagcacgugcuccgccgucagcaagggcuaccucuccgcccugcgcaccgggugguacaccagcgugaucaccaucgagcuguccaacaucaaggagaacaagugcaacggcaccgacgccaaggugaagcucaucaagcaggagcuggacaaguacaagaacgcggucacggagcugcagcuccugaugcagagcaccccggccgccaacaaccgggcccgccgggagcugccccgcuucaugaacuacacccucaacaacaccaagaacaacaacgugacgcuguccaagaagcggaagcgccgguuccugggguuccuccugggcguggggagcgcgaucgccuccggcaucgccgucugcaaggugcugcaccucgagggcgaggugaacaagaucaagaacgcccugcugagcaccaacaaggccgucgugucccucagcaacgggguguccguccugaccuucaaggugcuggaccucaagaacuacaucgacaagcagcugcugcccauccucaacaagcagagcugcuccaucagcaacaucgagaccgugaucgaguuccagcagaagaacaaccgccugcuggagaucacgcgggaguucuccgucaacgcgggcgugaccacccccgugagcaccuacaugcucacgaacagcgagcugcugucccucaucaacgacaugccgaucaccaacgaccagaagaagcugaugagcaacaacguccagaucgugcgccagcaguccuacagcaucaugugcaucaucaaggaggaggugcuggccuacgucgugcagcucccccuguacggggugaucgacacccccugcuggaagcugcacaccagcccccucugcacgaccaacaccaaggagggcagcaacaucugccugacccggacggaccgcgggugguacugcgacaacgccggcuccgucagcuucuucccgcaggccgagaccugcaaggugcaguccaaccgggucuucugcgacaccaugaacagccugacccuccccuccgaggugaaccugugcaacaucgacaucuucaaccccaaguacgacugcaagaucaugacgagcaagaccgacguguccagcuccgucaucaccagccugggcgccaucguguccugcuacgggaagaccaagugcacggcgagcaacaagaaccgcggcaucaucaagaccuucuccaacgggugcgacuacgugagcaacaagggcgucgacaccgugagcgugggcaacacccucuacuacgucaacaagcaggaggggaagucccuguacgugaagggcgagcccaucaucaacuucuacgacccgcugguguuccccagcgacgaguucgacgccuccaucagccaggucaacgagaagaucaaccagucccucgccuucauccggaaguccgacgagcugcugcacaacgugaacguggggaaguccaccacgaacaucaugaucaccaccaucaucaucgucaucaucgugauccugcuccugcugaucgccgugggccucuuccuguacugcaaggcccgcagcacccccgucacgcuguccaaggaccagcucagcgggaucaacaacaucgcguucuccaacugaggacuagugaagggaacacccaaauuuaauucagccuuaagcacaauuaauuaagagugaaacguaauuguacaagcaguuggucacccaccauagggcaugaucaacaccgcaaccuuuccuuuuucccccagugauucugaaaaaccccucuucccuucagcuugcuuagauguuccaaauuuaguaagcuuaaggcggccuacagaagaaaaagaaaaaaaaggccacaaaaguucccucucacuuucaguaaauaaaauaaaagcagcaacagaaauaaagaaauaaaugaaauucaaaaugaaauaaauauuguguugugcagcauuaaaaaaucaauaaaaauuaaaaaugagcaagaucuaaaaaaaaaaaaaaaaaaaaaaaaaaaaaaaaaaaaaaaaaaaaaaaaaaaaaaaaaaaaaaaaugcaucccccccccccccccccccccccccccccccaaaggcucuuuucagagccaccagaauu

SEQ ID NO: 12611 - RNA, 2394 nt, Artificial Sequence
  mRNA product Design d-3 comprising derived and/or modified sequence from HRSV(Memphis-37)__AIY60640.1__F0_DSCav1 (opt2)
gggagagggcgcuuggcuugcaaggacccugagcugcggcauugaagcacacccaacccaacucgacugaagucagccucacugaaccggaucugagaaucuucucucucugggcuugccagggcucuccgaaccuagcuagcauccucuucaauuccaacuagaaagcuuaccauggagcuccccauccucaagaccaacgccaucaccaccauccucgccgccgucacccucugcuucgccuccucccagaacaucaccgaggaguucuaccaguccaccugcuccgccgucuccaagggcuaccucuccgcccuccgcaccggcugguacaccuccgucaucaccaucgagcucuccaacaucaaggagaacaagugcaacggcaccgacgccaaggucaagcucaucaagcaggagcucgacaaguacaagaacgccgucaccgagcuccagcuccucaugcaguccacccccgccgccaacaaccgcgcccgccgcgagcucccccgcuucaugaacuacacccucaacaacaccaagaacaacaacgucacccucuccaagaagcgcaagcgccgcuuccucggcuuccuccucggcgucggcuccgccaucgccuccggcaucgccgucugcaagguccuccaccucgagggcgaggucaacaagaucaagaacgcccuccucuccaccaacaaggccgucgucucccucuccaacggcgucuccguccucaccuucaagguccucgaccucaagaacuacaucgacaagcagcuccuccccauccucaacaagcaguccugcuccaucuccaacaucgagaccgucaucgaguuccagcagaagaacaaccgccuccucgagaucacccgcgaguucuccgucaacgccggcgucaccacccccgucuccaccuacaugcucaccaacuccgagcuccucucccucaucaacgacaugcccaucaccaacgaccagaagaagcucauguccaacaacguccagaucguccgccagcaguccuacuccaucaugugcaucaucaaggaggagguccucgccuacgucguccagcucccccucuacggcgucaucgacacccccugcuggaagcuccacaccuccccccucugcaccaccaacaccaaggagggcuccaacaucugccucacccgcaccgaccgcggcugguacugcgacaacgccggcuccgucuccuucuucccccaggccgagaccugcaagguccaguccaaccgcgucuucugcgacaccaugaacucccucacccuccccuccgaggucaaccucugcaacaucgacaucuucaaccccaaguacgacugcaagaucaugaccuccaagaccgacgucuccuccuccgucaucaccucccucggcgccaucgucuccugcuacggcaagaccaagugcaccgccuccaacaagaaccgcggcaucaucaagaccuucuccaacggcugcgacuacgucuccaacaagggcgucgacaccgucuccgucggcaacacccucuacuacgucaacaagcaggagggcaagucccucuacgucaagggcgagcccaucaucaacuucuacgacccccucgucuuccccuccgacgaguucgacgccuccaucucccaggucaacgagaagaucaaccagucccucgccuucauccgcaaguccgacgagcuccuccacaacgucaacgucggcaaguccaccaccaacaucaugaucaccaccaucaucaucgucaucaucgucauccuccuccuccucaucgccgucggccucuuccucuacugcaaggcccgcuccacccccgucacccucuccaaggaccagcucuccggcaucaacaacaucgccuucuccaacugaggacuagugaagggaacacccaaauuuaauucagccuuaagcacaauuaauuaagagugaaacguaauuguacaagcaguuggucacccaccauagggcaugaucaacaccgcaaccuuuccuuuuucccccagugauucugaaaaaccccucuucccuucagcuugcuuagauguuccaaauuuaguaagcuuaaggcggccuacagaagaaaaagaaaaaaaaggccacaaaaguucccucucacuuucaguaaauaaaauaaaagcagcaacagaaauaaagaaauaaaugaaauucaaaaugaaauaaauauuguguugugcagcauuaaaaaaucaauaaaaauuaaaaaugagcaagaucuaaaaaaaaaaaaaaaaaaaaaaaaaaaaaaaaaaaaaaaaaaaaaaaaaaaaaaaaaaaaaaaaugcaucccccccccccccccccccccccccccccccaaaggcucuuuucagagccaccagaauu

SEQ ID NO: 12612 - RNA, 2394 nt, Artificial Sequence
  mRNA product Design d-3 comprising derived and/or modified sequence from HRSV(Memphis-37)__AIY60640.1__F0_DSCav1 (opt3)
gggagagggcgcuuggcuugcaaggacccugagcugcggcauugaagcacacccaacccaacucgacugaagucagccucacugaaccggaucugagaaucuucucucucugggcuugccagggcucuccgaaccuagcuagcauccucuucaauuccaacuagaaagcuuaccauggagcugcccauccucaagaccaacgccauuacaacuauacuugcugcagugacgcugugcuucgccagcucccagaauaucaccgaagaguuuuaccaaucuacauguucagcggucaguaaaggcuauuugagcgcuuuaagaacugggugguacaccuccguuauuacaaucgaacugucuaacauuaaggagaauaaaugcaacggaaccgacgccaaggugaaacuaaucaagcaggaacucgauaaguauaaaaaugcaguaacugagcugcagcuucugaugcagucgaccccugccgcuaacaauagggcacggcgcgaguugccacgauucaugaacuacacacucaauaacacgaagaauaacaaugugacucugagcaaaaagcguaaaagaagguuucuggguuuccucuuaggcgucgggucagccauagcuaguggaaucgccguguguaagguucugcaccuugaaggcgaggugaacaagauuaaaaaugcguugcuguccaccaacaaggcagucgugucucuaagcaacgguguauccguucucacauuuaaagugcuggaccuuaagaauuauaucgauaaacaacuguugccgauucucaacaagcagucaugcaguaucagcaauauagaaacugucauugaguuccagcagaaaaacaaucggcuguuagagaucacccgcgaauuuucugugaacgccggggugacaacccccgucuccacguacaugcugacuaauucagagcuccuuagccugauuaacgacaugccuaucacaaaugaucaaaagaaguugaugaguaacaauguucagaucgugagacagcagucuuauuccauuauguguauaaucaaagaagagguacuagcuuacgugguccaacugccacucuacggagugauugacacccccugcuggaagcugcauacuagcccucuuuguacaaccaacacgaaagaaggcucgaauaucugccugaccaggacagaucggggcugguauugugacaacgccgggucuguuuccuucuuuccacaggcagagacuugcaaggugcagucaaaucgcgucuucugugauaccaugaacaguuugacacuccccagcgaggugaaccugugcaauauagacauuuuuaacccuaaauacgauugcaagaucaugacuuccaagaccgacguaucuagcucaguuaucacaaguuuaggagcuauuguguccuguuaugguaaaaccaagugcacugccagcaauaaaaaccgaggcaucauuaagacguucucuaaugggugugauuacgucucaaacaaaggaguggacacagucagugugggcaauacccuguauuacguuaacaagcaagaagguaagagccuauaugugaaaggggagccaauaaucaauuuuuacgacccgcucguauuccccuccgaugaguucgacgcgucuauuucgcaggucaacgaaaagaucaaucagagccuggccuuuaucagaaaauccgaugaacuuuugcacaacgugaauguuggaaagucaacuaccaacauuaugauaacaaccaucauuaucgugauuaucgucauacugcuccugcuuaucgcagugggccuguucuuguacugcaaagcuaggaguacuccuguaacacucucuaaggaccagcugagcggcauuaauaacaucgccuuuuccaacugaggacuagugaagggaacacccaaauuuaauucagccuuaagcacaauuaauuaagagugaaacguaauuguacaagcaguuggucacccaccauagggcaugaucaacaccgcaaccuuuccuuuuucccccagugauucugaaaaaccccucuucccuucagcuugcuuagauguuccaaauuuaguaagcuuaaggcggccuacagaagaaaaagaaaaaaaaggccacaaaaguucccucucacuuucaguaaauaaaauaaaagcagcaacagaaauaaagaaauaaaugaaauucaaaaugaaauaaauauuguguugugcagcauuaaaaaaucaauaaaaauuaaaaaugagcaagaucuaaaaaaaaaaaaaaaaaaaaaaaaaaaaaaaaaaaaaaaaaaaaaaaaaaaaaaaaaaaaaaaaugcaucccccccccccccccccccccccccccccccaaaggcucuuuucagagccaccagaauu

SEQ ID NO: 12613 - RNA, 2394 nt, Artificial Sequence
  mRNA product Design d-3 comprising derived and/or modified sequence from HRSV(Memphis-37)__AIY60640.1__F0_DSCav1 (opt4)
gggagagggcgcuuggcuugcaaggacccugagcugcggcauugaagcacacccaacccaacucgacugaagucagccucacugaaccggaucugagaaucuucucucucugggcuugccagggcucuccgaaccuagcuagcauccucuucaauuccaacuagaaagcuuaccauggagcugcccauccugaagaccaacgccaucaccaccauccuggccgccgugacccugugcuucgccagcagccagaacaucaccgaggaguucuaccagagcaccugcagcgccgugagcaagggcuaccugagcgcccugagaaccggcugguacaccagcgugaucaccaucgagcugagcaacaucaaggagaacaagugcaacggcaccgacgccaaggugaagcugaucaagcaggagcuggacaaguacaagaacgccgugaccgagcugcagcugcugaugcagagcacccccgccgccaacaacagagccagaagagagcugcccagauucaugaacuacacccugaacaacaccaagaacaacaacgugacccugagcaagaagagaaagagaagauuccugggcuuccugcugggcgugggcagcgccaucgccagcggcaucgccgugugcaaggugcugcaccuggagggcgaggugaacaagaucaagaacgcccugcugagcaccaacaaggccguggugagccugagcaacggcgugagcgugcugaccuucaaggugcuggaccugaagaacuacaucgacaagcagcugcugcccauccugaacaagcagagcugcagcaucagcaacaucgagaccgugaucgaguuccagcagaagaacaacagacugcuggagaucaccagagaguucagcgugaacgccggcgugaccacccccgugagcaccuacaugcugaccaacagcgagcugcugagccugaucaacgacaugcccaucaccaacgaccagaagaagcugaugagcaacaacgugcagaucgugagacagcagagcuacagcaucaugugcaucaucaaggaggaggugcuggccuacguggugcagcugccccuguacggcgugaucgacacccccugcuggaagcugcacaccagcccccugugcaccaccaacaccaaggagggcagcaacaucugccugaccagaaccgacagaggcugguacugcgacaacgccggcagcgugagcuucuucccccaggccgagaccugcaaggugcagagcaacagaguguucugcgacaccaugaacagccugacccugcccagcgaggugaaccugugcaacaucgacaucuucaaccccaaguacgacugcaagaucaugaccagcaagaccgacgugagcagcagcgugaucaccagccugggcgccaucgugagcugcuacggcaagaccaagugcaccgccagcaacaagaacagaggcaucaucaagaccuucagcaacggcugcgacuacgugagcaacaagggcguggacaccgugagcgugggcaacacccuguacuacgugaacaagcaggagggcaagagccuguacgugaagggcgagcccaucaucaacuucuacgacccccugguguuccccagcgacgaguucgacgccagcaucagccaggugaacgagaagaucaaccagagccuggccuucaucagaaagagcgacgagcugcugcacaacgugaacgugggcaagagcaccaccaacaucaugaucaccaccaucaucaucgugaucaucgugauccugcugcugcugaucgccgugggccuguuccuguacugcaaggccagaagcacccccgugacccugagcaaggaccagcugagcggcaucaacaacaucgccuucagcaacugaggacuagugaagggaacacccaaauuuaauucagccuuaagcacaauuaauuaagagugaaacguaauuguacaagcaguuggucacccaccauagggcaugaucaacaccgcaaccuuuccuuuuucccccagugauucugaaaaaccccucuucccuucagcuugcuuagauguuccaaauuuaguaagcuuaaggcggccuacagaagaaaaagaaaaaaaaggccacaaaaguucccucucacuuucaguaaauaaaauaaaagcagcaacagaaauaaagaaauaaaugaaauucaaaaugaaauaaauauuguguugugcagcauuaaaaaaucaauaaaaauuaaaaaugagcaagaucuaaaaaaaaaaaaaaaaaaaaaaaaaaaaaaaaaaaaaaaaaaaaaaaaaaaaaaaaaaaaaaaaugcaucccccccccccccccccccccccccccccccaaaggcucuuuucagagccaccagaauu

SEQ ID NO: 12614 - RNA, 2394 nt, Artificial Sequence
  mRNA product Design d-3 comprising derived and/or modified sequence from HRSV(Memphis-37)__AIY60640.1__F0_DSCav1 (opt5)
gggagagggcgcuuggcuugcaaggacccugagcugcggcauugaagcacacccaacccaacucgacugaagucagccucacugaaccggaucugagaaucuucucucucugggcuugccagggcucuccgaaccuagcuagcauccucuucaauuccaacuagaaagcuuaccauggagcugcccauccucaagaccaacgccauuacaacgauccuggcugccgugacccuuugcuucgcgagcucccagaauauuacagaagaguuuuaccaaucuaccuguagcgcugucuccaaaggcuaucugucugcccucagaacagggugguacaccagcguuaucacaauugaacuguccaacaucaaggagaauaaaugcaacggaaccgacgccaaggugaaacuuaucaagcaggaacuggauaaguauaaaaaugcugugacggagcuccagcugcugaugcagucuaccccugccgcuaacaaucgggcccgcagagagcucccgcgguucaugaacuacacacugaauaacaccaagaauaacaaugucacacuuagcaaaaagcgcaaaagacgguuucugggcuuccuccugggggugggauccgcgauugccagcggcaucgcuguuuguaaggugcuucaccuggaaggggaggucaacaagauuaaaaaugcccuccugucuaccaacaaggcugugguuucccugagcaacggagugucuguccucacguuuaaagugcuggaccuuaagaauuauaucgauaaacaacugcuccccauucugaacaagcaguccugcagcaucucuaauauugaaacagugaucgaguuccagcagaaaaacaaucgccuucuggagaucaccagagaauuuuccgucaacgccggcguuacaaccccugugagcaccuacaugcucacaaauuccgagcugcugucucucauuaacgacaugcccaucacgaaugaucaaaagaagcugaugagcaacaaugugcagauuguccggcagcaguccuauagcaucauguguauuaucaaagaagaggugcuugcguacguugugcaacugccucucuacggcgucaucgacacccccugcuggaagcugcauacaucuccucuuuguaccacaaacaccaaagaaggguccaauauuugccugacgcgcacagauagaggaugguauugugacaacgccggcagcgugucuuucuuuccgcaggcugagaccugcaagguucagagcaaucggguguucugugauaccaugaacucccucacacugcccucugaggucaaccugugcaauaucgacauuuuuaacccuaaauacgauugcaagaucaugaccagcaagacagacguguccagcucugucauuacgucccucggggccaucgugagcuguuauggaaaaaccaagugcacagcuucuaauaaaaaccgcggcaucauuaagaccuucuccaaugggugugauuacguuagcaacaaaggaguggacacagucuccgugggcaauacccuguauuacguuaacaagcaagaaggcaagucucuuuaugugaaaggggagcccaucauuaauuuuuacgacccucuggucuuccccagcgaugaguucgacgccuccaucucucaggugaacgaaaagauuaaucagagccucgccuuuaucagaaaauccgaugaacugcugcacaacgugaauguuggaaagagcacgaccaacauuaugaucacaaccaucauuaucgucauuaucgugauucuucuccugcugaucgcugugggccucuuccuguacugcaaagcgcggucuacaccggucacccuuuccaaggaccagcugagcgggaucaauaacauugccuuuucuaacugaggacuagugaagggaacacccaaauuuaauucagccuuaagcacaauuaauuaagagugaaacguaauuguacaagcaguuggucacccaccauagggcaugaucaacaccgcaaccuuuccuuuuucccccagugauucugaaaaaccccucuucccuucagcuugcuuagauguuccaaauuuaguaagcuuaaggcggccuacagaagaaaaagaaaaaaaaggccacaaaaguucccucucacuuucaguaaauaaaauaaaagcagcaacagaaauaaagaaauaaaugaaauucaaaaugaaauaaauauuguguugugcagcauuaaaaaaucaauaaaaauuaaaaaugagcaagaucuaaaaaaaaaaaaaaaaaaaaaaaaaaaaaaaaaaaaaaaaaaaaaaaaaaaaaaaaaaaaaaaaugcaucccccccccccccccccccccccccccccccaaaggcucuuuucagagccaccagaauu

SEQ ID NO: 12615 - RNA, 2394 nt, Artificial Sequence
  mRNA product Design d-3 comprising derived and/or modified sequence from HRSV(Memphis-37)__AIY60640.1__F0_DSCav1 (opt6)
gggagagggcgcuuggcuugcaaggacccugagcugcggcauugaagcacacccaacccaacucgacugaagucagccucacugaaccggaucugagaaucuucucucucugggcuugccagggcucuccgaaccuagcuagcauccucuucaauuccaacuagaaagcuuaccauggaacucccaauccucaaaaccaaugccauaacaaccauacucgcugcaguaaccuuauguuucgcaaguagccaaaacauaaccgaagaauuuuaucaauccacaugcuccgcaguuucuaaaggauaucuaucagcauuaagaacuggaugguacacaucuguaauaacuauagaacuaagcaauauaaaagaaaacaaauguaacggaacugacgcuaaaguaaaacuuauaaaacaagaacuagauaaauacaaaaacgccguuaccgaacuacaacuauuaaugcaaucaacaccagccgcaaauaacagagcaagacgcgaauuaccaagauucaugaauuacacacuaaacaauacaaaaaauaacaauguaacacuaucaaaaaaaagaaaacgacgauucuuaggcuuccuacuaggagucggcucagcaauagcuuccggaauagccgucuguaaaguccuacaccuugaaggcgaaguaaacaaaaucaaaaacgcacuauuaucaacaaacaaagcagucguaucuuuauccaacggagucucaguccuaacauucaaaguacucgauuuaaaaaacuacaucgauaaacaacuccuucccauucuaaacaaacaauccugcucaauauccaacaucgaaacagucauagaauuucaacaaaaaaacaaccgccugcuagaaauaacaagagaauuuuccguaaaugccggcgucaccacaccaguaucaacauacaugcuaacaaacuccgaacuacucucccuaauaaacgauaugccaaucaccaacgaccaaaaaaaacuaaugucaaauaacguucaaauagucagacaacaaucauacagcauaaugugcauaauaaaagaagaagucuuagccuacguuguacaacucccauuauacggaguuaucgauacaccaugcuggaaauuacacacaucacccuuaugcaccacaaacacaaaagaaggauccaauauuugucuaacacgaacagacagaggaugguacugugauaacgcaggaucagugucauucuuuccacaagcagaaacauguaaaguucaaucuaacagaguauucugcgacaccaugaacucccuaaccuuacccucagaaguaaaucuaugcaacauagauaucuuuaacccaaaauacgacugcaaaaucaugacaucaaaaacugacguuucuucauccguuauaacuucccucggcgcuauaguguccugcuacggaaaaacuaaaugcacagcauccaacaaaaauagaggaauaauaaaaacauuuuccaacggcugcgacuauguuucaaacaaaggaguagauaccguaucagucggcaauacauuauauuauguuaacaaacaagaaggaaaaucccuauacguaaaaggagaaccuauaaucaacuucuacgacccacucguauuccccucagacgaauuugacgcaucuauaucucaaguaaaugaaaaaauaaaccaaucacucgcauuuauccgcaaaucugacgaauuacuccauaacgucaacgucggcaaaucaaccaccaacauaaugauaacaacaauuauaauaguaauaauugucauacuacuacuccuaauagcaguaggucuauuccuauacugcaaagcaagauccacccccguaacccuuuccaaagaucaacucucaggaauaaauaacauagccuuuucaaacuaaggacuagugaagggaacacccaaauuuaauucagccuuaagcacaauuaauuaagagugaaacguaauuguacaagcaguuggucacccaccauagggcaugaucaacaccgcaaccuuuccuuuuucccccagugauucugaaaaaccccucuucccuucagcuugcuuagauguuccaaauuuaguaagcuuaaggcggccuacagaagaaaaagaaaaaaaaggccacaaaaguucccucucacuuucaguaaauaaaauaaaagcagcaacagaaauaaagaaauaaaugaaauucaaaaugaaauaaauauuguguugugcagcauuaaaaaaucaauaaaaauuaaaaaugagcaagaucuaaaaaaaaaaaaaaaaaaaaaaaaaaaaaaaaaaaaaaaaaaaaaaaaaaaaaaaaaaaaaaaaugcaucccccccccccccccccccccccccccccccaaaggcucuuuucagagccaccagaauu

SEQ ID NO: 12616 - RNA, 2394 nt, Artificial Sequence
  mRNA product Design d-3 comprising derived and/or modified sequence from HRSV(Memphis-37)__AIY60640.1__F0_DSCav1 (opt11)
gggagagggcgcuuggcuugcaaggacccugagcugcggcauugaagcacacccaacccaacucgacugaagucagccucacugaaccggaucugagaaucuucucucucugggcuugccagggcucuccgaaccuagcuagcauccucuucaauuccaacuagaaagcuuaccauggaacuccccauacucaagacuaaugccaucaccaccauccucgccgccgugacccucugcuucgcaucgucccaaaacauaacagaagaguucuaccaaagcacaugcuccgcagucuccaaaggauaccucuccgcacuacguaccggcugguacaccagcgucaucaccaucgaacuuuccaacaucaaagagaacaaaugcaacggcaccgacgccaaaguaaaacucauaaaacaagagcuagacaaauacaaaaacgccgucacagaacuccaacuacugaugcaauccacaccggccgccaacaaccgcgcucgacgugaacucccacgcuucaugaacuacacucuuaacaacaccaaaaauaacaacgucacccuauccaaaaagcgaaagcgcagauuccucggcuuccuacuuggcgucggcucggcgauagccucuggaaucgccguuugcaagguccuccaccuagaaggcgaaguaaacaaaaucaaaaacgcacuccuaagcaccaacaaagccgucgucucacuuuccaacggcgucucaguccucacauucaaaguucucgaccuaaagaacuacaucgacaagcaacuacuacccauacucaauaaacaauccugcuccaucagcaacaucgagacagucaucgaauuucaacaaaagaacaaccgccuccucgaaauuacacgcgaguucucagucaacgccggagucaccaccccagucucaacauacaugcucaccaacagcgaacuccugucucuaaucaacgacaugcccaucacuaacgaccagaagaaacucauguccaacaacguccaaaucgugcgacaacaaucauacucuaucaugugcaucaucaaagaagaaguccucgcauacgucguccagcucccacucuacggcguaaucgacacacccugcuggaaacuccacacaucaccccuaugcaccaccaacacaaaagaaggcuccaacaucugccuaacccgaaccgacagagguugguauugcgacaacgccggcucagucucauucuucccacaagccgaaaccuguaaaguccaaucaaaccgcgucuucugcgauaccaugaacucucucacacuccccuccgaagucaaucucugcaacauagacaucuucaauccaaaguacgacugcaaaauaaugaccucgaaaaccgacguaagcuccagcgucaucaccuccuuaggcgcaaucguauccugcuacggcaaaaccaaaugcaccgccucaaacaaaaacagaggcaucaucaaaacguucucgaacggaugcgacuacguuuccaauaaaggcguagauaccgucuccgucggcaacacacucuauuacgucaacaaacaagaaggcaaaucccucuacgucaaaggugaaccuaucaucaacuucuacgacccccucgucuuccccagcgacgaguucgaugccucaaucagccaagucaacgagaaaaucaaccaaucacuggcuuucauacgcaaauccgacgaacuccuccacaacgugaacgucggcaaauccacaaccaacaucaugauaaccacaauaaucaucgucauaaucguaauccuacuccuccuuauugccguaggacuauuccuauacugcaaagcccgauccacccccgucacccucucaaaagaccaacucuccggcaucaacaauauagccuucucuaacuaaggacuagugaagggaacacccaaauuuaauucagccuuaagcacaauuaauuaagagugaaacguaauuguacaagcaguuggucacccaccauagggcaugaucaacaccgcaaccuuuccuuuuucccccagugauucugaaaaaccccucuucccuucagcuugcuuagauguuccaaauuuaguaagcuuaaggcggccuacagaagaaaaagaaaaaaaaggccacaaaaguucccucucacuuucaguaaauaaaauaaaagcagcaacagaaauaaagaaauaaaugaaauucaaaaugaaauaaauauuguguugugcagcauuaaaaaaucaauaaaaauuaaaaaugagcaagaucuaaaaaaaaaaaaaaaaaaaaaaaaaaaaaaaaaaaaaaaaaaaaaaaaaaaaaaaaaaaaaaaaugcaucccccccccccccccccccccccccccccccaaaggcucuuuucagagccaccagaauu

SEQ ID NO: 12617 - RNA, 2077 nt, Artificial Sequence
  mRNA product Design d-4 comprising derived and/or modified sequence from HRSV(Memphis-37)__AIY60640.1__F0_DSCav1 (opt1)
gggagagucccgcagucggcguccagcggcucugcuuguucgugugugugucguugcaggccuuauucaagcuuaccauggagcugcccauccucaagaccaacgccaucaccacgauccuggccgcggugacccugugcuucgccagcucccagaacaucaccgaggaguucuaccagagcacgugcuccgccgucagcaagggcuaccucuccgcccugcgcaccgggugguacaccagcgugaucaccaucgagcuguccaacaucaaggagaacaagugcaacggcaccgacgccaaggugaagcucaucaagcaggagcuggacaaguacaagaacgcggucacggagcugcagcuccugaugcagagcaccccggccgccaacaaccgggcccgccgggagcugccccgcuucaugaacuacacccucaacaacaccaagaacaacaacgugacgcuguccaagaagcggaagcgccgguuccugggguuccuccugggcguggggagcgcgaucgccuccggcaucgccgucugcaaggugcugcaccucgagggcgaggugaacaagaucaagaacgcccugcuguccaccaacaaggccgucgugagccucuccaacggggugagcguccugaccuucaaggugcuggaccucaagaacuacaucgacaagcagcugcugcccauccugaacaagcagagcugcuccaucagcaacaucgagaccgucaucgaguuccagcagaagaacaaccgccuccuggagaucacgcgggaguucagcgugaacgcgggcgugaccacccccgucuccaccuacaugcugacgaacagcgagcuccugucccugaucaacgacaugccgaucaccaacgaccagaagaagcucaugagcaacaacgugcagaucgugcgccagcaguccuacagcaucaugugcaucaucaaggaggagguccuggccuacguggugcagcugccccucuacggggucaucgacacccccugcuggaagcugcacaccagcccccugugcacgaccaacaccaaggagggcuccaacaucugccucacccggacggaccgcgggugguacugcgacaacgccggcagcguguccuucuucccgcaggccgagaccugcaagguccagagcaaccggguguucugcgacaccaugaacucccugacccugcccagcgaggugaaccucugcaacaucgacaucuucaaccccaaguacgacugcaagaucaugacguccaagaccgacgucagcuccagcgugaucaccucccugggcgccaucgugagcugcuacgggaagaccaagugcacggcgagcaacaagaaccgcggcaucaucaagaccuucuccaacgggugcgacuacgucagcaacaagggcguggacaccguguccgucggcaacacccuguacuacgugaacaagcaggagggcaagagccucuacgugaagggggagcccaucaucaacuucuacgacccgcuggucuuccccuccgacgaguucgacgccagcaucucccaggugaacgagaagaucaaccagagccuggccuucauccggaaguccgacgagcuccugcacaacgugaacgucggcaagagcaccacgaacaucaugaucaccaccaucaucaucgugaucaucgugauccugcugcuccugaucgccgucgggcuguuccucuacugcaaggcccgcuccacccccgugacgcugagcaaggaccagcuguccgggaucaacaacaucgcguucagcaacugaggacuaguggaagcauuuuccuggcugauuaaaagaaauuacucagcuauggucaucuguuccuguuagaaggcuaugcagcauauuauauacuaugcgcauguuaugaaaugcauaauaaaaaauuuuaaaaaaucuaaaagaucuaaaaaaaaaaaaaaaaaaaaaaaaaaaaaaaaaaaaaaaaaaaaaaaaaaaaaaaaaaaaaaaaugcaucccccccccccccccccccccccccccccccaaaggcucuuuucagagccaccagaauu

SEQ ID NO: 12618 - RNA, 2077 nt, Artificial Sequence
  mRNA product Design d-4 comprising derived and/or modified sequence from HRSV(Memphis-37)__AIY60640.1__F0_DSCav1 (opt1)
gggagagucccgcagucggcguccagcggcucugcuuguucgugugugugucguugcaggccuuauucaagcuuaccauggagcugcccauccucaagaccaacgccaucaccacgauccuggccgcggugacccugugcuucgccagcucccagaacaucaccgaggaguucuaccagagcacgugcuccgccgucagcaagggcuaccucuccgcccugcgcaccgggugguacaccagcgugaucaccaucgagcuguccaacaucaaggagaacaagugcaacggcaccgacgccaaggugaagcucaucaagcaggagcuggacaaguacaagaacgcggucacggagcugcagcuccugaugcagagcaccccggccgccaacaaccgggcccgccgggagcugccccgcuucaugaacuacacccucaacaacaccaagaacaacaacgugacgcuguccaagaagcggaagcgccgguuccugggguuccuccugggcguggggagcgcgaucgccuccggcaucgccgucugcaaggugcugcaccucgagggcgaggugaacaagaucaagaacgcccugcugagcaccaacaaggccgucgugucccucagcaacgggguguccguccugaccuucaaggugcuggaccucaagaacuacaucgacaagcagcugcugcccauccucaacaagcagagcugcuccaucagcaacaucgagaccgugaucgaguuccagcagaagaacaaccgccugcuggagaucacgcgggaguucuccgucaacgcgggcgugaccacccccgugagcaccuacaugcucacgaacagcgagcugcugucccucaucaacgacaugccgaucaccaacgaccagaagaagcugaugagcaacaacguccagaucgugcgccagcaguccuacagcaucaugugcaucaucaaggaggaggugcuggccuacgucgugcagcucccccuguacggggugaucgacacccccugcuggaagcugcacaccagcccccucugcacgaccaacaccaaggagggcagcaacaucugccugacccggacggaccgcgggugguacugcgacaacgccggcuccgucagcuucuucccgcaggccgagaccugcaaggugcaguccaaccgggucuucugcgacaccaugaacagccugacccuccccuccgaggugaaccugugcaacaucgacaucuucaaccccaaguacgacugcaagaucaugacgagcaagaccgacguguccagcuccgucaucaccagccugggcgccaucguguccugcuacgggaagaccaagugcacggcgagcaacaagaaccgcggcaucaucaagaccuucuccaacgggugcgacuacgugagcaacaagggcgucgacaccgugagcgugggcaacacccucuacuacgucaacaagcaggaggggaagucccuguacgugaagggcgagcccaucaucaacuucuacgacccgcugguguuccccagcgacgaguucgacgccuccaucagccaggucaacgagaagaucaaccagucccucgccuucauccggaaguccgacgagcugcugcacaacgugaacguggggaaguccaccacgaacaucaugaucaccaccaucaucaucgucaucaucgugauccugcuccugcugaucgccgugggccucuuccuguacugcaaggcccgcagcacccccgucacgcuguccaaggaccagcucagcgggaucaacaacaucgcguucuccaacugaggacuaguggaagcauuuuccuggcugauuaaaagaaauuacucagcuauggucaucuguuccuguuagaaggcuaugcagcauauuauauacuaugcgcauguuaugaaaugcauaauaaaaaauuuuaaaaaaucuaaaagaucuaaaaaaaaaaaaaaaaaaaaaaaaaaaaaaaaaaaaaaaaaaaaaaaaaaaaaaaaaaaaaaaaugcaucccccccccccccccccccccccccccccccaaaggcucuuuucagagccaccagaauu

SEQ ID NO: 12619 - RNA, 2077 nt, Artificial Sequence
  mRNA product Design d-4 comprising derived and/or modified sequence from HRSV(Memphis-37)__AIY60640.1__F0_DSCav1 (opt2)
gggagagucccgcagucggcguccagcggcucugcuuguucgugugugugucguugcaggccuuauucaagcuuaccauggagcuccccauccucaagaccaacgccaucaccaccauccucgccgccgucacccucugcuucgccuccucccagaacaucaccgaggaguucuaccaguccaccugcuccgccgucuccaagggcuaccucuccgcccuccgcaccggcugguacaccuccgucaucaccaucgagcucuccaacaucaaggagaacaagugcaacggcaccgacgccaaggucaagcucaucaagcaggagcucgacaaguacaagaacgccgucaccgagcuccagcuccucaugcaguccacccccgccgccaacaaccgcgcccgccgcgagcucccccgcuucaugaacuacacccucaacaacaccaagaacaacaacgucacccucuccaagaagcgcaagcgccgcuuccucggcuuccuccucggcgucggcuccgccaucgccuccggcaucgccgucugcaagguccuccaccucgagggcgaggucaacaagaucaagaacgcccuccucuccaccaacaaggccgucgucucccucuccaacggcgucuccguccucaccuucaagguccucgaccucaagaacuacaucgacaagcagcuccuccccauccucaacaagcaguccugcuccaucuccaacaucgagaccgucaucgaguuccagcagaagaacaaccgccuccucgagaucacccgcgaguucuccgucaacgccggcgucaccacccccgucuccaccuacaugcucaccaacuccgagcuccucucccucaucaacgacaugcccaucaccaacgaccagaagaagcucauguccaacaacguccagaucguccgccagcaguccuacuccaucaugugcaucaucaaggaggagguccucgccuacgucguccagcucccccucuacggcgucaucgacacccccugcuggaagcuccacaccuccccccucugcaccaccaacaccaaggagggcuccaacaucugccucacccgcaccgaccgcggcugguacugcgacaacgccggcuccgucuccuucuucccccaggccgagaccugcaagguccaguccaaccgcgucuucugcgacaccaugaacucccucacccuccccuccgaggucaaccucugcaacaucgacaucuucaaccccaaguacgacugcaagaucaugaccuccaagaccgacgucuccuccuccgucaucaccucccucggcgccaucgucuccugcuacggcaagaccaagugcaccgccuccaacaagaaccgcggcaucaucaagaccuucuccaacggcugcgacuacgucuccaacaagggcgucgacaccgucuccgucggcaacacccucuacuacgucaacaagcaggagggcaagucccucuacgucaagggcgagcccaucaucaacuucuacgacccccucgucuuccccuccgacgaguucgacgccuccaucucccaggucaacgagaagaucaaccagucccucgccuucauccgcaaguccgacgagcuccuccacaacgucaacgucggcaaguccaccaccaacaucaugaucaccaccaucaucaucgucaucaucgucauccuccuccuccucaucgccgucggccucuuccucuacugcaaggcccgcuccacccccgucacccucuccaaggaccagcucuccggcaucaacaacaucgccuucuccaacugaggacuaguggaagcauuuuccuggcugauuaaaagaaauuacucagcuauggucaucuguuccuguuagaaggcuaugcagcauauuauauacuaugcgcauguuaugaaaugcauaauaaaaaauuuuaaaaaaucuaaaagaucuaaaaaaaaaaaaaaaaaaaaaaaaaaaaaaaaaaaaaaaaaaaaaaaaaaaaaaaaaaaaaaaaugcaucccccccccccccccccccccccccccccccaaaggcucuuuucagagccaccagaauu

SEQ ID NO: 12620 - RNA, 2077 nt, Artificial Sequence
  mRNA product Design d-4 comprising derived and/or modified sequence from HRSV(Memphis-37)__AIY60640.1__F0_DSCav1 (opt3)
gggagagucccgcagucggcguccagcggcucugcuuguucgugugugugucguugcaggccuuauucaagcuuaccauggagcugcccauccucaagaccaacgccauuacaacuauacuugcugcagugacgcugugcuucgccagcucccagaauaucaccgaagaguuuuaccaaucuacauguucagcggucaguaaaggcuauuugagcgcuuuaagaacugggugguacaccuccguuauuacaaucgaacugucuaacauuaaggagaauaaaugcaacggaaccgacgccaaggugaaacuaaucaagcaggaacucgauaaguauaaaaaugcaguaacugagcugcagcuucugaugcagucgaccccugccgcuaacaauagggcacggcgcgaguugccacgauucaugaacuacacacucaauaacacgaagaauaacaaugugacucugagcaaaaagcguaaaagaagguuucuggguuuccucuuaggcgucgggucagccauagcuaguggaaucgccguguguaagguucugcaccuugaaggcgaggugaacaagauuaaaaaugcguugcuguccaccaacaaggcagucgugucucuaagcaacgguguauccguucucacauuuaaagugcuggaccuuaagaauuauaucgauaaacaacuguugccgauucucaacaagcagucaugcaguaucagcaauauagaaacugucauugaguuccagcagaaaaacaaucggcuguuagagaucacccgcgaauuuucugugaacgccggggugacaacccccgucuccacguacaugcugacuaauucagagcuccuuagccugauuaacgacaugccuaucacaaaugaucaaaagaaguugaugaguaacaauguucagaucgugagacagcagucuuauuccauuauguguauaaucaaagaagagguacuagcuuacgugguccaacugccacucuacggagugauugacacccccugcuggaagcugcauacuagcccucuuuguacaaccaacacgaaagaaggcucgaauaucugccugaccaggacagaucggggcugguauugugacaacgccgggucuguuuccuucuuuccacaggcagagacuugcaaggugcagucaaaucgcgucuucugugauaccaugaacaguuugacacuccccagcgaggugaaccugugcaauauagacauuuuuaacccuaaauacgauugcaagaucaugacuuccaagaccgacguaucuagcucaguuaucacaaguuuaggagcuauuguguccuguuaugguaaaaccaagugcacugccagcaauaaaaaccgaggcaucauuaagacguucucuaaugggugugauuacgucucaaacaaaggaguggacacagucagugugggcaauacccuguauuacguuaacaagcaagaagguaagagccuauaugugaaaggggagccaauaaucaauuuuuacgacccgcucguauuccccuccgaugaguucgacgcgucuauuucgcaggucaacgaaaagaucaaucagagccuggccuuuaucagaaaauccgaugaacuuuugcacaacgugaauguuggaaagucaacuaccaacauuaugauaacaaccaucauuaucgugauuaucgucauacugcuccugcuuaucgcagugggccuguucuuguacugcaaagcuaggaguacuccuguaacacucucuaaggaccagcugagcggcauuaauaacaucgccuuuuccaacugaggacuaguggaagcauuuuccuggcugauuaaaagaaauuacucagcuauggucaucuguuccuguuagaaggcuaugcagcauauuauauacuaugcgcauguuaugaaaugcauaauaaaaaauuuuaaaaaaucuaaaagaucuaaaaaaaaaaaaaaaaaaaaaaaaaaaaaaaaaaaaaaaaaaaaaaaaaaaaaaaaaaaaaaaaugcaucccccccccccccccccccccccccccccccaaaggcucuuuucagagccaccagaauu

SEQ ID NO: 12621 - RNA, 2077 nt, Artificial Sequence
  mRNA product Design d-4 comprising derived and/or modified sequence from HRSV(Memphis-37)__AIY60640.1__F0_DSCav1 (opt4)
gggagagucccgcagucggcguccagcggcucugcuuguucgugugugugucguugcaggccuuauucaagcuuaccauggagcugcccauccugaagaccaacgccaucaccaccauccuggccgccgugacccugugcuucgccagcagccagaacaucaccgaggaguucuaccagagcaccugcagcgccgugagcaagggcuaccugagcgcccugagaaccggcugguacaccagcgugaucaccaucgagcugagcaacaucaaggagaacaagugcaacggcaccgacgccaaggugaagcugaucaagcaggagcuggacaaguacaagaacgccgugaccgagcugcagcugcugaugcagagcacccccgccgccaacaacagagccagaagagagcugcccagauucaugaacuacacccugaacaacaccaagaacaacaacgugacccugagcaagaagagaaagagaagauuccugggcuuccugcugggcgugggcagcgccaucgccagcggcaucgccgugugcaaggugcugcaccuggagggcgaggugaacaagaucaagaacgcccugcugagcaccaacaaggccguggugagccugagcaacggcgugagcgugcugaccuucaaggugcuggaccugaagaacuacaucgacaagcagcugcugcccauccugaacaagcagagcugcagcaucagcaacaucgagaccgugaucgaguuccagcagaagaacaacagacugcuggagaucaccagagaguucagcgugaacgccggcgugaccacccccgugagcaccuacaugcugaccaacagcgagcugcugagccugaucaacgacaugcccaucaccaacgaccagaagaagcugaugagcaacaacgugcagaucgugagacagcagagcuacagcaucaugugcaucaucaaggaggaggugcuggccuacguggugcagcugccccuguacggcgugaucgacacccccugcuggaagcugcacaccagcccccugugcaccaccaacaccaaggagggcagcaacaucugccugaccagaaccgacagaggcugguacugcgacaacgccggcagcgugagcuucuucccccaggccgagaccugcaaggugcagagcaacagaguguucugcgacaccaugaacagccugacccugcccagcgaggugaaccugugcaacaucgacaucuucaaccccaaguacgacugcaagaucaugaccagcaagaccgacgugagcagcagcgugaucaccagccugggcgccaucgugagcugcuacggcaagaccaagugcaccgccagcaacaagaacagaggcaucaucaagaccuucagcaacggcugcgacuacgugagcaacaagggcguggacaccgugagcgugggcaacacccuguacuacgugaacaagcaggagggcaagagccuguacgugaagggcgagcccaucaucaacuucuacgacccccugguguuccccagcgacgaguucgacgccagcaucagccaggugaacgagaagaucaaccagagccuggccuucaucagaaagagcgacgagcugcugcacaacgugaacgugggcaagagcaccaccaacaucaugaucaccaccaucaucaucgugaucaucgugauccugcugcugcugaucgccgugggccuguuccuguacugcaaggccagaagcacccccgugacccugagcaaggaccagcugagcggcaucaacaacaucgccuucagcaacugaggacuaguggaagcauuuuccuggcugauuaaaagaaauuacucagcuauggucaucuguuccuguuagaaggcuaugcagcauauuauauacuaugcgcauguuaugaaaugcauaauaaaaaauuuuaaaaaaucuaaaagaucuaaaaaaaaaaaaaaaaaaaaaaaaaaaaaaaaaaaaaaaaaaaaaaaaaaaaaaaaaaaaaaaaugcaucccccccccccccccccccccccccccccccaaaggcucuuuucagagccaccagaauu

SEQ ID NO: 12622 - RNA, 2077 nt, Artificial Sequence
  mRNA product Design d-4 comprising derived and/or modified sequence from HRSV(Memphis-37)__AIY60640.1__F0_DSCav1 (opt5)
gggagagucccgcagucggcguccagcggcucugcuuguucgugugugugucguugcaggccuuauucaagcuuaccauggagcugcccauccucaagaccaacgccauuacaacgauccuggcugccgugacccuuugcuucgcgagcucccagaauauuacagaagaguuuuaccaaucuaccuguagcgcugucuccaaaggcuaucugucugcccucagaacagggugguacaccagcguuaucacaauugaacuguccaacaucaaggagaauaaaugcaacggaaccgacgccaaggugaaacuuaucaagcaggaacuggauaaguauaaaaaugcugugacggagcuccagcugcugaugcagucuaccccugccgcuaacaaucgggcccgcagagagcucccgcgguucaugaacuacacacugaauaacaccaagaauaacaaugucacacuuagcaaaaagcgcaaaagacgguuucugggcuuccuccugggggugggauccgcgauugccagcggcaucgcuguuuguaaggugcuucaccuggaaggggaggucaacaagauuaaaaaugcccuccugucuaccaacaaggcugugguuucccugagcaacggagugucuguccucacguuuaaagugcuggaccuuaagaauuauaucgauaaacaacugcuccccauucugaacaagcaguccugcagcaucucuaauauugaaacagugaucgaguuccagcagaaaaacaaucgccuucuggagaucaccagagaauuuuccgucaacgccggcguuacaaccccugugagcaccuacaugcucacaaauuccgagcugcugucucucauuaacgacaugcccaucacgaaugaucaaaagaagcugaugagcaacaaugugcagauuguccggcagcaguccuauagcaucauguguauuaucaaagaagaggugcuugcguacguugugcaacugccucucuacggcgucaucgacacccccugcuggaagcugcauacaucuccucuuuguaccacaaacaccaaagaaggguccaauauuugccugacgcgcacagauagaggaugguauugugacaacgccggcagcgugucuuucuuuccgcaggcugagaccugcaagguucagagcaaucggguguucugugauaccaugaacucccucacacugcccucugaggucaaccugugcaauaucgacauuuuuaacccuaaauacgauugcaagaucaugaccagcaagacagacguguccagcucugucauuacgucccucggggccaucgugagcuguuauggaaaaaccaagugcacagcuucuaauaaaaaccgcggcaucauuaagaccuucuccaaugggugugauuacguuagcaacaaaggaguggacacagucuccgugggcaauacccuguauuacguuaacaagcaagaaggcaagucucuuuaugugaaaggggagcccaucauuaauuuuuacgacccucuggucuuccccagcgaugaguucgacgccuccaucucucaggugaacgaaaagauuaaucagagccucgccuuuaucagaaaauccgaugaacugcugcacaacgugaauguuggaaagagcacgaccaacauuaugaucacaaccaucauuaucgucauuaucgugauucuucuccugcugaucgcugugggccucuuccuguacugcaaagcgcggucuacaccggucacccuuuccaaggaccagcugagcgggaucaauaacauugccuuuucuaacugaggacuaguggaagcauuuuccuggcugauuaaaagaaauuacucagcuauggucaucuguuccuguuagaaggcuaugcagcauauuauauacuaugcgcauguuaugaaaugcauaauaaaaaauuuuaaaaaaucuaaaagaucuaaaaaaaaaaaaaaaaaaaaaaaaaaaaaaaaaaaaaaaaaaaaaaaaaaaaaaaaaaaaaaaaugcaucccccccccccccccccccccccccccccccaaaggcucuuuucagagccaccagaauu

SEQ ID NO: 12623 - RNA, 2077 nt, Artificial Sequence
  mRNA product Design d-4 comprising derived and/or modified sequence from HRSV(Memphis-37)__AIY60640.1__F0_DSCav1 (opt6)
gggagagucccgcagucggcguccagcggcucugcuuguucgugugugugucguugcaggccuuauucaagcuuaccauggaacucccaauccucaaaaccaaugccauaacaaccauacucgcugcaguaaccuuauguuucgcaaguagccaaaacauaaccgaagaauuuuaucaauccacaugcuccgcaguuucuaaaggauaucuaucagcauuaagaacuggaugguacacaucuguaauaacuauagaacuaagcaauauaaaagaaaacaaauguaacggaacugacgcuaaaguaaaacuuauaaaacaagaacuagauaaauacaaaaacgccguuaccgaacuacaacuauuaaugcaaucaacaccagccgcaaauaacagagcaagacgcgaauuaccaagauucaugaauuacacacuaaacaauacaaaaaauaacaauguaacacuaucaaaaaaaagaaaacgacgauucuuaggcuuccuacuaggagucggcucagcaauagcuuccggaauagccgucuguaaaguccuacaccuugaaggcgaaguaaacaaaaucaaaaacgcacuauuaucaacaaacaaagcagucguaucuuuauccaacggagucucaguccuaacauucaaaguacucgauuuaaaaaacuacaucgauaaacaacuccuucccauucuaaacaaacaauccugcucaauauccaacaucgaaacagucauagaauuucaacaaaaaaacaaccgccugcuagaaauaacaagagaauuuuccguaaaugccggcgucaccacaccaguaucaacauacaugcuaacaaacuccgaacuacucucccuaauaaacgauaugccaaucaccaacgaccaaaaaaaacuaaugucaaauaacguucaaauagucagacaacaaucauacagcauaaugugcauaauaaaagaagaagucuuagccuacguuguacaacucccauuauacggaguuaucgauacaccaugcuggaaauuacacacaucacccuuaugcaccacaaacacaaaagaaggauccaauauuugucuaacacgaacagacagaggaugguacugugauaacgcaggaucagugucauucuuuccacaagcagaaacauguaaaguucaaucuaacagaguauucugcgacaccaugaacucccuaaccuuacccucagaaguaaaucuaugcaacauagauaucuuuaacccaaaauacgacugcaaaaucaugacaucaaaaacugacguuucuucauccguuauaacuucccucggcgcuauaguguccugcuacggaaaaacuaaaugcacagcauccaacaaaaauagaggaauaauaaaaacauuuuccaacggcugcgacuauguuucaaacaaaggaguagauaccguaucagucggcaauacauuauauuauguuaacaaacaagaaggaaaaucccuauacguaaaaggagaaccuauaaucaacuucuacgacccacucguauuccccucagacgaauuugacgcaucuauaucucaaguaaaugaaaaaauaaaccaaucacucgcauuuauccgcaaaucugacgaauuacuccauaacgucaacgucggcaaaucaaccaccaacauaaugauaacaacaauuauaauaguaauaauugucauacuacuacuccuaauagcaguaggucuauuccuauacugcaaagcaagauccacccccguaacccuuuccaaagaucaacucucaggaauaaauaacauagccuuuucaaacuaaggacuaguggaagcauuuuccuggcugauuaaaagaaauuacucagcuauggucaucuguuccuguuagaaggcuaugcagcauauuauauacuaugcgcauguuaugaaaugcauaauaaaaaauuuuaaaaaaucuaaaagaucuaaaaaaaaaaaaaaaaaaaaaaaaaaaaaaaaaaaaaaaaaaaaaaaaaaaaaaaaaaaaaaaaugcaucccccccccccccccccccccccccccccccaaaggcucuuuucagagccaccagaauu

SEQ ID NO: 12624 - RNA, 2077 nt, Artificial Sequence
  mRNA product Design d-4 comprising derived and/or modified sequence from HRSV(Memphis-37)__AIY60640.1__F0_DSCav1 (opt11)
gggagagucccgcagucggcguccagcggcucugcuuguucgugugugugucguugcaggccuuauucaagcuuaccauggaacuccccauacucaagacuaaugccaucaccaccauccucgccgccgugacccucugcuucgcaucgucccaaaacauaacagaagaguucuaccaaagcacaugcuccgcagucuccaaaggauaccucuccgcacuacguaccggcugguacaccagcgucaucaccaucgaacuuuccaacaucaaagagaacaaaugcaacggcaccgacgccaaaguaaaacucauaaaacaagagcuagacaaauacaaaaacgccgucacagaacuccaacuacugaugcaauccacaccggccgccaacaaccgcgcucgacgugaacucccacgcuucaugaacuacacucuuaacaacaccaaaaauaacaacgucacccuauccaaaaagcgaaagcgcagauuccucggcuuccuacuuggcgucggcucggcgauagccucuggaaucgccguuugcaagguccuccaccuagaaggcgaaguaaacaaaaucaaaaacgcacuccuaagcaccaacaaagccgucgucucacuuuccaacggcgucucaguccucacauucaaaguucucgaccuaaagaacuacaucgacaagcaacuacuacccauacucaauaaacaauccugcuccaucagcaacaucgagacagucaucgaauuucaacaaaagaacaaccgccuccucgaaauuacacgcgaguucucagucaacgccggagucaccaccccagucucaacauacaugcucaccaacagcgaacuccugucucuaaucaacgacaugcccaucacuaacgaccagaagaaacucauguccaacaacguccaaaucgugcgacaacaaucauacucuaucaugugcaucaucaaagaagaaguccucgcauacgucguccagcucccacucuacggcguaaucgacacacccugcuggaaacuccacacaucaccccuaugcaccaccaacacaaaagaaggcuccaacaucugccuaacccgaaccgacagagguugguauugcgacaacgccggcucagucucauucuucccacaagccgaaaccuguaaaguccaaucaaaccgcgucuucugcgauaccaugaacucucucacacuccccuccgaagucaaucucugcaacauagacaucuucaauccaaaguacgacugcaaaauaaugaccucgaaaaccgacguaagcuccagcgucaucaccuccuuaggcgcaaucguauccugcuacggcaaaaccaaaugcaccgccucaaacaaaaacagaggcaucaucaaaacguucucgaacggaugcgacuacguuuccaauaaaggcguagauaccgucuccgucggcaacacacucuauuacgucaacaaacaagaaggcaaaucccucuacgucaaaggugaaccuaucaucaacuucuacgacccccucgucuuccccagcgacgaguucgaugccucaaucagccaagucaacgagaaaaucaaccaaucacuggcuuucauacgcaaauccgacgaacuccuccacaacgugaacgucggcaaauccacaaccaacaucaugauaaccacaauaaucaucgucauaaucguaauccuacuccuccuuauugccguaggacuauuccuauacugcaaagcccgauccacccccgucacccucucaaaagaccaacucuccggcaucaacaauauagccuucucuaacuaaggacuaguggaagcauuuuccuggcugauuaaaagaaauuacucagcuauggucaucuguuccuguuagaaggcuaugcagcauauuauauacuaugcgcauguuaugaaaugcauaauaaaaaauuuuaaaaaaucuaaaagaucuaaaaaaaaaaaaaaaaaaaaaaaaaaaaaaaaaaaaaaaaaaaaaaaaaaaaaaaaaaaaaaaaugcaucccccccccccccccccccccccccccccccaaaggcucuuuucagagccaccagaauu

SEQ ID NO: 12625 - RNA, 2174 nt, Artificial Sequence
  mRNA product Design d-5 comprising derived and/or modified sequence from HRSV(Memphis-37)__AIY60640.1__F0_DSCav1 (opt1)
gggagagggcgcuuggcuugcaaggacccugagcugcggcauugaagcacacccaacccaacucgacugaagucagccucacugaaccggaucugagaaucuucucucucugggcuugccagggcucuccgaaccuagcuagcauccucuucaauuccaacuagaaagcuuaccauggagcugcccauccucaagaccaacgccaucaccacgauccuggccgcggugacccugugcuucgccagcucccagaacaucaccgaggaguucuaccagagcacgugcuccgccgucagcaagggcuaccucuccgcccugcgcaccgggugguacaccagcgugaucaccaucgagcuguccaacaucaaggagaacaagugcaacggcaccgacgccaaggugaagcucaucaagcaggagcuggacaaguacaagaacgcggucacggagcugcagcuccugaugcagagcaccccggccgccaacaaccgggcccgccgggagcugccccgcuucaugaacuacacccucaacaacaccaagaacaacaacgugacgcuguccaagaagcggaagcgccgguuccugggguuccuccugggcguggggagcgcgaucgccuccggcaucgccgucugcaaggugcugcaccucgagggcgaggugaacaagaucaagaacgcccugcuguccaccaacaaggccgucgugagccucuccaacggggugagcguccugaccuucaaggugcuggaccucaagaacuacaucgacaagcagcugcugcccauccugaacaagcagagcugcuccaucagcaacaucgagaccgucaucgaguuccagcagaagaacaaccgccuccuggagaucacgcgggaguucagcgugaacgcgggcgugaccacccccgucuccaccuacaugcugacgaacagcgagcuccugucccugaucaacgacaugccgaucaccaacgaccagaagaagcucaugagcaacaacgugcagaucgugcgccagcaguccuacagcaucaugugcaucaucaaggaggagguccuggccuacguggugcagcugccccucuacggggucaucgacacccccugcuggaagcugcacaccagcccccugugcacgaccaacaccaaggagggcuccaacaucugccucacccggacggaccgcgggugguacugcgacaacgccggcagcguguccuucuucccgcaggccgagaccugcaagguccagagcaaccggguguucugcgacaccaugaacucccugacccugcccagcgaggugaaccucugcaacaucgacaucuucaaccccaaguacgacugcaagaucaugacguccaagaccgacgucagcuccagcgugaucaccucccugggcgccaucgugagcugcuacgggaagaccaagugcacggcgagcaacaagaaccgcggcaucaucaagaccuucuccaacgggugcgacuacgucagcaacaagggcguggacaccguguccgucggcaacacccuguacuacgugaacaagcaggagggcaagagccucuacgugaagggggagcccaucaucaacuucuacgacccgcuggucuuccccuccgacgaguucgacgccagcaucucccaggugaacgagaagaucaaccagagccuggccuucauccggaaguccgacgagcuccugcacaacgugaacgucggcaagagcaccacgaacaucaugaucaccaccaucaucaucgugaucaucgugauccugcugcuccugaucgccgucgggcuguuccucuacugcaaggcccgcuccacccccgugacgcugagcaaggaccagcuguccgggaucaacaacaucgcguucagcaacugaggacuaguggaagcauuuuccuggcugauuaaaagaaauuacucagcuauggucaucuguuccuguuagaaggcuaugcagcauauuauauacuaugcgcauguuaugaaaugcauaauaaaaaauuuuaaaaaaucuaaaagaucuaaaaaaaaaaaaaaaaaaaaaaaaaaaaaaaaaaaaaaaaaaaaaaaaaaaaaaaaaaaaaaaaugcaucccccccccccccccccccccccccccccccaaaggcucuuuucagagccaccagaauu

SEQ ID NO: 12626 - RNA, 2174 nt, Artificial Sequence
  mRNA product Design d-5 comprising derived and/or modified sequence from HRSV(Memphis-37)__AIY60640.1__F0_DSCav1 (opt1)
gggagagggcgcuuggcuugcaaggacccugagcugcggcauugaagcacacccaacccaacucgacugaagucagccucacugaaccggaucugagaaucuucucucucugggcuugccagggcucuccgaaccuagcuagcauccucuucaauuccaacuagaaagcuuaccauggagcugcccauccucaagaccaacgccaucaccacgauccuggccgcggugacccugugcuucgccagcucccagaacaucaccgaggaguucuaccagagcacgugcuccgccgucagcaagggcuaccucuccgcccugcgcaccgggugguacaccagcgugaucaccaucgagcuguccaacaucaaggagaacaagugcaacggcaccgacgccaaggugaagcucaucaagcaggagcuggacaaguacaagaacgcggucacggagcugcagcuccugaugcagagcaccccggccgccaacaaccgggcccgccgggagcugccccgcuucaugaacuacacccucaacaacaccaagaacaacaacgugacgcuguccaagaagcggaagcgccgguuccugggguuccuccugggcguggggagcgcgaucgccuccggcaucgccgucugcaaggugcugcaccucgagggcgaggugaacaagaucaagaacgcccugcugagcaccaacaaggccgucgugucccucagcaacgggguguccguccugaccuucaaggugcuggaccucaagaacuacaucgacaagcagcugcugcccauccucaacaagcagagcugcuccaucagcaacaucgagaccgugaucgaguuccagcagaagaacaaccgccugcuggagaucacgcgggaguucuccgucaacgcgggcgugaccacccccgugagcaccuacaugcucacgaacagcgagcugcugucccucaucaacgacaugccgaucaccaacgaccagaagaagcugaugagcaacaacguccagaucgugcgccagcaguccuacagcaucaugugcaucaucaaggaggaggugcuggccuacgucgugcagcucccccuguacggggugaucgacacccccugcuggaagcugcacaccagcccccucugcacgaccaacaccaaggagggcagcaacaucugccugacccggacggaccgcgggugguacugcgacaacgccggcuccgucagcuucuucccgcaggccgagaccugcaaggugcaguccaaccgggucuucugcgacaccaugaacagccugacccuccccuccgaggugaaccugugcaacaucgacaucuucaaccccaaguacgacugcaagaucaugacgagcaagaccgacguguccagcuccgucaucaccagccugggcgccaucguguccugcuacgggaagaccaagugcacggcgagcaacaagaaccgcggcaucaucaagaccuucuccaacgggugcgacuacgugagcaacaagggcgucgacaccgugagcgugggcaacacccucuacuacgucaacaagcaggaggggaagucccuguacgugaagggcgagcccaucaucaacuucuacgacccgcugguguuccccagcgacgaguucgacgccuccaucagccaggucaacgagaagaucaaccagucccucgccuucauccggaaguccgacgagcugcugcacaacgugaacguggggaaguccaccacgaacaucaugaucaccaccaucaucaucgucaucaucgugauccugcuccugcugaucgccgugggccucuuccuguacugcaaggcccgcagcacccccgucacgcuguccaaggaccagcucagcgggaucaacaacaucgcguucuccaacugaggacuaguggaagcauuuuccuggcugauuaaaagaaauuacucagcuauggucaucuguuccuguuagaaggcuaugcagcauauuauauacuaugcgcauguuaugaaaugcauaauaaaaaauuuuaaaaaaucuaaaagaucuaaaaaaaaaaaaaaaaaaaaaaaaaaaaaaaaaaaaaaaaaaaaaaaaaaaaaaaaaaaaaaaaugcaucccccccccccccccccccccccccccccccaaaggcucuuuucagagccaccagaauu

SEQ ID NO: 12627 - RNA, 2174 nt, Artificial Sequence
  mRNA product Design d-5 comprising derived and/or modified sequence from HRSV(Memphis-37)__AIY60640.1__F0_DSCav1 (opt2)
gggagagggcgcuuggcuugcaaggacccugagcugcggcauugaagcacacccaacccaacucgacugaagucagccucacugaaccggaucugagaaucuucucucucugggcuugccagggcucuccgaaccuagcuagcauccucuucaauuccaacuagaaagcuuaccauggagcuccccauccucaagaccaacgccaucaccaccauccucgccgccgucacccucugcuucgccuccucccagaacaucaccgaggaguucuaccaguccaccugcuccgccgucuccaagggcuaccucuccgcccuccgcaccggcugguacaccuccgucaucaccaucgagcucuccaacaucaaggagaacaagugcaacggcaccgacgccaaggucaagcucaucaagcaggagcucgacaaguacaagaacgccgucaccgagcuccagcuccucaugcaguccacccccgccgccaacaaccgcgcccgccgcgagcucccccgcuucaugaacuacacccucaacaacaccaagaacaacaacgucacccucuccaagaagcgcaagcgccgcuuccucggcuuccuccucggcgucggcuccgccaucgccuccggcaucgccgucugcaagguccuccaccucgagggcgaggucaacaagaucaagaacgcccuccucuccaccaacaaggccgucgucucccucuccaacggcgucuccguccucaccuucaagguccucgaccucaagaacuacaucgacaagcagcuccuccccauccucaacaagcaguccugcuccaucuccaacaucgagaccgucaucgaguuccagcagaagaacaaccgccuccucgagaucacccgcgaguucuccgucaacgccggcgucaccacccccgucuccaccuacaugcucaccaacuccgagcuccucucccucaucaacgacaugcccaucaccaacgaccagaagaagcucauguccaacaacguccagaucguccgccagcaguccuacuccaucaugugcaucaucaaggaggagguccucgccuacgucguccagcucccccucuacggcgucaucgacacccccugcuggaagcuccacaccuccccccucugcaccaccaacaccaaggagggcuccaacaucugccucacccgcaccgaccgcggcugguacugcgacaacgccggcuccgucuccuucuucccccaggccgagaccugcaagguccaguccaaccgcgucuucugcgacaccaugaacucccucacccuccccuccgaggucaaccucugcaacaucgacaucuucaaccccaaguacgacugcaagaucaugaccuccaagaccgacgucuccuccuccgucaucaccucccucggcgccaucgucuccugcuacggcaagaccaagugcaccgccuccaacaagaaccgcggcaucaucaagaccuucuccaacggcugcgacuacgucuccaacaagggcgucgacaccgucuccgucggcaacacccucuacuacgucaacaagcaggagggcaagucccucuacgucaagggcgagcccaucaucaacuucuacgacccccucgucuuccccuccgacgaguucgacgccuccaucucccaggucaacgagaagaucaaccagucccucgccuucauccgcaaguccgacgagcuccuccacaacgucaacgucggcaaguccaccaccaacaucaugaucaccaccaucaucaucgucaucaucgucauccuccuccuccucaucgccgucggccucuuccucuacugcaaggcccgcuccacccccgucacccucuccaaggaccagcucuccggcaucaacaacaucgccuucuccaacugaggacuaguggaagcauuuuccuggcugauuaaaagaaauuacucagcuauggucaucuguuccuguuagaaggcuaugcagcauauuauauacuaugcgcauguuaugaaaugcauaauaaaaaauuuuaaaaaaucuaaaagaucuaaaaaaaaaaaaaaaaaaaaaaaaaaaaaaaaaaaaaaaaaaaaaaaaaaaaaaaaaaaaaaaaugcaucccccccccccccccccccccccccccccccaaaggcucuuuucagagccaccagaauu

SEQ ID NO: 12628 - RNA, 2174 nt, Artificial Sequence
  mRNA product Design d-5 comprising derived and/or modified sequence from HRSV(Memphis-37)__AIY60640.1__F0_DSCav1 (opt3)
gggagagggcgcuuggcuugcaaggacccugagcugcggcauugaagcacacccaacccaacucgacugaagucagccucacugaaccggaucugagaaucuucucucucugggcuugccagggcucuccgaaccuagcuagcauccucuucaauuccaacuagaaagcuuaccauggagcugcccauccucaagaccaacgccauuacaacuauacuugcugcagugacgcugugcuucgccagcucccagaauaucaccgaagaguuuuaccaaucuacauguucagcggucaguaaaggcuauuugagcgcuuuaagaacugggugguacaccuccguuauuacaaucgaacugucuaacauuaaggagaauaaaugcaacggaaccgacgccaaggugaaacuaaucaagcaggaacucgauaaguauaaaaaugcaguaacugagcugcagcuucugaugcagucgaccccugccgcuaacaauagggcacggcgcgaguugccacgauucaugaacuacacacucaauaacacgaagaauaacaaugugacucugagcaaaaagcguaaaagaagguuucuggguuuccucuuaggcgucgggucagccauagcuaguggaaucgccguguguaagguucugcaccuugaaggcgaggugaacaagauuaaaaaugcguugcuguccaccaacaaggcagucgugucucuaagcaacgguguauccguucucacauuuaaagugcuggaccuuaagaauuauaucgauaaacaacuguugccgauucucaacaagcagucaugcaguaucagcaauauagaaacugucauugaguuccagcagaaaaacaaucggcuguuagagaucacccgcgaauuuucugugaacgccggggugacaacccccgucuccacguacaugcugacuaauucagagcuccuuagccugauuaacgacaugccuaucacaaaugaucaaaagaaguugaugaguaacaauguucagaucgugagacagcagucuuauuccauuauguguauaaucaaagaagagguacuagcuuacgugguccaacugccacucuacggagugauugacacccccugcuggaagcugcauacuagcccucuuuguacaaccaacacgaaagaaggcucgaauaucugccugaccaggacagaucggggcugguauugugacaacgccgggucuguuuccuucuuuccacaggcagagacuugcaaggugcagucaaaucgcgucuucugugauaccaugaacaguuugacacuccccagcgaggugaaccugugcaauauagacauuuuuaacccuaaauacgauugcaagaucaugacuuccaagaccgacguaucuagcucaguuaucacaaguuuaggagcuauuguguccuguuaugguaaaaccaagugcacugccagcaauaaaaaccgaggcaucauuaagacguucucuaaugggugugauuacgucucaaacaaaggaguggacacagucagugugggcaauacccuguauuacguuaacaagcaagaagguaagagccuauaugugaaaggggagccaauaaucaauuuuuacgacccgcucguauuccccuccgaugaguucgacgcgucuauuucgcaggucaacgaaaagaucaaucagagccuggccuuuaucagaaaauccgaugaacuuuugcacaacgugaauguuggaaagucaacuaccaacauuaugauaacaaccaucauuaucgugauuaucgucauacugcuccugcuuaucgcagugggccuguucuuguacugcaaagcuaggaguacuccuguaacacucucuaaggaccagcugagcggcauuaauaacaucgccuuuuccaacugaggacuaguggaagcauuuuccuggcugauuaaaagaaauuacucagcuauggucaucuguuccuguuagaaggcuaugcagcauauuauauacuaugcgcauguuaugaaaugcauaauaaaaaauuuuaaaaaaucuaaaagaucuaaaaaaaaaaaaaaaaaaaaaaaaaaaaaaaaaaaaaaaaaaaaaaaaaaaaaaaaaaaaaaaaugcaucccccccccccccccccccccccccccccccaaaggcucuuuucagagccaccagaauu

SEQ ID NO: 12629 - RNA, 2174 nt, Artificial Sequence
  mRNA product Design d-5 comprising derived and/or modified sequence from HRSV(Memphis-37)__AIY60640.1__F0_DSCav1 (opt4)
gggagagggcgcuuggcuugcaaggacccugagcugcggcauugaagcacacccaacccaacucgacugaagucagccucacugaaccggaucugagaaucuucucucucugggcuugccagggcucuccgaaccuagcuagcauccucuucaauuccaacuagaaagcuuaccauggagcugcccauccugaagaccaacgccaucaccaccauccuggccgccgugacccugugcuucgccagcagccagaacaucaccgaggaguucuaccagagcaccugcagcgccgugagcaagggcuaccugagcgcccugagaaccggcugguacaccagcgugaucaccaucgagcugagcaacaucaaggagaacaagugcaacggcaccgacgccaaggugaagcugaucaagcaggagcuggacaaguacaagaacgccgugaccgagcugcagcugcugaugcagagcacccccgccgccaacaacagagccagaagagagcugcccagauucaugaacuacacccugaacaacaccaagaacaacaacgugacccugagcaagaagagaaagagaagauuccugggcuuccugcugggcgugggcagcgccaucgccagcggcaucgccgugugcaaggugcugcaccuggagggcgaggugaacaagaucaagaacgcccugcugagcaccaacaaggccguggugagccugagcaacggcgugagcgugcugaccuucaaggugcuggaccugaagaacuacaucgacaagcagcugcugcccauccugaacaagcagagcugcagcaucagcaacaucgagaccgugaucgaguuccagcagaagaacaacagacugcuggagaucaccagagaguucagcgugaacgccggcgugaccacccccgugagcaccuacaugcugaccaacagcgagcugcugagccugaucaacgacaugcccaucaccaacgaccagaagaagcugaugagcaacaacgugcagaucgugagacagcagagcuacagcaucaugugcaucaucaaggaggaggugcuggccuacguggugcagcugccccuguacggcgugaucgacacccccugcuggaagcugcacaccagcccccugugcaccaccaacaccaaggagggcagcaacaucugccugaccagaaccgacagaggcugguacugcgacaacgccggcagcgugagcuucuucccccaggccgagaccugcaaggugcagagcaacagaguguucugcgacaccaugaacagccugacccugcccagcgaggugaaccugugcaacaucgacaucuucaaccccaaguacgacugcaagaucaugaccagcaagaccgacgugagcagcagcgugaucaccagccugggcgccaucgugagcugcuacggcaagaccaagugcaccgccagcaacaagaacagaggcaucaucaagaccuucagcaacggcugcgacuacgugagcaacaagggcguggacaccgugagcgugggcaacacccuguacuacgugaacaagcaggagggcaagagccuguacgugaagggcgagcccaucaucaacuucuacgacccccugguguuccccagcgacgaguucgacgccagcaucagccaggugaacgagaagaucaaccagagccuggccuucaucagaaagagcgacgagcugcugcacaacgugaacgugggcaagagcaccaccaacaucaugaucaccaccaucaucaucgugaucaucgugauccugcugcugcugaucgccgugggccuguuccuguacugcaaggccagaagcacccccgugacccugagcaaggaccagcugagcggcaucaacaacaucgccuucagcaacugaggacuaguggaagcauuuuccuggcugauuaaaagaaauuacucagcuauggucaucuguuccuguuagaaggcuaugcagcauauuauauacuaugcgcauguuaugaaaugcauaauaaaaaauuuuaaaaaaucuaaaagaucuaaaaaaaaaaaaaaaaaaaaaaaaaaaaaaaaaaaaaaaaaaaaaaaaaaaaaaaaaaaaaaaaugcaucccccccccccccccccccccccccccccccaaaggcucuuuucagagccaccagaauu

SEQ ID NO: 12630 - RNA, 2174 nt, Artificial Sequence
  mRNA product Design d-5 comprising derived and/or modified sequence from HRSV(Memphis-37)__AIY60640.1__F0_DSCav1 (opt5)
gggagagggcgcuuggcuugcaaggacccugagcugcggcauugaagcacacccaacccaacucgacugaagucagccucacugaaccggaucugagaaucuucucucucugggcuugccagggcucuccgaaccuagcuagcauccucuucaauuccaacuagaaagcuuaccauggagcugcccauccucaagaccaacgccauuacaacgauccuggcugccgugacccuuugcuucgcgagcucccagaauauuacagaagaguuuuaccaaucuaccuguagcgcugucuccaaaggcuaucugucugcccucagaacagggugguacaccagcguuaucacaauugaacuguccaacaucaaggagaauaaaugcaacggaaccgacgccaaggugaaacuuaucaagcaggaacuggauaaguauaaaaaugcugugacggagcuccagcugcugaugcagucuaccccugccgcuaacaaucgggcccgcagagagcucccgcgguucaugaacuacacacugaauaacaccaagaauaacaaugucacacuuagcaaaaagcgcaaaagacgguuucugggcuuccuccugggggugggauccgcgauugccagcggcaucgcuguuuguaaggugcuucaccuggaaggggaggucaacaagauuaaaaaugcccuccugucuaccaacaaggcugugguuucccugagcaacggagugucuguccucacguuuaaagugcuggaccuuaagaauuauaucgauaaacaacugcuccccauucugaacaagcaguccugcagcaucucuaauauugaaacagugaucgaguuccagcagaaaaacaaucgccuucuggagaucaccagagaauuuuccgucaacgccggcguuacaaccccugugagcaccuacaugcucacaaauuccgagcugcugucucucauuaacgacaugcccaucacgaaugaucaaaagaagcugaugagcaacaaugugcagauuguccggcagcaguccuauagcaucauguguauuaucaaagaagaggugcuugcguacguugugcaacugccucucuacggcgucaucgacacccccugcuggaagcugcauacaucuccucuuuguaccacaaacaccaaagaaggguccaauauuugccugacgcgcacagauagaggaugguauugugacaacgccggcagcgugucuuucuuuccgcaggcugagaccugcaagguucagagcaaucggguguucugugauaccaugaacucccucacacugcccucugaggucaaccugugcaauaucgacauuuuuaacccuaaauacgauugcaagaucaugaccagcaagacagacguguccagcucugucauuacgucccucggggccaucgugagcuguuauggaaaaaccaagugcacagcuucuaauaaaaaccgcggcaucauuaagaccuucuccaaugggugugauuacguuagcaacaaaggaguggacacagucuccgugggcaauacccuguauuacguuaacaagcaagaaggcaagucucuuuaugugaaaggggagcccaucauuaauuuuuacgacccucuggucuuccccagcgaugaguucgacgccuccaucucucaggugaacgaaaagauuaaucagagccucgccuuuaucagaaaauccgaugaacugcugcacaacgugaauguuggaaagagcacgaccaacauuaugaucacaaccaucauuaucgucauuaucgugauucuucuccugcugaucgcugugggccucuuccuguacugcaaagcgcggucuacaccggucacccuuuccaaggaccagcugagcgggaucaauaacauugccuuuucuaacugaggacuaguggaagcauuuuccuggcugauuaaaagaaauuacucagcuauggucaucuguuccuguuagaaggcuaugcagcauauuauauacuaugcgcauguuaugaaaugcauaauaaaaaauuuuaaaaaaucuaaaagaucuaaaaaaaaaaaaaaaaaaaaaaaaaaaaaaaaaaaaaaaaaaaaaaaaaaaaaaaaaaaaaaaaugcaucccccccccccccccccccccccccccccccaaaggcucuuuucagagccaccagaauu

SEQ ID NO: 12631 - RNA, 2174 nt, Artificial Sequence
  mRNA product Design d-5 comprising derived and/or modified sequence from HRSV(Memphis-37)__AIY60640.1__F0_DSCav1 (opt6)
gggagagggcgcuuggcuugcaaggacccugagcugcggcauugaagcacacccaacccaacucgacugaagucagccucacugaaccggaucugagaaucuucucucucugggcuugccagggcucuccgaaccuagcuagcauccucuucaauuccaacuagaaagcuuaccauggaacucccaauccucaaaaccaaugccauaacaaccauacucgcugcaguaaccuuauguuucgcaaguagccaaaacauaaccgaagaauuuuaucaauccacaugcuccgcaguuucuaaaggauaucuaucagcauuaagaacuggaugguacacaucuguaauaacuauagaacuaagcaauauaaaagaaaacaaauguaacggaacugacgcuaaaguaaaacuuauaaaacaagaacuagauaaauacaaaaacgccguuaccgaacuacaacuauuaaugcaaucaacaccagccgcaaauaacagagcaagacgcgaauuaccaagauucaugaauuacacacuaaacaauacaaaaaauaacaauguaacacuaucaaaaaaaagaaaacgacgauucuuaggcuuccuacuaggagucggcucagcaauagcuuccggaauagccgucuguaaaguccuacaccuugaaggcgaaguaaacaaaaucaaaaacgcacuauuaucaacaaacaaagcagucguaucuuuauccaacggagucucaguccuaacauucaaaguacucgauuuaaaaaacuacaucgauaaacaacuccuucccauucuaaacaaacaauccugcucaauauccaacaucgaaacagucauagaauuucaacaaaaaaacaaccgccugcuagaaauaacaagagaauuuuccguaaaugccggcgucaccacaccaguaucaacauacaugcuaacaaacuccgaacuacucucccuaauaaacgauaugccaaucaccaacgaccaaaaaaaacuaaugucaaauaacguucaaauagucagacaacaaucauacagcauaaugugcauaauaaaagaagaagucuuagccuacguuguacaacucccauuauacggaguuaucgauacaccaugcuggaaauuacacacaucacccuuaugcaccacaaacacaaaagaaggauccaauauuugucuaacacgaacagacagaggaugguacugugauaacgcaggaucagugucauucuuuccacaagcagaaacauguaaaguucaaucuaacagaguauucugcgacaccaugaacucccuaaccuuacccucagaaguaaaucuaugcaacauagauaucuuuaacccaaaauacgacugcaaaaucaugacaucaaaaacugacguuucuucauccguuauaacuucccucggcgcuauaguguccugcuacggaaaaacuaaaugcacagcauccaacaaaaauagaggaauaauaaaaacauuuuccaacggcugcgacuauguuucaaacaaaggaguagauaccguaucagucggcaauacauuauauuauguuaacaaacaagaaggaaaaucccuauacguaaaaggagaaccuauaaucaacuucuacgacccacucguauuccccucagacgaauuugacgcaucuauaucucaaguaaaugaaaaaauaaaccaaucacucgcauuuauccgcaaaucugacgaauuacuccauaacgucaacgucggcaaaucaaccaccaacauaaugauaacaacaauuauaauaguaauaauugucauacuacuacuccuaauagcaguaggucuauuccuauacugcaaagcaagauccacccccguaacccuuuccaaagaucaacucucaggaauaaauaacauagccuuuucaaacuaaggacuaguggaagcauuuuccuggcugauuaaaagaaauuacucagcuauggucaucuguuccuguuagaaggcuaugcagcauauuauauacuaugcgcauguuaugaaaugcauaauaaaaaauuuuaaaaaaucuaaaagaucuaaaaaaaaaaaaaaaaaaaaaaaaaaaaaaaaaaaaaaaaaaaaaaaaaaaaaaaaaaaaaaaaugcaucccccccccccccccccccccccccccccccaaaggcucuuuucagagccaccagaauu

SEQ ID NO: 12632 - RNA, 2174 nt, Artificial Sequence
  mRNA product Design d-5 comprising derived and/or modified sequence from HRSV(Memphis-37)__AIY60640.1__F0_DSCav1 (opt11)
gggagagggcgcuuggcuugcaaggacccugagcugcggcauugaagcacacccaacccaacucgacugaagucagccucacugaaccggaucugagaaucuucucucucugggcuugccagggcucuccgaaccuagcuagcauccucuucaauuccaacuagaaagcuuaccauggaacuccccauacucaagacuaaugccaucaccaccauccucgccgccgugacccucugcuucgcaucgucccaaaacauaacagaagaguucuaccaaagcacaugcuccgcagucuccaaaggauaccucuccgcacuacguaccggcugguacaccagcgucaucaccaucgaacuuuccaacaucaaagagaacaaaugcaacggcaccgacgccaaaguaaaacucauaaaacaagagcuagacaaauacaaaaacgccgucacagaacuccaacuacugaugcaauccacaccggccgccaacaaccgcgcucgacgugaacucccacgcuucaugaacuacacucuuaacaacaccaaaaauaacaacgucacccuauccaaaaagcgaaagcgcagauuccucggcuuccuacuuggcgucggcucggcgauagccucuggaaucgccguuugcaagguccuccaccuagaaggcgaaguaaacaaaaucaaaaacgcacuccuaagcaccaacaaagccgucgucucacuuuccaacggcgucucaguccucacauucaaaguucucgaccuaaagaacuacaucgacaagcaacuacuacccauacucaauaaacaauccugcuccaucagcaacaucgagacagucaucgaauuucaacaaaagaacaaccgccuccucgaaauuacacgcgaguucucagucaacgccggagucaccaccccagucucaacauacaugcucaccaacagcgaacuccugucucuaaucaacgacaugcccaucacuaacgaccagaagaaacucauguccaacaacguccaaaucgugcgacaacaaucauacucuaucaugugcaucaucaaagaagaaguccucgcauacgucguccagcucccacucuacggcguaaucgacacacccugcuggaaacuccacacaucaccccuaugcaccaccaacacaaaagaaggcuccaacaucugccuaacccgaaccgacagagguugguauugcgacaacgccggcucagucucauucuucccacaagccgaaaccuguaaaguccaaucaaaccgcgucuucugcgauaccaugaacucucucacacuccccuccgaagucaaucucugcaacauagacaucuucaauccaaaguacgacugcaaaauaaugaccucgaaaaccgacguaagcuccagcgucaucaccuccuuaggcgcaaucguauccugcuacggcaaaaccaaaugcaccgccucaaacaaaaacagaggcaucaucaaaacguucucgaacggaugcgacuacguuuccaauaaaggcguagauaccgucuccgucggcaacacacucuauuacgucaacaaacaagaaggcaaaucccucuacgucaaaggugaaccuaucaucaacuucuacgacccccucgucuuccccagcgacgaguucgaugccucaaucagccaagucaacgagaaaaucaaccaaucacuggcuuucauacgcaaauccgacgaacuccuccacaacgugaacgucggcaaauccacaaccaacaucaugauaaccacaauaaucaucgucauaaucguaauccuacuccuccuuauugccguaggacuauuccuauacugcaaagcccgauccacccccgucacccucucaaaagaccaacucuccggcaucaacaauauagccuucucuaacuaaggacuaguggaagcauuuuccuggcugauuaaaagaaauuacucagcuauggucaucuguuccuguuagaaggcuaugcagcauauuauauacuaugcgcauguuaugaaaugcauaauaaaaaauuuuaaaaaaucuaaaagaucuaaaaaaaaaaaaaaaaaaaaaaaaaaaaaaaaaaaaaaaaaaaaaaaaaaaaaaaaaaaaaaaaugcaucccccccccccccccccccccccccccccccaaaggcucuuuucagagccaccagaauu

SEQ ID NO: 12633 - RNA, 2054 nt, Artificial Sequence
  mRNA product Design e-1 comprising derived and/or modified sequence from HRSV(Memphis-37)__AIY60640.1__F0_DSCav1 (opt1)
gggagaauauaagcguuggcggagcgucgguuguagcacucugcgcgcccgcucuucugcugcuguuugucuacuuccuccugcuuccccgccgccgccgccgccaucaagcuuaccauggagcugcccauccucaagaccaacgccaucaccacgauccuggccgcggugacccugugcuucgccagcucccagaacaucaccgaggaguucuaccagagcacgugcuccgccgucagcaagggcuaccucuccgcccugcgcaccgggugguacaccagcgugaucaccaucgagcuguccaacaucaaggagaacaagugcaacggcaccgacgccaaggugaagcucaucaagcaggagcuggacaaguacaagaacgcggucacggagcugcagcuccugaugcagagcaccccggccgccaacaaccgggcccgccgggagcugccccgcuucaugaacuacacccucaacaacaccaagaacaacaacgugacgcuguccaagaagcggaagcgccgguuccugggguuccuccugggcguggggagcgcgaucgccuccggcaucgccgucugcaaggugcugcaccucgagggcgaggugaacaagaucaagaacgcccugcuguccaccaacaaggccgucgugagccucuccaacggggugagcguccugaccuucaaggugcuggaccucaagaacuacaucgacaagcagcugcugcccauccugaacaagcagagcugcuccaucagcaacaucgagaccgucaucgaguuccagcagaagaacaaccgccuccuggagaucacgcgggaguucagcgugaacgcgggcgugaccacccccgucuccaccuacaugcugacgaacagcgagcuccugucccugaucaacgacaugccgaucaccaacgaccagaagaagcucaugagcaacaacgugcagaucgugcgccagcaguccuacagcaucaugugcaucaucaaggaggagguccuggccuacguggugcagcugccccucuacggggucaucgacacccccugcuggaagcugcacaccagcccccugugcacgaccaacaccaaggagggcuccaacaucugccucacccggacggaccgcgggugguacugcgacaacgccggcagcguguccuucuucccgcaggccgagaccugcaagguccagagcaaccggguguucugcgacaccaugaacucccugacccugcccagcgaggugaaccucugcaacaucgacaucuucaaccccaaguacgacugcaagaucaugacguccaagaccgacgucagcuccagcgugaucaccucccugggcgccaucgugagcugcuacgggaagaccaagugcacggcgagcaacaagaaccgcggcaucaucaagaccuucuccaacgggugcgacuacgucagcaacaagggcguggacaccguguccgucggcaacacccuguacuacgugaacaagcaggagggcaagagccucuacgugaagggggagcccaucaucaacuucuacgacccgcuggucuuccccuccgacgaguucgacgccagcaucucccaggugaacgagaagaucaaccagagccuggccuucauccggaaguccgacgagcuccugcacaacgugaacgucggcaagagcaccacgaacaucaugaucaccaccaucaucaucgugaucaucgugauccugcugcuccugaucgccgucgggcuguuccucuacugcaaggcccgcuccacccccgugacgcugagcaaggaccagcuguccgggaucaacaacaucgcguucagcaacugaggacuaguguccaccugucccuccugggcugcuggauugucucguuuuccugccaaauaaacaggaucagcgcuuuacagaucuaaaaaaaaaaaaaaaaaaaaaaaaaaaaaaaaaaaaaaaaaaaaaaaaaaaaaaaaaaaaaaaaugcaucccccccccccccccccccccccccccccccaaaggcucuuuucagagccaccagaauu

SEQ ID NO: 12634 - RNA, 2054 nt, Artificial Sequence
  mRNA product Design e-1 comprising derived and/or modified sequence from HRSV(Memphis-37)__AIY60640.1__F0_DSCav1 (opt1)
gggagaauauaagcguuggcggagcgucgguuguagcacucugcgcgcccgcucuucugcugcuguuugucuacuuccuccugcuuccccgccgccgccgccgccaucaagcuuaccauggagcugcccauccucaagaccaacgccaucaccacgauccuggccgcggugacccugugcuucgccagcucccagaacaucaccgaggaguucuaccagagcacgugcuccgccgucagcaagggcuaccucuccgcccugcgcaccgggugguacaccagcgugaucaccaucgagcuguccaacaucaaggagaacaagugcaacggcaccgacgccaaggugaagcucaucaagcaggagcuggacaaguacaagaacgcggucacggagcugcagcuccugaugcagagcaccccggccgccaacaaccgggcccgccgggagcugccccgcuucaugaacuacacccucaacaacaccaagaacaacaacgugacgcuguccaagaagcggaagcgccgguuccugggguuccuccugggcguggggagcgcgaucgccuccggcaucgccgucugcaaggugcugcaccucgagggcgaggugaacaagaucaagaacgcccugcugagcaccaacaaggccgucgugucccucagcaacgggguguccguccugaccuucaaggugcuggaccucaagaacuacaucgacaagcagcugcugcccauccucaacaagcagagcugcuccaucagcaacaucgagaccgugaucgaguuccagcagaagaacaaccgccugcuggagaucacgcgggaguucuccgucaacgcgggcgugaccacccccgugagcaccuacaugcucacgaacagcgagcugcugucccucaucaacgacaugccgaucaccaacgaccagaagaagcugaugagcaacaacguccagaucgugcgccagcaguccuacagcaucaugugcaucaucaaggaggaggugcuggccuacgucgugcagcucccccuguacggggugaucgacacccccugcuggaagcugcacaccagcccccucugcacgaccaacaccaaggagggcagcaacaucugccugacccggacggaccgcgggugguacugcgacaacgccggcuccgucagcuucuucccgcaggccgagaccugcaaggugcaguccaaccgggucuucugcgacaccaugaacagccugacccuccccuccgaggugaaccugugcaacaucgacaucuucaaccccaaguacgacugcaagaucaugacgagcaagaccgacguguccagcuccgucaucaccagccugggcgccaucguguccugcuacgggaagaccaagugcacggcgagcaacaagaaccgcggcaucaucaagaccuucuccaacgggugcgacuacgugagcaacaagggcgucgacaccgugagcgugggcaacacccucuacuacgucaacaagcaggaggggaagucccuguacgugaagggcgagcccaucaucaacuucuacgacccgcugguguuccccagcgacgaguucgacgccuccaucagccaggucaacgagaagaucaaccagucccucgccuucauccggaaguccgacgagcugcugcacaacgugaacguggggaaguccaccacgaacaucaugaucaccaccaucaucaucgucaucaucgugauccugcuccugcugaucgccgugggccucuuccuguacugcaaggcccgcagcacccccgucacgcuguccaaggaccagcucagcgggaucaacaacaucgcguucuccaacugaggacuaguguccaccugucccuccugggcugcuggauugucucguuuuccugccaaauaaacaggaucagcgcuuuacagaucuaaaaaaaaaaaaaaaaaaaaaaaaaaaaaaaaaaaaaaaaaaaaaaaaaaaaaaaaaaaaaaaaugcaucccccccccccccccccccccccccccccccaaaggcucuuuucagagccaccagaauu

SEQ ID NO: 12635 - RNA, 2054 nt, Artificial Sequence
  mRNA product Design e-1 comprising derived and/or modified sequence from HRSV(Memphis-37)__AIY60640.1__F0_DSCav1 (opt2)
gggagaauauaagcguuggcggagcgucgguuguagcacucugcgcgcccgcucuucugcugcuguuugucuacuuccuccugcuuccccgccgccgccgccgccaucaagcuuaccauggagcuccccauccucaagaccaacgccaucaccaccauccucgccgccgucacccucugcuucgccuccucccagaacaucaccgaggaguucuaccaguccaccugcuccgccgucuccaagggcuaccucuccgcccuccgcaccggcugguacaccuccgucaucaccaucgagcucuccaacaucaaggagaacaagugcaacggcaccgacgccaaggucaagcucaucaagcaggagcucgacaaguacaagaacgccgucaccgagcuccagcuccucaugcaguccacccccgccgccaacaaccgcgcccgccgcgagcucccccgcuucaugaacuacacccucaacaacaccaagaacaacaacgucacccucuccaagaagcgcaagcgccgcuuccucggcuuccuccucggcgucggcuccgccaucgccuccggcaucgccgucugcaagguccuccaccucgagggcgaggucaacaagaucaagaacgcccuccucuccaccaacaaggccgucgucucccucuccaacggcgucuccguccucaccuucaagguccucgaccucaagaacuacaucgacaagcagcuccuccccauccucaacaagcaguccugcuccaucuccaacaucgagaccgucaucgaguuccagcagaagaacaaccgccuccucgagaucacccgcgaguucuccgucaacgccggcgucaccacccccgucuccaccuacaugcucaccaacuccgagcuccucucccucaucaacgacaugcccaucaccaacgaccagaagaagcucauguccaacaacguccagaucguccgccagcaguccuacuccaucaugugcaucaucaaggaggagguccucgccuacgucguccagcucccccucuacggcgucaucgacacccccugcuggaagcuccacaccuccccccucugcaccaccaacaccaaggagggcuccaacaucugccucacccgcaccgaccgcggcugguacugcgacaacgccggcuccgucuccuucuucccccaggccgagaccugcaagguccaguccaaccgcgucuucugcgacaccaugaacucccucacccuccccuccgaggucaaccucugcaacaucgacaucuucaaccccaaguacgacugcaagaucaugaccuccaagaccgacgucuccuccuccgucaucaccucccucggcgccaucgucuccugcuacggcaagaccaagugcaccgccuccaacaagaaccgcggcaucaucaagaccuucuccaacggcugcgacuacgucuccaacaagggcgucgacaccgucuccgucggcaacacccucuacuacgucaacaagcaggagggcaagucccucuacgucaagggcgagcccaucaucaacuucuacgacccccucgucuuccccuccgacgaguucgacgccuccaucucccaggucaacgagaagaucaaccagucccucgccuucauccgcaaguccgacgagcuccuccacaacgucaacgucggcaaguccaccaccaacaucaugaucaccaccaucaucaucgucaucaucgucauccuccuccuccucaucgccgucggccucuuccucuacugcaaggcccgcuccacccccgucacccucuccaaggaccagcucuccggcaucaacaacaucgccuucuccaacugaggacuaguguccaccugucccuccugggcugcuggauugucucguuuuccugccaaauaaacaggaucagcgcuuuacagaucuaaaaaaaaaaaaaaaaaaaaaaaaaaaaaaaaaaaaaaaaaaaaaaaaaaaaaaaaaaaaaaaaugcaucccccccccccccccccccccccccccccccaaaggcucuuuucagagccaccagaauu

SEQ ID NO: 12636 - RNA, 2054 nt, Artificial Sequence
  mRNA product Design e-1 comprising derived and/or modified sequence from HRSV(Memphis-37)__AIY60640.1__F0_DSCav1 (opt3)
gggagaauauaagcguuggcggagcgucgguuguagcacucugcgcgcccgcucuucugcugcuguuugucuacuuccuccugcuuccccgccgccgccgccgccaucaagcuuaccauggagcugcccauccucaagaccaacgccauuacaacuauacuugcugcagugacgcugugcuucgccagcucccagaauaucaccgaagaguuuuaccaaucuacauguucagcggucaguaaaggcuauuugagcgcuuuaagaacugggugguacaccuccguuauuacaaucgaacugucuaacauuaaggagaauaaaugcaacggaaccgacgccaaggugaaacuaaucaagcaggaacucgauaaguauaaaaaugcaguaacugagcugcagcuucugaugcagucgaccccugccgcuaacaauagggcacggcgcgaguugccacgauucaugaacuacacacucaauaacacgaagaauaacaaugugacucugagcaaaaagcguaaaagaagguuucuggguuuccucuuaggcgucgggucagccauagcuaguggaaucgccguguguaagguucugcaccuugaaggcgaggugaacaagauuaaaaaugcguugcuguccaccaacaaggcagucgugucucuaagcaacgguguauccguucucacauuuaaagugcuggaccuuaagaauuauaucgauaaacaacuguugccgauucucaacaagcagucaugcaguaucagcaauauagaaacugucauugaguuccagcagaaaaacaaucggcuguuagagaucacccgcgaauuuucugugaacgccggggugacaacccccgucuccacguacaugcugacuaauucagagcuccuuagccugauuaacgacaugccuaucacaaaugaucaaaagaaguugaugaguaacaauguucagaucgugagacagcagucuuauuccauuauguguauaaucaaagaagagguacuagcuuacgugguccaacugccacucuacggagugauugacacccccugcuggaagcugcauacuagcccucuuuguacaaccaacacgaaagaaggcucgaauaucugccugaccaggacagaucggggcugguauugugacaacgccgggucuguuuccuucuuuccacaggcagagacuugcaaggugcagucaaaucgcgucuucugugauaccaugaacaguuugacacuccccagcgaggugaaccugugcaauauagacauuuuuaacccuaaauacgauugcaagaucaugacuuccaagaccgacguaucuagcucaguuaucacaaguuuaggagcuauuguguccuguuaugguaaaaccaagugcacugccagcaauaaaaaccgaggcaucauuaagacguucucuaaugggugugauuacgucucaaacaaaggaguggacacagucagugugggcaauacccuguauuacguuaacaagcaagaagguaagagccuauaugugaaaggggagccaauaaucaauuuuuacgacccgcucguauuccccuccgaugaguucgacgcgucuauuucgcaggucaacgaaaagaucaaucagagccuggccuuuaucagaaaauccgaugaacuuuugcacaacgugaauguuggaaagucaacuaccaacauuaugauaacaaccaucauuaucgugauuaucgucauacugcuccugcuuaucgcagugggccuguucuuguacugcaaagcuaggaguacuccuguaacacucucuaaggaccagcugagcggcauuaauaacaucgccuuuuccaacugaggacuaguguccaccugucccuccugggcugcuggauugucucguuuuccugccaaauaaacaggaucagcgcuuuacagaucuaaaaaaaaaaaaaaaaaaaaaaaaaaaaaaaaaaaaaaaaaaaaaaaaaaaaaaaaaaaaaaaaugcaucccccccccccccccccccccccccccccccaaaggcucuuuucagagccaccagaauu

SEQ ID NO: 12637 - RNA, 2054 nt, Artificial Sequence
  mRNA product Design e-1 comprising derived and/or modified sequence from HRSV(Memphis-37)__AIY60640.1__F0_DSCav1 (opt4)
gggagaauauaagcguuggcggagcgucgguuguagcacucugcgcgcccgcucuucugcugcuguuugucuacuuccuccugcuuccccgccgccgccgccgccaucaagcuuaccauggagcugcccauccugaagaccaacgccaucaccaccauccuggccgccgugacccugugcuucgccagcagccagaacaucaccgaggaguucuaccagagcaccugcagcgccgugagcaagggcuaccugagcgcccugagaaccggcugguacaccagcgugaucaccaucgagcugagcaacaucaaggagaacaagugcaacggcaccgacgccaaggugaagcugaucaagcaggagcuggacaaguacaagaacgccgugaccgagcugcagcugcugaugcagagcacccccgccgccaacaacagagccagaagagagcugcccagauucaugaacuacacccugaacaacaccaagaacaacaacgugacccugagcaagaagagaaagagaagauuccugggcuuccugcugggcgugggcagcgccaucgccagcggcaucgccgugugcaaggugcugcaccuggagggcgaggugaacaagaucaagaacgcccugcugagcaccaacaaggccguggugagccugagcaacggcgugagcgugcugaccuucaaggugcuggaccugaagaacuacaucgacaagcagcugcugcccauccugaacaagcagagcugcagcaucagcaacaucgagaccgugaucgaguuccagcagaagaacaacagacugcuggagaucaccagagaguucagcgugaacgccggcgugaccacccccgugagcaccuacaugcugaccaacagcgagcugcugagccugaucaacgacaugcccaucaccaacgaccagaagaagcugaugagcaacaacgugcagaucgugagacagcagagcuacagcaucaugugcaucaucaaggaggaggugcuggccuacguggugcagcugccccuguacggcgugaucgacacccccugcuggaagcugcacaccagcccccugugcaccaccaacaccaaggagggcagcaacaucugccugaccagaaccgacagaggcugguacugcgacaacgccggcagcgugagcuucuucccccaggccgagaccugcaaggugcagagcaacagaguguucugcgacaccaugaacagccugacccugcccagcgaggugaaccugugcaacaucgacaucuucaaccccaaguacgacugcaagaucaugaccagcaagaccgacgugagcagcagcgugaucaccagccugggcgccaucgugagcugcuacggcaagaccaagugcaccgccagcaacaagaacagaggcaucaucaagaccuucagcaacggcugcgacuacgugagcaacaagggcguggacaccgugagcgugggcaacacccuguacuacgugaacaagcaggagggcaagagccuguacgugaagggcgagcccaucaucaacuucuacgacccccugguguuccccagcgacgaguucgacgccagcaucagccaggugaacgagaagaucaaccagagccuggccuucaucagaaagagcgacgagcugcugcacaacgugaacgugggcaagagcaccaccaacaucaugaucaccaccaucaucaucgugaucaucgugauccugcugcugcugaucgccgugggccuguuccuguacugcaaggccagaagcacccccgugacccugagcaaggaccagcugagcggcaucaacaacaucgccuucagcaacugaggacuaguguccaccugucccuccugggcugcuggauugucucguuuuccugccaaauaaacaggaucagcgcuuuacagaucuaaaaaaaaaaaaaaaaaaaaaaaaaaaaaaaaaaaaaaaaaaaaaaaaaaaaaaaaaaaaaaaaugcaucccccccccccccccccccccccccccccccaaaggcucuuuucagagccaccagaauu

SEQ ID NO: 12638 - RNA, 2054 nt, Artificial Sequence
  mRNA product Design e-1 comprising derived and/or modified sequence from HRSV(Memphis-37)__AIY60640.1__F0_DSCav1 (opt5)
gggagaauauaagcguuggcggagcgucgguuguagcacucugcgcgcccgcucuucugcugcuguuugucuacuuccuccugcuuccccgccgccgccgccgccaucaagcuuaccauggagcugcccauccucaagaccaacgccauuacaacgauccuggcugccgugacccuuugcuucgcgagcucccagaauauuacagaagaguuuuaccaaucuaccuguagcgcugucuccaaaggcuaucugucugcccucagaacagggugguacaccagcguuaucacaauugaacuguccaacaucaaggagaauaaaugcaacggaaccgacgccaaggugaaacuuaucaagcaggaacuggauaaguauaaaaaugcugugacggagcuccagcugcugaugcagucuaccccugccgcuaacaaucgggcccgcagagagcucccgcgguucaugaacuacacacugaauaacaccaagaauaacaaugucacacuuagcaaaaagcgcaaaagacgguuucugggcuuccuccugggggugggauccgcgauugccagcggcaucgcuguuuguaaggugcuucaccuggaaggggaggucaacaagauuaaaaaugcccuccugucuaccaacaaggcugugguuucccugagcaacggagugucuguccucacguuuaaagugcuggaccuuaagaauuauaucgauaaacaacugcuccccauucugaacaagcaguccugcagcaucucuaauauugaaacagugaucgaguuccagcagaaaaacaaucgccuucuggagaucaccagagaauuuuccgucaacgccggcguuacaaccccugugagcaccuacaugcucacaaauuccgagcugcugucucucauuaacgacaugcccaucacgaaugaucaaaagaagcugaugagcaacaaugugcagauuguccggcagcaguccuauagcaucauguguauuaucaaagaagaggugcuugcguacguugugcaacugccucucuacggcgucaucgacacccccugcuggaagcugcauacaucuccucuuuguaccacaaacaccaaagaaggguccaauauuugccugacgcgcacagauagaggaugguauugugacaacgccggcagcgugucuuucuuuccgcaggcugagaccugcaagguucagagcaaucggguguucugugauaccaugaacucccucacacugcccucugaggucaaccugugcaauaucgacauuuuuaacccuaaauacgauugcaagaucaugaccagcaagacagacguguccagcucugucauuacgucccucggggccaucgugagcuguuauggaaaaaccaagugcacagcuucuaauaaaaaccgcggcaucauuaagaccuucuccaaugggugugauuacguuagcaacaaaggaguggacacagucuccgugggcaauacccuguauuacguuaacaagcaagaaggcaagucucuuuaugugaaaggggagcccaucauuaauuuuuacgacccucuggucuuccccagcgaugaguucgacgccuccaucucucaggugaacgaaaagauuaaucagagccucgccuuuaucagaaaauccgaugaacugcugcacaacgugaauguuggaaagagcacgaccaacauuaugaucacaaccaucauuaucgucauuaucgugauucuucuccugcugaucgcugugggccucuuccuguacugcaaagcgcggucuacaccggucacccuuuccaaggaccagcugagcgggaucaauaacauugccuuuucuaacugaggacuaguguccaccugucccuccugggcugcuggauugucucguuuuccugccaaauaaacaggaucagcgcuuuacagaucuaaaaaaaaaaaaaaaaaaaaaaaaaaaaaaaaaaaaaaaaaaaaaaaaaaaaaaaaaaaaaaaaugcaucccccccccccccccccccccccccccccccaaaggcucuuuucagagccaccagaauu

SEQ ID NO: 12639 - RNA, 2054 nt, Artificial Sequence
  mRNA product Design e-1 comprising derived and/or modified sequence from HRSV(Memphis-37)__AIY60640.1__F0_DSCav1 (opt6)
gggagaauauaagcguuggcggagcgucgguuguagcacucugcgcgcccgcucuucugcugcuguuugucuacuuccuccugcuuccccgccgccgccgccgccaucaagcuuaccauggaacucccaauccucaaaaccaaugccauaacaaccauacucgcugcaguaaccuuauguuucgcaaguagccaaaacauaaccgaagaauuuuaucaauccacaugcuccgcaguuucuaaaggauaucuaucagcauuaagaacuggaugguacacaucuguaauaacuauagaacuaagcaauauaaaagaaaacaaauguaacggaacugacgcuaaaguaaaacuuauaaaacaagaacuagauaaauacaaaaacgccguuaccgaacuacaacuauuaaugcaaucaacaccagccgcaaauaacagagcaagacgcgaauuaccaagauucaugaauuacacacuaaacaauacaaaaaauaacaauguaacacuaucaaaaaaaagaaaacgacgauucuuaggcuuccuacuaggagucggcucagcaauagcuuccggaauagccgucuguaaaguccuacaccuugaaggcgaaguaaacaaaaucaaaaacgcacuauuaucaacaaacaaagcagucguaucuuuauccaacggagucucaguccuaacauucaaaguacucgauuuaaaaaacuacaucgauaaacaacuccuucccauucuaaacaaacaauccugcucaauauccaacaucgaaacagucauagaauuucaacaaaaaaacaaccgccugcuagaaauaacaagagaauuuuccguaaaugccggcgucaccacaccaguaucaacauacaugcuaacaaacuccgaacuacucucccuaauaaacgauaugccaaucaccaacgaccaaaaaaaacuaaugucaaauaacguucaaauagucagacaacaaucauacagcauaaugugcauaauaaaagaagaagucuuagccuacguuguacaacucccauuauacggaguuaucgauacaccaugcuggaaauuacacacaucacccuuaugcaccacaaacacaaaagaaggauccaauauuugucuaacacgaacagacagaggaugguacugugauaacgcaggaucagugucauucuuuccacaagcagaaacauguaaaguucaaucuaacagaguauucugcgacaccaugaacucccuaaccuuacccucagaaguaaaucuaugcaacauagauaucuuuaacccaaaauacgacugcaaaaucaugacaucaaaaacugacguuucuucauccguuauaacuucccucggcgcuauaguguccugcuacggaaaaacuaaaugcacagcauccaacaaaaauagaggaauaauaaaaacauuuuccaacggcugcgacuauguuucaaacaaaggaguagauaccguaucagucggcaauacauuauauuauguuaacaaacaagaaggaaaaucccuauacguaaaaggagaaccuauaaucaacuucuacgacccacucguauuccccucagacgaauuugacgcaucuauaucucaaguaaaugaaaaaauaaaccaaucacucgcauuuauccgcaaaucugacgaauuacuccauaacgucaacgucggcaaaucaaccaccaacauaaugauaacaacaauuauaauaguaauaauugucauacuacuacuccuaauagcaguaggucuauuccuauacugcaaagcaagauccacccccguaacccuuuccaaagaucaacucucaggaauaaauaacauagccuuuucaaacuaaggacuaguguccaccugucccuccugggcugcuggauugucucguuuuccugccaaauaaacaggaucagcgcuuuacagaucuaaaaaaaaaaaaaaaaaaaaaaaaaaaaaaaaaaaaaaaaaaaaaaaaaaaaaaaaaaaaaaaaugcaucccccccccccccccccccccccccccccccaaaggcucuuuucagagccaccagaauu

SEQ ID NO: 12640 - RNA, 2054 nt, Artificial Sequence
  mRNA product Design e-1 comprising derived and/or modified sequence from HRSV(Memphis-37)__AIY60640.1__F0_DSCav1 (opt11)
gggagaauauaagcguuggcggagcgucgguuguagcacucugcgcgcccgcucuucugcugcuguuugucuacuuccuccugcuuccccgccgccgccgccgccaucaagcuuaccauggaacuccccauacucaagacuaaugccaucaccaccauccucgccgccgugacccucugcuucgcaucgucccaaaacauaacagaagaguucuaccaaagcacaugcuccgcagucuccaaaggauaccucuccgcacuacguaccggcugguacaccagcgucaucaccaucgaacuuuccaacaucaaagagaacaaaugcaacggcaccgacgccaaaguaaaacucauaaaacaagagcuagacaaauacaaaaacgccgucacagaacuccaacuacugaugcaauccacaccggccgccaacaaccgcgcucgacgugaacucccacgcuucaugaacuacacucuuaacaacaccaaaaauaacaacgucacccuauccaaaaagcgaaagcgcagauuccucggcuuccuacuuggcgucggcucggcgauagccucuggaaucgccguuugcaagguccuccaccuagaaggcgaaguaaacaaaaucaaaaacgcacuccuaagcaccaacaaagccgucgucucacuuuccaacggcgucucaguccucacauucaaaguucucgaccuaaagaacuacaucgacaagcaacuacuacccauacucaauaaacaauccugcuccaucagcaacaucgagacagucaucgaauuucaacaaaagaacaaccgccuccucgaaauuacacgcgaguucucagucaacgccggagucaccaccccagucucaacauacaugcucaccaacagcgaacuccugucucuaaucaacgacaugcccaucacuaacgaccagaagaaacucauguccaacaacguccaaaucgugcgacaacaaucauacucuaucaugugcaucaucaaagaagaaguccucgcauacgucguccagcucccacucuacggcguaaucgacacacccugcuggaaacuccacacaucaccccuaugcaccaccaacacaaaagaaggcuccaacaucugccuaacccgaaccgacagagguugguauugcgacaacgccggcucagucucauucuucccacaagccgaaaccuguaaaguccaaucaaaccgcgucuucugcgauaccaugaacucucucacacuccccuccgaagucaaucucugcaacauagacaucuucaauccaaaguacgacugcaaaauaaugaccucgaaaaccgacguaagcuccagcgucaucaccuccuuaggcgcaaucguauccugcuacggcaaaaccaaaugcaccgccucaaacaaaaacagaggcaucaucaaaacguucucgaacggaugcgacuacguuuccaauaaaggcguagauaccgucuccgucggcaacacacucuauuacgucaacaaacaagaaggcaaaucccucuacgucaaaggugaaccuaucaucaacuucuacgacccccucgucuuccccagcgacgaguucgaugccucaaucagccaagucaacgagaaaaucaaccaaucacuggcuuucauacgcaaauccgacgaacuccuccacaacgugaacgucggcaaauccacaaccaacaucaugauaaccacaauaaucaucgucauaaucguaauccuacuccuccuuauugccguaggacuauuccuauacugcaaagcccgauccacccccgucacccucucaaaagaccaacucuccggcaucaacaauauagccuucucuaacuaaggacuaguguccaccugucccuccugggcugcuggauugucucguuuuccugccaaauaaacaggaucagcgcuuuacagaucuaaaaaaaaaaaaaaaaaaaaaaaaaaaaaaaaaaaaaaaaaaaaaaaaaaaaaaaaaaaaaaaaugcaucccccccccccccccccccccccccccccccaaaggcucuuuucagagccaccagaauu

SEQ ID NO: 12641 - RNA, 2036 nt, Artificial Sequence
  mRNA product Design e-2 comprising derived and/or modified sequence from HRSV(Memphis-37)__AIY60640.1__F0_DSCav1 (opt1)
gggagacccgugacccggaaguuguacggcuacgcgacuuucccucccacaaacccucgcgcccuuccuuuccuacuugggcccggcagaaagcuuaccauggagcugcccauccucaagaccaacgccaucaccacgauccuggccgcggugacccugugcuucgccagcucccagaacaucaccgaggaguucuaccagagcacgugcuccgccgucagcaagggcuaccucuccgcccugcgcaccgggugguacaccagcgugaucaccaucgagcuguccaacaucaaggagaacaagugcaacggcaccgacgccaaggugaagcucaucaagcaggagcuggacaaguacaagaacgcggucacggagcugcagcuccugaugcagagcaccccggccgccaacaaccgggcccgccgggagcugccccgcuucaugaacuacacccucaacaacaccaagaacaacaacgugacgcuguccaagaagcggaagcgccgguuccugggguuccuccugggcguggggagcgcgaucgccuccggcaucgccgucugcaaggugcugcaccucgagggcgaggugaacaagaucaagaacgcccugcuguccaccaacaaggccgucgugagccucuccaacggggugagcguccugaccuucaaggugcuggaccucaagaacuacaucgacaagcagcugcugcccauccugaacaagcagagcugcuccaucagcaacaucgagaccgucaucgaguuccagcagaagaacaaccgccuccuggagaucacgcgggaguucagcgugaacgcgggcgugaccacccccgucuccaccuacaugcugacgaacagcgagcuccugucccugaucaacgacaugccgaucaccaacgaccagaagaagcucaugagcaacaacgugcagaucgugcgccagcaguccuacagcaucaugugcaucaucaaggaggagguccuggccuacguggugcagcugccccucuacggggucaucgacacccccugcuggaagcugcacaccagcccccugugcacgaccaacaccaaggagggcuccaacaucugccucacccggacggaccgcgggugguacugcgacaacgccggcagcguguccuucuucccgcaggccgagaccugcaagguccagagcaaccggguguucugcgacaccaugaacucccugacccugcccagcgaggugaaccucugcaacaucgacaucuucaaccccaaguacgacugcaagaucaugacguccaagaccgacgucagcuccagcgugaucaccucccugggcgccaucgugagcugcuacgggaagaccaagugcacggcgagcaacaagaaccgcggcaucaucaagaccuucuccaacgggugcgacuacgucagcaacaagggcguggacaccguguccgucggcaacacccuguacuacgugaacaagcaggagggcaagagccucuacgugaagggggagcccaucaucaacuucuacgacccgcuggucuuccccuccgacgaguucgacgccagcaucucccaggugaacgagaagaucaaccagagccuggccuucauccggaaguccgacgagcuccugcacaacgugaacgucggcaagagcaccacgaacaucaugaucaccaccaucaucaucgugaucaucgugauccugcugcuccugaucgccgucgggcuguuccucuacugcaaggcccgcuccacccccgugacgcugagcaaggaccagcuguccgggaucaacaacaucgcguucagcaacugaggacuaguguccaccugucccuccugggcugcuggauugucucguuuuccugccaaauaaacaggaucagcgcuuuacagaucuaaaaaaaaaaaaaaaaaaaaaaaaaaaaaaaaaaaaaaaaaaaaaaaaaaaaaaaaaaaaaaaaugcaucccccccccccccccccccccccccccccccaaaggcucuuuucagagccaccagaauu

SEQ ID NO: 12642 - RNA, 2036 nt, Artificial Sequence
  mRNA product Design e-2 comprising derived and/or modified sequence from HRSV(Memphis-37)__AIY60640.1__F0_DSCav1 (opt1)
gggagacccgugacccggaaguuguacggcuacgcgacuuucccucccacaaacccucgcgcccuuccuuuccuacuugggcccggcagaaagcuuaccauggagcugcccauccucaagaccaacgccaucaccacgauccuggccgcggugacccugugcuucgccagcucccagaacaucaccgaggaguucuaccagagcacgugcuccgccgucagcaagggcuaccucuccgcccugcgcaccgggugguacaccagcgugaucaccaucgagcuguccaacaucaaggagaacaagugcaacggcaccgacgccaaggugaagcucaucaagcaggagcuggacaaguacaagaacgcggucacggagcugcagcuccugaugcagagcaccccggccgccaacaaccgggcccgccgggagcugccccgcuucaugaacuacacccucaacaacaccaagaacaacaacgugacgcuguccaagaagcggaagcgccgguuccugggguuccuccugggcguggggagcgcgaucgccuccggcaucgccgucugcaaggugcugcaccucgagggcgaggugaacaagaucaagaacgcccugcugagcaccaacaaggccgucgugucccucagcaacgggguguccguccugaccuucaaggugcuggaccucaagaacuacaucgacaagcagcugcugcccauccucaacaagcagagcugcuccaucagcaacaucgagaccgugaucgaguuccagcagaagaacaaccgccugcuggagaucacgcgggaguucuccgucaacgcgggcgugaccacccccgugagcaccuacaugcucacgaacagcgagcugcugucccucaucaacgacaugccgaucaccaacgaccagaagaagcugaugagcaacaacguccagaucgugcgccagcaguccuacagcaucaugugcaucaucaaggaggaggugcuggccuacgucgugcagcucccccuguacggggugaucgacacccccugcuggaagcugcacaccagcccccucugcacgaccaacaccaaggagggcagcaacaucugccugacccggacggaccgcgggugguacugcgacaacgccggcuccgucagcuucuucccgcaggccgagaccugcaaggugcaguccaaccgggucuucugcgacaccaugaacagccugacccuccccuccgaggugaaccugugcaacaucgacaucuucaaccccaaguacgacugcaagaucaugacgagcaagaccgacguguccagcuccgucaucaccagccugggcgccaucguguccugcuacgggaagaccaagugcacggcgagcaacaagaaccgcggcaucaucaagaccuucuccaacgggugcgacuacgugagcaacaagggcgucgacaccgugagcgugggcaacacccucuacuacgucaacaagcaggaggggaagucccuguacgugaagggcgagcccaucaucaacuucuacgacccgcugguguuccccagcgacgaguucgacgccuccaucagccaggucaacgagaagaucaaccagucccucgccuucauccggaaguccgacgagcugcugcacaacgugaacguggggaaguccaccacgaacaucaugaucaccaccaucaucaucgucaucaucgugauccugcuccugcugaucgccgugggccucuuccuguacugcaaggcccgcagcacccccgucacgcuguccaaggaccagcucagcgggaucaacaacaucgcguucuccaacugaggacuaguguccaccugucccuccugggcugcuggauugucucguuuuccugccaaauaaacaggaucagcgcuuuacagaucuaaaaaaaaaaaaaaaaaaaaaaaaaaaaaaaaaaaaaaaaaaaaaaaaaaaaaaaaaaaaaaaaugcaucccccccccccccccccccccccccccccccaaaggcucuuuucagagccaccagaauu

SEQ ID NO: 12643 - RNA, 2036 nt, Artificial Sequence
  mRNA product Design e-2 comprising derived and/or modified sequence from HRSV(Memphis-37)__AIY60640.1__F0_DSCav1 (opt2)
gggagacccgugacccggaaguuguacggcuacgcgacuuucccucccacaaacccucgcgcccuuccuuuccuacuugggcccggcagaaagcuuaccauggagcuccccauccucaagaccaacgccaucaccaccauccucgccgccgucacccucugcuucgccuccucccagaacaucaccgaggaguucuaccaguccaccugcuccgccgucuccaagggcuaccucuccgcccuccgcaccggcugguacaccuccgucaucaccaucgagcucuccaacaucaaggagaacaagugcaacggcaccgacgccaaggucaagcucaucaagcaggagcucgacaaguacaagaacgccgucaccgagcuccagcuccucaugcaguccacccccgccgccaacaaccgcgcccgccgcgagcucccccgcuucaugaacuacacccucaacaacaccaagaacaacaacgucacccucuccaagaagcgcaagcgccgcuuccucggcuuccuccucggcgucggcuccgccaucgccuccggcaucgccgucugcaagguccuccaccucgagggcgaggucaacaagaucaagaacgcccuccucuccaccaacaaggccgucgucucccucuccaacggcgucuccguccucaccuucaagguccucgaccucaagaacuacaucgacaagcagcuccuccccauccucaacaagcaguccugcuccaucuccaacaucgagaccgucaucgaguuccagcagaagaacaaccgccuccucgagaucacccgcgaguucuccgucaacgccggcgucaccacccccgucuccaccuacaugcucaccaacuccgagcuccucucccucaucaacgacaugcccaucaccaacgaccagaagaagcucauguccaacaacguccagaucguccgccagcaguccuacuccaucaugugcaucaucaaggaggagguccucgccuacgucguccagcucccccucuacggcgucaucgacacccccugcuggaagcuccacaccuccccccucugcaccaccaacaccaaggagggcuccaacaucugccucacccgcaccgaccgcggcugguacugcgacaacgccggcuccgucuccuucuucccccaggccgagaccugcaagguccaguccaaccgcgucuucugcgacaccaugaacucccucacccuccccuccgaggucaaccucugcaacaucgacaucuucaaccccaaguacgacugcaagaucaugaccuccaagaccgacgucuccuccuccgucaucaccucccucggcgccaucgucuccugcuacggcaagaccaagugcaccgccuccaacaagaaccgcggcaucaucaagaccuucuccaacggcugcgacuacgucuccaacaagggcgucgacaccgucuccgucggcaacacccucuacuacgucaacaagcaggagggcaagucccucuacgucaagggcgagcccaucaucaacuucuacgacccccucgucuuccccuccgacgaguucgacgccuccaucucccaggucaacgagaagaucaaccagucccucgccuucauccgcaaguccgacgagcuccuccacaacgucaacgucggcaaguccaccaccaacaucaugaucaccaccaucaucaucgucaucaucgucauccuccuccuccucaucgccgucggccucuuccucuacugcaaggcccgcuccacccccgucacccucuccaaggaccagcucuccggcaucaacaacaucgccuucuccaacugaggacuaguguccaccugucccuccugggcugcuggauugucucguuuuccugccaaauaaacaggaucagcgcuuuacagaucuaaaaaaaaaaaaaaaaaaaaaaaaaaaaaaaaaaaaaaaaaaaaaaaaaaaaaaaaaaaaaaaaugcaucccccccccccccccccccccccccccccccaaaggcucuuuucagagccaccagaauu

SEQ ID NO: 12644 - RNA, 2036 nt, Artificial Sequence
  mRNA product Design e-2 comprising derived and/or modified sequence from HRSV(Memphis-37)__AIY60640.1__F0_DSCav1 (opt3)
gggagacccgugacccggaaguuguacggcuacgcgacuuucccucccacaaacccucgcgcccuuccuuuccuacuugggcccggcagaaagcuuaccauggagcugcccauccucaagaccaacgccauuacaacuauacuugcugcagugacgcugugcuucgccagcucccagaauaucaccgaagaguuuuaccaaucuacauguucagcggucaguaaaggcuauuugagcgcuuuaagaacugggugguacaccuccguuauuacaaucgaacugucuaacauuaaggagaauaaaugcaacggaaccgacgccaaggugaaacuaaucaagcaggaacucgauaaguauaaaaaugcaguaacugagcugcagcuucugaugcagucgaccccugccgcuaacaauagggcacggcgcgaguugccacgauucaugaacuacacacucaauaacacgaagaauaacaaugugacucugagcaaaaagcguaaaagaagguuucuggguuuccucuuaggcgucgggucagccauagcuaguggaaucgccguguguaagguucugcaccuugaaggcgaggugaacaagauuaaaaaugcguugcuguccaccaacaaggcagucgugucucuaagcaacgguguauccguucucacauuuaaagugcuggaccuuaagaauuauaucgauaaacaacuguugccgauucucaacaagcagucaugcaguaucagcaauauagaaacugucauugaguuccagcagaaaaacaaucggcuguuagagaucacccgcgaauuuucugugaacgccggggugacaacccccgucuccacguacaugcugacuaauucagagcuccuuagccugauuaacgacaugccuaucacaaaugaucaaaagaaguugaugaguaacaauguucagaucgugagacagcagucuuauuccauuauguguauaaucaaagaagagguacuagcuuacgugguccaacugccacucuacggagugauugacacccccugcuggaagcugcauacuagcccucuuuguacaaccaacacgaaagaaggcucgaauaucugccugaccaggacagaucggggcugguauugugacaacgccgggucuguuuccuucuuuccacaggcagagacuugcaaggugcagucaaaucgcgucuucugugauaccaugaacaguuugacacuccccagcgaggugaaccugugcaauauagacauuuuuaacccuaaauacgauugcaagaucaugacuuccaagaccgacguaucuagcucaguuaucacaaguuuaggagcuauuguguccuguuaugguaaaaccaagugcacugccagcaauaaaaaccgaggcaucauuaagacguucucuaaugggugugauuacgucucaaacaaaggaguggacacagucagugugggcaauacccuguauuacguuaacaagcaagaagguaagagccuauaugugaaaggggagccaauaaucaauuuuuacgacccgcucguauuccccuccgaugaguucgacgcgucuauuucgcaggucaacgaaaagaucaaucagagccuggccuuuaucagaaaauccgaugaacuuuugcacaacgugaauguuggaaagucaacuaccaacauuaugauaacaaccaucauuaucgugauuaucgucauacugcuccugcuuaucgcagugggccuguucuuguacugcaaagcuaggaguacuccuguaacacucucuaaggaccagcugagcggcauuaauaacaucgccuuuuccaacugaggacuaguguccaccugucccuccugggcugcuggauugucucguuuuccugccaaauaaacaggaucagcgcuuuacagaucuaaaaaaaaaaaaaaaaaaaaaaaaaaaaaaaaaaaaaaaaaaaaaaaaaaaaaaaaaaaaaaaaugcaucccccccccccccccccccccccccccccccaaaggcucuuuucagagccaccagaauu

SEQ ID NO: 12645 - RNA, 2036 nt, Artificial Sequence
  mRNA product Design e-2 comprising derived and/or modified sequence from HRSV(Memphis-37)__AIY60640.1__F0_DSCav1 (opt4)
gggagacccgugacccggaaguuguacggcuacgcgacuuucccucccacaaacccucgcgcccuuccuuuccuacuugggcccggcagaaagcuuaccauggagcugcccauccugaagaccaacgccaucaccaccauccuggccgccgugacccugugcuucgccagcagccagaacaucaccgaggaguucuaccagagcaccugcagcgccgugagcaagggcuaccugagcgcccugagaaccggcugguacaccagcgugaucaccaucgagcugagcaacaucaaggagaacaagugcaacggcaccgacgccaaggugaagcugaucaagcaggagcuggacaaguacaagaacgccgugaccgagcugcagcugcugaugcagagcacccccgccgccaacaacagagccagaagagagcugcccagauucaugaacuacacccugaacaacaccaagaacaacaacgugacccugagcaagaagagaaagagaagauuccugggcuuccugcugggcgugggcagcgccaucgccagcggcaucgccgugugcaaggugcugcaccuggagggcgaggugaacaagaucaagaacgcccugcugagcaccaacaaggccguggugagccugagcaacggcgugagcgugcugaccuucaaggugcuggaccugaagaacuacaucgacaagcagcugcugcccauccugaacaagcagagcugcagcaucagcaacaucgagaccgugaucgaguuccagcagaagaacaacagacugcuggagaucaccagagaguucagcgugaacgccggcgugaccacccccgugagcaccuacaugcugaccaacagcgagcugcugagccugaucaacgacaugcccaucaccaacgaccagaagaagcugaugagcaacaacgugcagaucgugagacagcagagcuacagcaucaugugcaucaucaaggaggaggugcuggccuacguggugcagcugccccuguacggcgugaucgacacccccugcuggaagcugcacaccagcccccugugcaccaccaacaccaaggagggcagcaacaucugccugaccagaaccgacagaggcugguacugcgacaacgccggcagcgugagcuucuucccccaggccgagaccugcaaggugcagagcaacagaguguucugcgacaccaugaacagccugacccugcccagcgaggugaaccugugcaacaucgacaucuucaaccccaaguacgacugcaagaucaugaccagcaagaccgacgugagcagcagcgugaucaccagccugggcgccaucgugagcugcuacggcaagaccaagugcaccgccagcaacaagaacagaggcaucaucaagaccuucagcaacggcugcgacuacgugagcaacaagggcguggacaccgugagcgugggcaacacccuguacuacgugaacaagcaggagggcaagagccuguacgugaagggcgagcccaucaucaacuucuacgacccccugguguuccccagcgacgaguucgacgccagcaucagccaggugaacgagaagaucaaccagagccuggccuucaucagaaagagcgacgagcugcugcacaacgugaacgugggcaagagcaccaccaacaucaugaucaccaccaucaucaucgugaucaucgugauccugcugcugcugaucgccgugggccuguuccuguacugcaaggccagaagcacccccgugacccugagcaaggaccagcugagcggcaucaacaacaucgccuucagcaacugaggacuaguguccaccugucccuccugggcugcuggauugucucguuuuccugccaaauaaacaggaucagcgcuuuacagaucuaaaaaaaaaaaaaaaaaaaaaaaaaaaaaaaaaaaaaaaaaaaaaaaaaaaaaaaaaaaaaaaaugcaucccccccccccccccccccccccccccccccaaaggcucuuuucagagccaccagaauu

SEQ ID NO: 12646 - RNA, 2036 nt, Artificial Sequence
  mRNA product Design e-2 comprising derived and/or modified sequence from HRSV(Memphis-37)__AIY60640.1__F0_DSCav1 (opt5)
gggagacccgugacccggaaguuguacggcuacgcgacuuucccucccacaaacccucgcgcccuuccuuuccuacuugggcccggcagaaagcuuaccauggagcugcccauccucaagaccaacgccauuacaacgauccuggcugccgugacccuuugcuucgcgagcucccagaauauuacagaagaguuuuaccaaucuaccuguagcgcugucuccaaaggcuaucugucugcccucagaacagggugguacaccagcguuaucacaauugaacuguccaacaucaaggagaauaaaugcaacggaaccgacgccaaggugaaacuuaucaagcaggaacuggauaaguauaaaaaugcugugacggagcuccagcugcugaugcagucuaccccugccgcuaacaaucgggcccgcagagagcucccgcgguucaugaacuacacacugaauaacaccaagaauaacaaugucacacuuagcaaaaagcgcaaaagacgguuucugggcuuccuccugggggugggauccgcgauugccagcggcaucgcuguuuguaaggugcuucaccuggaaggggaggucaacaagauuaaaaaugcccuccugucuaccaacaaggcugugguuucccugagcaacggagugucuguccucacguuuaaagugcuggaccuuaagaauuauaucgauaaacaacugcuccccauucugaacaagcaguccugcagcaucucuaauauugaaacagugaucgaguuccagcagaaaaacaaucgccuucuggagaucaccagagaauuuuccgucaacgccggcguuacaaccccugugagcaccuacaugcucacaaauuccgagcugcugucucucauuaacgacaugcccaucacgaaugaucaaaagaagcugaugagcaacaaugugcagauuguccggcagcaguccuauagcaucauguguauuaucaaagaagaggugcuugcguacguugugcaacugccucucuacggcgucaucgacacccccugcuggaagcugcauacaucuccucuuuguaccacaaacaccaaagaaggguccaauauuugccugacgcgcacagauagaggaugguauugugacaacgccggcagcgugucuuucuuuccgcaggcugagaccugcaagguucagagcaaucggguguucugugauaccaugaacucccucacacugcccucugaggucaaccugugcaauaucgacauuuuuaacccuaaauacgauugcaagaucaugaccagcaagacagacguguccagcucugucauuacgucccucggggccaucgugagcuguuauggaaaaaccaagugcacagcuucuaauaaaaaccgcggcaucauuaagaccuucuccaaugggugugauuacguuagcaacaaaggaguggacacagucuccgugggcaauacccuguauuacguuaacaagcaagaaggcaagucucuuuaugugaaaggggagcccaucauuaauuuuuacgacccucuggucuuccccagcgaugaguucgacgccuccaucucucaggugaacgaaaagauuaaucagagccucgccuuuaucagaaaauccgaugaacugcugcacaacgugaauguuggaaagagcacgaccaacauuaugaucacaaccaucauuaucgucauuaucgugauucuucuccugcugaucgcugugggccucuuccuguacugcaaagcgcggucuacaccggucacccuuuccaaggaccagcugagcgggaucaauaacauugccuuuucuaacugaggacuaguguccaccugucccuccugggcugcuggauugucucguuuuccugccaaauaaacaggaucagcgcuuuacagaucuaaaaaaaaaaaaaaaaaaaaaaaaaaaaaaaaaaaaaaaaaaaaaaaaaaaaaaaaaaaaaaaaugcaucccccccccccccccccccccccccccccccaaaggcucuuuucagagccaccagaauu

SEQ ID NO: 12647 - RNA, 2036 nt, Artificial Sequence
  mRNA product Design e-2 comprising derived and/or modified sequence from HRSV(Memphis-37)__AIY60640.1__F0_DSCav1 (opt6)
gggagacccgugacccggaaguuguacggcuacgcgacuuucccucccacaaacccucgcgcccuuccuuuccuacuugggcccggcagaaagcuuaccauggaacucccaauccucaaaaccaaugccauaacaaccauacucgcugcaguaaccuuauguuucgcaaguagccaaaacauaaccgaagaauuuuaucaauccacaugcuccgcaguuucuaaaggauaucuaucagcauuaagaacuggaugguacacaucuguaauaacuauagaacuaagcaauauaaaagaaaacaaauguaacggaacugacgcuaaaguaaaacuuauaaaacaagaacuagauaaauacaaaaacgccguuaccgaacuacaacuauuaaugcaaucaacaccagccgcaaauaacagagcaagacgcgaauuaccaagauucaugaauuacacacuaaacaauacaaaaaauaacaauguaacacuaucaaaaaaaagaaaacgacgauucuuaggcuuccuacuaggagucggcucagcaauagcuuccggaauagccgucuguaaaguccuacaccuugaaggcgaaguaaacaaaaucaaaaacgcacuauuaucaacaaacaaagcagucguaucuuuauccaacggagucucaguccuaacauucaaaguacucgauuuaaaaaacuacaucgauaaacaacuccuucccauucuaaacaaacaauccugcucaauauccaacaucgaaacagucauagaauuucaacaaaaaaacaaccgccugcuagaaauaacaagagaauuuuccguaaaugccggcgucaccacaccaguaucaacauacaugcuaacaaacuccgaacuacucucccuaauaaacgauaugccaaucaccaacgaccaaaaaaaacuaaugucaaauaacguucaaauagucagacaacaaucauacagcauaaugugcauaauaaaagaagaagucuuagccuacguuguacaacucccauuauacggaguuaucgauacaccaugcuggaaauuacacacaucacccuuaugcaccacaaacacaaaagaaggauccaauauuugucuaacacgaacagacagaggaugguacugugauaacgcaggaucagugucauucuuuccacaagcagaaacauguaaaguucaaucuaacagaguauucugcgacaccaugaacucccuaaccuuacccucagaaguaaaucuaugcaacauagauaucuuuaacccaaaauacgacugcaaaaucaugacaucaaaaacugacguuucuucauccguuauaacuucccucggcgcuauaguguccugcuacggaaaaacuaaaugcacagcauccaacaaaaauagaggaauaauaaaaacauuuuccaacggcugcgacuauguuucaaacaaaggaguagauaccguaucagucggcaauacauuauauuauguuaacaaacaagaaggaaaaucccuauacguaaaaggagaaccuauaaucaacuucuacgacccacucguauuccccucagacgaauuugacgcaucuauaucucaaguaaaugaaaaaauaaaccaaucacucgcauuuauccgcaaaucugacgaauuacuccauaacgucaacgucggcaaaucaaccaccaacauaaugauaacaacaauuauaauaguaauaauugucauacuacuacuccuaauagcaguaggucuauuccuauacugcaaagcaagauccacccccguaacccuuuccaaagaucaacucucaggaauaaauaacauagccuuuucaaacuaaggacuaguguccaccugucccuccugggcugcuggauugucucguuuuccugccaaauaaacaggaucagcgcuuuacagaucuaaaaaaaaaaaaaaaaaaaaaaaaaaaaaaaaaaaaaaaaaaaaaaaaaaaaaaaaaaaaaaaaugcaucccccccccccccccccccccccccccccccaaaggcucuuuucagagccaccagaauu

SEQ ID NO: 12648 - RNA, 2036 nt, Artificial Sequence
  mRNA product Design e-2 comprising derived and/or modified sequence from HRSV(Memphis-37)__AIY60640.1__F0_DSCav1 (opt11)
gggagacccgugacccggaaguuguacggcuacgcgacuuucccucccacaaacccucgcgcccuuccuuuccuacuugggcccggcagaaagcuuaccauggaacuccccauacucaagacuaaugccaucaccaccauccucgccgccgugacccucugcuucgcaucgucccaaaacauaacagaagaguucuaccaaagcacaugcuccgcagucuccaaaggauaccucuccgcacuacguaccggcugguacaccagcgucaucaccaucgaacuuuccaacaucaaagagaacaaaugcaacggcaccgacgccaaaguaaaacucauaaaacaagagcuagacaaauacaaaaacgccgucacagaacuccaacuacugaugcaauccacaccggccgccaacaaccgcgcucgacgugaacucccacgcuucaugaacuacacucuuaacaacaccaaaaauaacaacgucacccuauccaaaaagcgaaagcgcagauuccucggcuuccuacuuggcgucggcucggcgauagccucuggaaucgccguuugcaagguccuccaccuagaaggcgaaguaaacaaaaucaaaaacgcacuccuaagcaccaacaaagccgucgucucacuuuccaacggcgucucaguccucacauucaaaguucucgaccuaaagaacuacaucgacaagcaacuacuacccauacucaauaaacaauccugcuccaucagcaacaucgagacagucaucgaauuucaacaaaagaacaaccgccuccucgaaauuacacgcgaguucucagucaacgccggagucaccaccccagucucaacauacaugcucaccaacagcgaacuccugucucuaaucaacgacaugcccaucacuaacgaccagaagaaacucauguccaacaacguccaaaucgugcgacaacaaucauacucuaucaugugcaucaucaaagaagaaguccucgcauacgucguccagcucccacucuacggcguaaucgacacacccugcuggaaacuccacacaucaccccuaugcaccaccaacacaaaagaaggcuccaacaucugccuaacccgaaccgacagagguugguauugcgacaacgccggcucagucucauucuucccacaagccgaaaccuguaaaguccaaucaaaccgcgucuucugcgauaccaugaacucucucacacuccccuccgaagucaaucucugcaacauagacaucuucaauccaaaguacgacugcaaaauaaugaccucgaaaaccgacguaagcuccagcgucaucaccuccuuaggcgcaaucguauccugcuacggcaaaaccaaaugcaccgccucaaacaaaaacagaggcaucaucaaaacguucucgaacggaugcgacuacguuuccaauaaaggcguagauaccgucuccgucggcaacacacucuauuacgucaacaaacaagaaggcaaaucccucuacgucaaaggugaaccuaucaucaacuucuacgacccccucgucuuccccagcgacgaguucgaugccucaaucagccaagucaacgagaaaaucaaccaaucacuggcuuucauacgcaaauccgacgaacuccuccacaacgugaacgucggcaaauccacaaccaacaucaugauaaccacaauaaucaucgucauaaucguaauccuacuccuccuuauugccguaggacuauuccuauacugcaaagcccgauccacccccgucacccucucaaaagaccaacucuccggcaucaacaauauagccuucucuaacuaaggacuaguguccaccugucccuccugggcugcuggauugucucguuuuccugccaaauaaacaggaucagcgcuuuacagaucuaaaaaaaaaaaaaaaaaaaaaaaaaaaaaaaaaaaaaaaaaaaaaaaaaaaaaaaaaaaaaaaaugcaucccccccccccccccccccccccccccccccaaaggcucuuuucagagccaccagaauu

SEQ ID NO: 12649 - RNA, 2006 nt, Artificial Sequence
  mRNA product Design e-3 comprising derived and/or modified sequence from HRSV(Memphis-37)__AIY60640.1__F0_DSCav1 (opt1)
gggagacuuucccauucuguagcagaauuugguguugccuguggucuuggucccgcggagaagcuuaccauggagcugcccauccucaagaccaacgccaucaccacgauccuggccgcggugacccugugcuucgccagcucccagaacaucaccgaggaguucuaccagagcacgugcuccgccgucagcaagggcuaccucuccgcccugcgcaccgggugguacaccagcgugaucaccaucgagcuguccaacaucaaggagaacaagugcaacggcaccgacgccaaggugaagcucaucaagcaggagcuggacaaguacaagaacgcggucacggagcugcagcuccugaugcagagcaccccggccgccaacaaccgggcccgccgggagcugccccgcuucaugaacuacacccucaacaacaccaagaacaacaacgugacgcuguccaagaagcggaagcgccgguuccugggguuccuccugggcguggggagcgcgaucgccuccggcaucgccgucugcaaggugcugcaccucgagggcgaggugaacaagaucaagaacgcccugcuguccaccaacaaggccgucgugagccucuccaacggggugagcguccugaccuucaaggugcuggaccucaagaacuacaucgacaagcagcugcugcccauccugaacaagcagagcugcuccaucagcaacaucgagaccgucaucgaguuccagcagaagaacaaccgccuccuggagaucacgcgggaguucagcgugaacgcgggcgugaccacccccgucuccaccuacaugcugacgaacagcgagcuccugucccugaucaacgacaugccgaucaccaacgaccagaagaagcucaugagcaacaacgugcagaucgugcgccagcaguccuacagcaucaugugcaucaucaaggaggagguccuggccuacguggugcagcugccccucuacggggucaucgacacccccugcuggaagcugcacaccagcccccugugcacgaccaacaccaaggagggcuccaacaucugccucacccggacggaccgcgggugguacugcgacaacgccggcagcguguccuucuucccgcaggccgagaccugcaagguccagagcaaccggguguucugcgacaccaugaacucccugacccugcccagcgaggugaaccucugcaacaucgacaucuucaaccccaaguacgacugcaagaucaugacguccaagaccgacgucagcuccagcgugaucaccucccugggcgccaucgugagcugcuacgggaagaccaagugcacggcgagcaacaagaaccgcggcaucaucaagaccuucuccaacgggugcgacuacgucagcaacaagggcguggacaccguguccgucggcaacacccuguacuacgugaacaagcaggagggcaagagccucuacgugaagggggagcccaucaucaacuucuacgacccgcuggucuuccccuccgacgaguucgacgccagcaucucccaggugaacgagaagaucaaccagagccuggccuucauccggaaguccgacgagcuccugcacaacgugaacgucggcaagagcaccacgaacaucaugaucaccaccaucaucaucgugaucaucgugauccugcugcuccugaucgccgucgggcuguuccucuacugcaaggcccgcuccacccccgugacgcugagcaaggaccagcuguccgggaucaacaacaucgcguucagcaacugaggacuaguguccaccugucccuccugggcugcuggauugucucguuuuccugccaaauaaacaggaucagcgcuuuacagaucuaaaaaaaaaaaaaaaaaaaaaaaaaaaaaaaaaaaaaaaaaaaaaaaaaaaaaaaaaaaaaaaaugcaucccccccccccccccccccccccccccccccaaaggcucuuuucagagccaccagaauu

SEQ ID NO: 12650 - RNA, 2006 nt, Artificial Sequence
  mRNA product Design e-3 comprising derived and/or modified sequence from HRSV(Memphis-37)__AIY60640.1__F0_DSCav1 (opt1)
gggagacuuucccauucuguagcagaauuugguguugccuguggucuuggucccgcggagaagcuuaccauggagcugcccauccucaagaccaacgccaucaccacgauccuggccgcggugacccugugcuucgccagcucccagaacaucaccgaggaguucuaccagagcacgugcuccgccgucagcaagggcuaccucuccgcccugcgcaccgggugguacaccagcgugaucaccaucgagcuguccaacaucaaggagaacaagugcaacggcaccgacgccaaggugaagcucaucaagcaggagcuggacaaguacaagaacgcggucacggagcugcagcuccugaugcagagcaccccggccgccaacaaccgggcccgccgggagcugccccgcuucaugaacuacacccucaacaacaccaagaacaacaacgugacgcuguccaagaagcggaagcgccgguuccugggguuccuccugggcguggggagcgcgaucgccuccggcaucgccgucugcaaggugcugcaccucgagggcgaggugaacaagaucaagaacgcccugcugagcaccaacaaggccgucgugucccucagcaacgggguguccguccugaccuucaaggugcuggaccucaagaacuacaucgacaagcagcugcugcccauccucaacaagcagagcugcuccaucagcaacaucgagaccgugaucgaguuccagcagaagaacaaccgccugcuggagaucacgcgggaguucuccgucaacgcgggcgugaccacccccgugagcaccuacaugcucacgaacagcgagcugcugucccucaucaacgacaugccgaucaccaacgaccagaagaagcugaugagcaacaacguccagaucgugcgccagcaguccuacagcaucaugugcaucaucaaggaggaggugcuggccuacgucgugcagcucccccuguacggggugaucgacacccccugcuggaagcugcacaccagcccccucugcacgaccaacaccaaggagggcagcaacaucugccugacccggacggaccgcgggugguacugcgacaacgccggcuccgucagcuucuucccgcaggccgagaccugcaaggugcaguccaaccgggucuucugcgacaccaugaacagccugacccuccccuccgaggugaaccugugcaacaucgacaucuucaaccccaaguacgacugcaagaucaugacgagcaagaccgacguguccagcuccgucaucaccagccugggcgccaucguguccugcuacgggaagaccaagugcacggcgagcaacaagaaccgcggcaucaucaagaccuucuccaacgggugcgacuacgugagcaacaagggcgucgacaccgugagcgugggcaacacccucuacuacgucaacaagcaggaggggaagucccuguacgugaagggcgagcccaucaucaacuucuacgacccgcugguguuccccagcgacgaguucgacgccuccaucagccaggucaacgagaagaucaaccagucccucgccuucauccggaaguccgacgagcugcugcacaacgugaacguggggaaguccaccacgaacaucaugaucaccaccaucaucaucgucaucaucgugauccugcuccugcugaucgccgugggccucuuccuguacugcaaggcccgcagcacccccgucacgcuguccaaggaccagcucagcgggaucaacaacaucgcguucuccaacugaggacuaguguccaccugucccuccugggcugcuggauugucucguuuuccugccaaauaaacaggaucagcgcuuuacagaucuaaaaaaaaaaaaaaaaaaaaaaaaaaaaaaaaaaaaaaaaaaaaaaaaaaaaaaaaaaaaaaaaugcaucccccccccccccccccccccccccccccccaaaggcucuuuucagagccaccagaauu

SEQ ID NO: 12651 - RNA, 2006 nt, Artificial Sequence
  mRNA product Design e-3 comprising derived and/or modified sequence from HRSV(Memphis-37)__AIY60640.1__F0_DSCav1 (opt2)
gggagacuuucccauucuguagcagaauuugguguugccuguggucuuggucccgcggagaagcuuaccauggagcuccccauccucaagaccaacgccaucaccaccauccucgccgccgucacccucugcuucgccuccucccagaacaucaccgaggaguucuaccaguccaccugcuccgccgucuccaagggcuaccucuccgcccuccgcaccggcugguacaccuccgucaucaccaucgagcucuccaacaucaaggagaacaagugcaacggcaccgacgccaaggucaagcucaucaagcaggagcucgacaaguacaagaacgccgucaccgagcuccagcuccucaugcaguccacccccgccgccaacaaccgcgcccgccgcgagcucccccgcuucaugaacuacacccucaacaacaccaagaacaacaacgucacccucuccaagaagcgcaagcgccgcuuccucggcuuccuccucggcgucggcuccgccaucgccuccggcaucgccgucugcaagguccuccaccucgagggcgaggucaacaagaucaagaacgcccuccucuccaccaacaaggccgucgucucccucuccaacggcgucuccguccucaccuucaagguccucgaccucaagaacuacaucgacaagcagcuccuccccauccucaacaagcaguccugcuccaucuccaacaucgagaccgucaucgaguuccagcagaagaacaaccgccuccucgagaucacccgcgaguucuccgucaacgccggcgucaccacccccgucuccaccuacaugcucaccaacuccgagcuccucucccucaucaacgacaugcccaucaccaacgaccagaagaagcucauguccaacaacguccagaucguccgccagcaguccuacuccaucaugugcaucaucaaggaggagguccucgccuacgucguccagcucccccucuacggcgucaucgacacccccugcuggaagcuccacaccuccccccucugcaccaccaacaccaaggagggcuccaacaucugccucacccgcaccgaccgcggcugguacugcgacaacgccggcuccgucuccuucuucccccaggccgagaccugcaagguccaguccaaccgcgucuucugcgacaccaugaacucccucacccuccccuccgaggucaaccucugcaacaucgacaucuucaaccccaaguacgacugcaagaucaugaccuccaagaccgacgucuccuccuccgucaucaccucccucggcgccaucgucuccugcuacggcaagaccaagugcaccgccuccaacaagaaccgcggcaucaucaagaccuucuccaacggcugcgacuacgucuccaacaagggcgucgacaccgucuccgucggcaacacccucuacuacgucaacaagcaggagggcaagucccucuacgucaagggcgagcccaucaucaacuucuacgacccccucgucuuccccuccgacgaguucgacgccuccaucucccaggucaacgagaagaucaaccagucccucgccuucauccgcaaguccgacgagcuccuccacaacgucaacgucggcaaguccaccaccaacaucaugaucaccaccaucaucaucgucaucaucgucauccuccuccuccucaucgccgucggccucuuccucuacugcaaggcccgcuccacccccgucacccucuccaaggaccagcucuccggcaucaacaacaucgccuucuccaacugaggacuaguguccaccugucccuccugggcugcuggauugucucguuuuccugccaaauaaacaggaucagcgcuuuacagaucuaaaaaaaaaaaaaaaaaaaaaaaaaaaaaaaaaaaaaaaaaaaaaaaaaaaaaaaaaaaaaaaaugcaucccccccccccccccccccccccccccccccaaaggcucuuuucagagccaccagaauu

SEQ ID NO: 12652 - RNA, 2006 nt, Artificial Sequence
  mRNA product Design e-3 comprising derived and/or modified sequence from HRSV(Memphis-37)__AIY60640.1__F0_DSCav1 (opt3)
gggagacuuucccauucuguagcagaauuugguguugccuguggucuuggucccgcggagaagcuuaccauggagcugcccauccucaagaccaacgccauuacaacuauacuugcugcagugacgcugugcuucgccagcucccagaauaucaccgaagaguuuuaccaaucuacauguucagcggucaguaaaggcuauuugagcgcuuuaagaacugggugguacaccuccguuauuacaaucgaacugucuaacauuaaggagaauaaaugcaacggaaccgacgccaaggugaaacuaaucaagcaggaacucgauaaguauaaaaaugcaguaacugagcugcagcuucugaugcagucgaccccugccgcuaacaauagggcacggcgcgaguugccacgauucaugaacuacacacucaauaacacgaagaauaacaaugugacucugagcaaaaagcguaaaagaagguuucuggguuuccucuuaggcgucgggucagccauagcuaguggaaucgccguguguaagguucugcaccuugaaggcgaggugaacaagauuaaaaaugcguugcuguccaccaacaaggcagucgugucucuaagcaacgguguauccguucucacauuuaaagugcuggaccuuaagaauuauaucgauaaacaacuguugccgauucucaacaagcagucaugcaguaucagcaauauagaaacugucauugaguuccagcagaaaaacaaucggcuguuagagaucacccgcgaauuuucugugaacgccggggugacaacccccgucuccacguacaugcugacuaauucagagcuccuuagccugauuaacgacaugccuaucacaaaugaucaaaagaaguugaugaguaacaauguucagaucgugagacagcagucuuauuccauuauguguauaaucaaagaagagguacuagcuuacgugguccaacugccacucuacggagugauugacacccccugcuggaagcugcauacuagcccucuuuguacaaccaacacgaaagaaggcucgaauaucugccugaccaggacagaucggggcugguauugugacaacgccgggucuguuuccuucuuuccacaggcagagacuugcaaggugcagucaaaucgcgucuucugugauaccaugaacaguuugacacuccccagcgaggugaaccugugcaauauagacauuuuuaacccuaaauacgauugcaagaucaugacuuccaagaccgacguaucuagcucaguuaucacaaguuuaggagcuauuguguccuguuaugguaaaaccaagugcacugccagcaauaaaaaccgaggcaucauuaagacguucucuaaugggugugauuacgucucaaacaaaggaguggacacagucagugugggcaauacccuguauuacguuaacaagcaagaagguaagagccuauaugugaaaggggagccaauaaucaauuuuuacgacccgcucguauuccccuccgaugaguucgacgcgucuauuucgcaggucaacgaaaagaucaaucagagccuggccuuuaucagaaaauccgaugaacuuuugcacaacgugaauguuggaaagucaacuaccaacauuaugauaacaaccaucauuaucgugauuaucgucauacugcuccugcuuaucgcagugggccuguucuuguacugcaaagcuaggaguacuccuguaacacucucuaaggaccagcugagcggcauuaauaacaucgccuuuuccaacugaggacuaguguccaccugucccuccugggcugcuggauugucucguuuuccugccaaauaaacaggaucagcgcuuuacagaucuaaaaaaaaaaaaaaaaaaaaaaaaaaaaaaaaaaaaaaaaaaaaaaaaaaaaaaaaaaaaaaaaugcaucccccccccccccccccccccccccccccccaaaggcucuuuucagagccaccagaauu

SEQ ID NO: 12653 - RNA, 2006 nt, Artificial Sequence
  mRNA product Design e-3 comprising derived and/or modified sequence from HRSV(Memphis-37)__AIY60640.1__F0_DSCav1 (opt4)
gggagacuuucccauucuguagcagaauuugguguugccuguggucuuggucccgcggagaagcuuaccauggagcugcccauccugaagaccaacgccaucaccaccauccuggccgccgugacccugugcuucgccagcagccagaacaucaccgaggaguucuaccagagcaccugcagcgccgugagcaagggcuaccugagcgcccugagaaccggcugguacaccagcgugaucaccaucgagcugagcaacaucaaggagaacaagugcaacggcaccgacgccaaggugaagcugaucaagcaggagcuggacaaguacaagaacgccgugaccgagcugcagcugcugaugcagagcacccccgccgccaacaacagagccagaagagagcugcccagauucaugaacuacacccugaacaacaccaagaacaacaacgugacccugagcaagaagagaaagagaagauuccugggcuuccugcugggcgugggcagcgccaucgccagcggcaucgccgugugcaaggugcugcaccuggagggcgaggugaacaagaucaagaacgcccugcugagcaccaacaaggccguggugagccugagcaacggcgugagcgugcugaccuucaaggugcuggaccugaagaacuacaucgacaagcagcugcugcccauccugaacaagcagagcugcagcaucagcaacaucgagaccgugaucgaguuccagcagaagaacaacagacugcuggagaucaccagagaguucagcgugaacgccggcgugaccacccccgugagcaccuacaugcugaccaacagcgagcugcugagccugaucaacgacaugcccaucaccaacgaccagaagaagcugaugagcaacaacgugcagaucgugagacagcagagcuacagcaucaugugcaucaucaaggaggaggugcuggccuacguggugcagcugccccuguacggcgugaucgacacccccugcuggaagcugcacaccagcccccugugcaccaccaacaccaaggagggcagcaacaucugccugaccagaaccgacagaggcugguacugcgacaacgccggcagcgugagcuucuucccccaggccgagaccugcaaggugcagagcaacagaguguucugcgacaccaugaacagccugacccugcccagcgaggugaaccugugcaacaucgacaucuucaaccccaaguacgacugcaagaucaugaccagcaagaccgacgugagcagcagcgugaucaccagccugggcgccaucgugagcugcuacggcaagaccaagugcaccgccagcaacaagaacagaggcaucaucaagaccuucagcaacggcugcgacuacgugagcaacaagggcguggacaccgugagcgugggcaacacccuguacuacgugaacaagcaggagggcaagagccuguacgugaagggcgagcccaucaucaacuucuacgacccccugguguuccccagcgacgaguucgacgccagcaucagccaggugaacgagaagaucaaccagagccuggccuucaucagaaagagcgacgagcugcugcacaacgugaacgugggcaagagcaccaccaacaucaugaucaccaccaucaucaucgugaucaucgugauccugcugcugcugaucgccgugggccuguuccuguacugcaaggccagaagcacccccgugacccugagcaaggaccagcugagcggcaucaacaacaucgccuucagcaacugaggacuaguguccaccugucccuccugggcugcuggauugucucguuuuccugccaaauaaacaggaucagcgcuuuacagaucuaaaaaaaaaaaaaaaaaaaaaaaaaaaaaaaaaaaaaaaaaaaaaaaaaaaaaaaaaaaaaaaaugcaucccccccccccccccccccccccccccccccaaaggcucuuuucagagccaccagaauu

SEQ ID NO: 12654 - RNA, 2006 nt, Artificial Sequence
  mRNA product Design e-3 comprising derived and/or modified sequence from HRSV(Memphis-37)__AIY60640.1__F0_DSCav1 (opt5)
gggagacuuucccauucuguagcagaauuugguguugccuguggucuuggucccgcggagaagcuuaccauggagcugcccauccucaagaccaacgccauuacaacgauccuggcugccgugacccuuugcuucgcgagcucccagaauauuacagaagaguuuuaccaaucuaccuguagcgcugucuccaaaggcuaucugucugcccucagaacagggugguacaccagcguuaucacaauugaacuguccaacaucaaggagaauaaaugcaacggaaccgacgccaaggugaaacuuaucaagcaggaacuggauaaguauaaaaaugcugugacggagcuccagcugcugaugcagucuaccccugccgcuaacaaucgggcccgcagagagcucccgcgguucaugaacuacacacugaauaacaccaagaauaacaaugucacacuuagcaaaaagcgcaaaagacgguuucugggcuuccuccugggggugggauccgcgauugccagcggcaucgcuguuuguaaggugcuucaccuggaaggggaggucaacaagauuaaaaaugcccuccugucuaccaacaaggcugugguuucccugagcaacggagugucuguccucacguuuaaagugcuggaccuuaagaauuauaucgauaaacaacugcuccccauucugaacaagcaguccugcagcaucucuaauauugaaacagugaucgaguuccagcagaaaaacaaucgccuucuggagaucaccagagaauuuuccgucaacgccggcguuacaaccccugugagcaccuacaugcucacaaauuccgagcugcugucucucauuaacgacaugcccaucacgaaugaucaaaagaagcugaugagcaacaaugugcagauuguccggcagcaguccuauagcaucauguguauuaucaaagaagaggugcuugcguacguugugcaacugccucucuacggcgucaucgacacccccugcuggaagcugcauacaucuccucuuuguaccacaaacaccaaagaaggguccaauauuugccugacgcgcacagauagaggaugguauugugacaacgccggcagcgugucuuucuuuccgcaggcugagaccugcaagguucagagcaaucggguguucugugauaccaugaacucccucacacugcccucugaggucaaccugugcaauaucgacauuuuuaacccuaaauacgauugcaagaucaugaccagcaagacagacguguccagcucugucauuacgucccucggggccaucgugagcuguuauggaaaaaccaagugcacagcuucuaauaaaaaccgcggcaucauuaagaccuucuccaaugggugugauuacguuagcaacaaaggaguggacacagucuccgugggcaauacccuguauuacguuaacaagcaagaaggcaagucucuuuaugugaaaggggagcccaucauuaauuuuuacgacccucuggucuuccccagcgaugaguucgacgccuccaucucucaggugaacgaaaagauuaaucagagccucgccuuuaucagaaaauccgaugaacugcugcacaacgugaauguuggaaagagcacgaccaacauuaugaucacaaccaucauuaucgucauuaucgugauucuucuccugcugaucgcugugggccucuuccuguacugcaaagcgcggucuacaccggucacccuuuccaaggaccagcugagcgggaucaauaacauugccuuuucuaacugaggacuaguguccaccugucccuccugggcugcuggauugucucguuuuccugccaaauaaacaggaucagcgcuuuacagaucuaaaaaaaaaaaaaaaaaaaaaaaaaaaaaaaaaaaaaaaaaaaaaaaaaaaaaaaaaaaaaaaaugcaucccccccccccccccccccccccccccccccaaaggcucuuuucagagccaccagaauu

SEQ ID NO: 12655 - RNA, 2006 nt, Artificial Sequence
  mRNA product Design e-3 comprising derived and/or modified sequence from HRSV(Memphis-37)__AIY60640.1__F0_DSCav1 (opt6)
gggagacuuucccauucuguagcagaauuugguguugccuguggucuuggucccgcggagaagcuuaccauggaacucccaauccucaaaaccaaugccauaacaaccauacucgcugcaguaaccuuauguuucgcaaguagccaaaacauaaccgaagaauuuuaucaauccacaugcuccgcaguuucuaaaggauaucuaucagcauuaagaacuggaugguacacaucuguaauaacuauagaacuaagcaauauaaaagaaaacaaauguaacggaacugacgcuaaaguaaaacuuauaaaacaagaacuagauaaauacaaaaacgccguuaccgaacuacaacuauuaaugcaaucaacaccagccgcaaauaacagagcaagacgcgaauuaccaagauucaugaauuacacacuaaacaauacaaaaaauaacaauguaacacuaucaaaaaaaagaaaacgacgauucuuaggcuuccuacuaggagucggcucagcaauagcuuccggaauagccgucuguaaaguccuacaccuugaaggcgaaguaaacaaaaucaaaaacgcacuauuaucaacaaacaaagcagucguaucuuuauccaacggagucucaguccuaacauucaaaguacucgauuuaaaaaacuacaucgauaaacaacuccuucccauucuaaacaaacaauccugcucaauauccaacaucgaaacagucauagaauuucaacaaaaaaacaaccgccugcuagaaauaacaagagaauuuuccguaaaugccggcgucaccacaccaguaucaacauacaugcuaacaaacuccgaacuacucucccuaauaaacgauaugccaaucaccaacgaccaaaaaaaacuaaugucaaauaacguucaaauagucagacaacaaucauacagcauaaugugcauaauaaaagaagaagucuuagccuacguuguacaacucccauuauacggaguuaucgauacaccaugcuggaaauuacacacaucacccuuaugcaccacaaacacaaaagaaggauccaauauuugucuaacacgaacagacagaggaugguacugugauaacgcaggaucagugucauucuuuccacaagcagaaacauguaaaguucaaucuaacagaguauucugcgacaccaugaacucccuaaccuuacccucagaaguaaaucuaugcaacauagauaucuuuaacccaaaauacgacugcaaaaucaugacaucaaaaacugacguuucuucauccguuauaacuucccucggcgcuauaguguccugcuacggaaaaacuaaaugcacagcauccaacaaaaauagaggaauaauaaaaacauuuuccaacggcugcgacuauguuucaaacaaaggaguagauaccguaucagucggcaauacauuauauuauguuaacaaacaagaaggaaaaucccuauacguaaaaggagaaccuauaaucaacuucuacgacccacucguauuccccucagacgaauuugacgcaucuauaucucaaguaaaugaaaaaauaaaccaaucacucgcauuuauccgcaaaucugacgaauuacuccauaacgucaacgucggcaaaucaaccaccaacauaaugauaacaacaauuauaauaguaauaauugucauacuacuacuccuaauagcaguaggucuauuccuauacugcaaagcaagauccacccccguaacccuuuccaaagaucaacucucaggaauaaauaacauagccuuuucaaacuaaggacuaguguccaccugucccuccugggcugcuggauugucucguuuuccugccaaauaaacaggaucagcgcuuuacagaucuaaaaaaaaaaaaaaaaaaaaaaaaaaaaaaaaaaaaaaaaaaaaaaaaaaaaaaaaaaaaaaaaugcaucccccccccccccccccccccccccccccccaaaggcucuuuucagagccaccagaauu

SEQ ID NO: 12656 - RNA, 2006 nt, Artificial Sequence
  mRNA product Design e-3 comprising derived and/or modified sequence from HRSV(Memphis-37)__AIY60640.1__F0_DSCav1 (opt11)
gggagacuuucccauucuguagcagaauuugguguugccuguggucuuggucccgcggagaagcuuaccauggaacuccccauacucaagacuaaugccaucaccaccauccucgccgccgugacccucugcuucgcaucgucccaaaacauaacagaagaguucuaccaaagcacaugcuccgcagucuccaaaggauaccucuccgcacuacguaccggcugguacaccagcgucaucaccaucgaacuuuccaacaucaaagagaacaaaugcaacggcaccgacgccaaaguaaaacucauaaaacaagagcuagacaaauacaaaaacgccgucacagaacuccaacuacugaugcaauccacaccggccgccaacaaccgcgcucgacgugaacucccacgcuucaugaacuacacucuuaacaacaccaaaaauaacaacgucacccuauccaaaaagcgaaagcgcagauuccucggcuuccuacuuggcgucggcucggcgauagccucuggaaucgccguuugcaagguccuccaccuagaaggcgaaguaaacaaaaucaaaaacgcacuccuaagcaccaacaaagccgucgucucacuuuccaacggcgucucaguccucacauucaaaguucucgaccuaaagaacuacaucgacaagcaacuacuacccauacucaauaaacaauccugcuccaucagcaacaucgagacagucaucgaauuucaacaaaagaacaaccgccuccucgaaauuacacgcgaguucucagucaacgccggagucaccaccccagucucaacauacaugcucaccaacagcgaacuccugucucuaaucaacgacaugcccaucacuaacgaccagaagaaacucauguccaacaacguccaaaucgugcgacaacaaucauacucuaucaugugcaucaucaaagaagaaguccucgcauacgucguccagcucccacucuacggcguaaucgacacacccugcuggaaacuccacacaucaccccuaugcaccaccaacacaaaagaaggcuccaacaucugccuaacccgaaccgacagagguugguauugcgacaacgccggcucagucucauucuucccacaagccgaaaccuguaaaguccaaucaaaccgcgucuucugcgauaccaugaacucucucacacuccccuccgaagucaaucucugcaacauagacaucuucaauccaaaguacgacugcaaaauaaugaccucgaaaaccgacguaagcuccagcgucaucaccuccuuaggcgcaaucguauccugcuacggcaaaaccaaaugcaccgccucaaacaaaaacagaggcaucaucaaaacguucucgaacggaugcgacuacguuuccaauaaaggcguagauaccgucuccgucggcaacacacucuauuacgucaacaaacaagaaggcaaaucccucuacgucaaaggugaaccuaucaucaacuucuacgacccccucgucuuccccagcgacgaguucgaugccucaaucagccaagucaacgagaaaaucaaccaaucacuggcuuucauacgcaaauccgacgaacuccuccacaacgugaacgucggcaaauccacaaccaacaucaugauaaccacaauaaucaucgucauaaucguaauccuacuccuccuuauugccguaggacuauuccuauacugcaaagcccgauccacccccgucacccucucaaaagaccaacucuccggcaucaacaauauagccuucucuaacuaaggacuaguguccaccugucccuccugggcugcuggauugucucguuuuccugccaaauaaacaggaucagcgcuuuacagaucuaaaaaaaaaaaaaaaaaaaaaaaaaaaaaaaaaaaaaaaaaaaaaaaaaaaaaaaaaaaaaaaaugcaucccccccccccccccccccccccccccccccaaaggcucuuuucagagccaccagaauu

SEQ ID NO: 12657 - RNA, 2060 nt, Artificial Sequence
  mRNA product Design e-4 comprising derived and/or modified sequence from HRSV(Memphis-37)__AIY60640.1__F0_DSCav1 (opt1)
gggagacuccugucgggcggaaguaggaggaguagaguuuaaaaacaguacucuuuuuccgguucgggacguaguugaagcaacgacaagccggauaaccgcucuugagacaggaagcuuaccauggagcugcccauccucaagaccaacgccaucaccacgauccuggccgcggugacccugugcuucgccagcucccagaacaucaccgaggaguucuaccagagcacgugcuccgccgucagcaagggcuaccucuccgcccugcgcaccgggugguacaccagcgugaucaccaucgagcuguccaacaucaaggagaacaagugcaacggcaccgacgccaaggugaagcucaucaagcaggagcuggacaaguacaagaacgcggucacggagcugcagcuccugaugcagagcaccccggccgccaacaaccgggcccgccgggagcugccccgcuucaugaacuacacccucaacaacaccaagaacaacaacgugacgcuguccaagaagcggaagcgccgguuccugggguuccuccugggcguggggagcgcgaucgccuccggcaucgccgucugcaaggugcugcaccucgagggcgaggugaacaagaucaagaacgcccugcuguccaccaacaaggccgucgugagccucuccaacggggugagcguccugaccuucaaggugcuggaccucaagaacuacaucgacaagcagcugcugcccauccugaacaagcagagcugcuccaucagcaacaucgagaccgucaucgaguuccagcagaagaacaaccgccuccuggagaucacgcgggaguucagcgugaacgcgggcgugaccacccccgucuccaccuacaugcugacgaacagcgagcuccugucccugaucaacgacaugccgaucaccaacgaccagaagaagcucaugagcaacaacgugcagaucgugcgccagcaguccuacagcaucaugugcaucaucaaggaggagguccuggccuacguggugcagcugccccucuacggggucaucgacacccccugcuggaagcugcacaccagcccccugugcacgaccaacaccaaggagggcuccaacaucugccucacccggacggaccgcgggugguacugcgacaacgccggcagcguguccuucuucccgcaggccgagaccugcaagguccagagcaaccggguguucugcgacaccaugaacucccugacccugcccagcgaggugaaccucugcaacaucgacaucuucaaccccaaguacgacugcaagaucaugacguccaagaccgacgucagcuccagcgugaucaccucccugggcgccaucgugagcugcuacgggaagaccaagugcacggcgagcaacaagaaccgcggcaucaucaagaccuucuccaacgggugcgacuacgucagcaacaagggcguggacaccguguccgucggcaacacccuguacuacgugaacaagcaggagggcaagagccucuacgugaagggggagcccaucaucaacuucuacgacccgcuggucuuccccuccgacgaguucgacgccagcaucucccaggugaacgagaagaucaaccagagccuggccuucauccggaaguccgacgagcuccugcacaacgugaacgucggcaagagcaccacgaacaucaugaucaccaccaucaucaucgugaucaucgugauccugcugcuccugaucgccgucgggcuguuccucuacugcaaggcccgcuccacccccgugacgcugagcaaggaccagcuguccgggaucaacaacaucgcguucagcaacugaggacuaguguccaccugucccuccugggcugcuggauugucucguuuuccugccaaauaaacaggaucagcgcuuuacagaucuaaaaaaaaaaaaaaaaaaaaaaaaaaaaaaaaaaaaaaaaaaaaaaaaaaaaaaaaaaaaaaaaugcaucccccccccccccccccccccccccccccccaaaggcucuuuucagagccaccagaauu

SEQ ID NO: 12658 - RNA, 2060 nt, Artificial Sequence
  mRNA product Design e-4 comprising derived and/or modified sequence from HRSV(Memphis-37)__AIY60640.1__F0_DSCav1 (opt1)
gggagacuccugucgggcggaaguaggaggaguagaguuuaaaaacaguacucuuuuuccgguucgggacguaguugaagcaacgacaagccggauaaccgcucuugagacaggaagcuuaccauggagcugcccauccucaagaccaacgccaucaccacgauccuggccgcggugacccugugcuucgccagcucccagaacaucaccgaggaguucuaccagagcacgugcuccgccgucagcaagggcuaccucuccgcccugcgcaccgggugguacaccagcgugaucaccaucgagcuguccaacaucaaggagaacaagugcaacggcaccgacgccaaggugaagcucaucaagcaggagcuggacaaguacaagaacgcggucacggagcugcagcuccugaugcagagcaccccggccgccaacaaccgggcccgccgggagcugccccgcuucaugaacuacacccucaacaacaccaagaacaacaacgugacgcuguccaagaagcggaagcgccgguuccugggguuccuccugggcguggggagcgcgaucgccuccggcaucgccgucugcaaggugcugcaccucgagggcgaggugaacaagaucaagaacgcccugcugagcaccaacaaggccgucgugucccucagcaacgggguguccguccugaccuucaaggugcuggaccucaagaacuacaucgacaagcagcugcugcccauccucaacaagcagagcugcuccaucagcaacaucgagaccgugaucgaguuccagcagaagaacaaccgccugcuggagaucacgcgggaguucuccgucaacgcgggcgugaccacccccgugagcaccuacaugcucacgaacagcgagcugcugucccucaucaacgacaugccgaucaccaacgaccagaagaagcugaugagcaacaacguccagaucgugcgccagcaguccuacagcaucaugugcaucaucaaggaggaggugcuggccuacgucgugcagcucccccuguacggggugaucgacacccccugcuggaagcugcacaccagcccccucugcacgaccaacaccaaggagggcagcaacaucugccugacccggacggaccgcgggugguacugcgacaacgccggcuccgucagcuucuucccgcaggccgagaccugcaaggugcaguccaaccgggucuucugcgacaccaugaacagccugacccuccccuccgaggugaaccugugcaacaucgacaucuucaaccccaaguacgacugcaagaucaugacgagcaagaccgacguguccagcuccgucaucaccagccugggcgccaucguguccugcuacgggaagaccaagugcacggcgagcaacaagaaccgcggcaucaucaagaccuucuccaacgggugcgacuacgugagcaacaagggcgucgacaccgugagcgugggcaacacccucuacuacgucaacaagcaggaggggaagucccuguacgugaagggcgagcccaucaucaacuucuacgacccgcugguguuccccagcgacgaguucgacgccuccaucagccaggucaacgagaagaucaaccagucccucgccuucauccggaaguccgacgagcugcugcacaacgugaacguggggaaguccaccacgaacaucaugaucaccaccaucaucaucgucaucaucgugauccugcuccugcugaucgccgugggccucuuccuguacugcaaggcccgcagcacccccgucacgcuguccaaggaccagcucagcgggaucaacaacaucgcguucuccaacugaggacuaguguccaccugucccuccugggcugcuggauugucucguuuuccugccaaauaaacaggaucagcgcuuuacagaucuaaaaaaaaaaaaaaaaaaaaaaaaaaaaaaaaaaaaaaaaaaaaaaaaaaaaaaaaaaaaaaaaugcaucccccccccccccccccccccccccccccccaaaggcucuuuucagagccaccagaauu

SEQ ID NO: 12659 - RNA, 2060 nt, Artificial Sequence
  mRNA product Design e-4 comprising derived and/or modified sequence from HRSV(Memphis-37)__AIY60640.1__F0_DSCav1 (opt2)
gggagacuccugucgggcggaaguaggaggaguagaguuuaaaaacaguacucuuuuuccgguucgggacguaguugaagcaacgacaagccggauaaccgcucuugagacaggaagcuuaccauggagcuccccauccucaagaccaacgccaucaccaccauccucgccgccgucacccucugcuucgccuccucccagaacaucaccgaggaguucuaccaguccaccugcuccgccgucuccaagggcuaccucuccgcccuccgcaccggcugguacaccuccgucaucaccaucgagcucuccaacaucaaggagaacaagugcaacggcaccgacgccaaggucaagcucaucaagcaggagcucgacaaguacaagaacgccgucaccgagcuccagcuccucaugcaguccacccccgccgccaacaaccgcgcccgccgcgagcucccccgcuucaugaacuacacccucaacaacaccaagaacaacaacgucacccucuccaagaagcgcaagcgccgcuuccucggcuuccuccucggcgucggcuccgccaucgccuccggcaucgccgucugcaagguccuccaccucgagggcgaggucaacaagaucaagaacgcccuccucuccaccaacaaggccgucgucucccucuccaacggcgucuccguccucaccuucaagguccucgaccucaagaacuacaucgacaagcagcuccuccccauccucaacaagcaguccugcuccaucuccaacaucgagaccgucaucgaguuccagcagaagaacaaccgccuccucgagaucacccgcgaguucuccgucaacgccggcgucaccacccccgucuccaccuacaugcucaccaacuccgagcuccucucccucaucaacgacaugcccaucaccaacgaccagaagaagcucauguccaacaacguccagaucguccgccagcaguccuacuccaucaugugcaucaucaaggaggagguccucgccuacgucguccagcucccccucuacggcgucaucgacacccccugcuggaagcuccacaccuccccccucugcaccaccaacaccaaggagggcuccaacaucugccucacccgcaccgaccgcggcugguacugcgacaacgccggcuccgucuccuucuucccccaggccgagaccugcaagguccaguccaaccgcgucuucugcgacaccaugaacucccucacccuccccuccgaggucaaccucugcaacaucgacaucuucaaccccaaguacgacugcaagaucaugaccuccaagaccgacgucuccuccuccgucaucaccucccucggcgccaucgucuccugcuacggcaagaccaagugcaccgccuccaacaagaaccgcggcaucaucaagaccuucuccaacggcugcgacuacgucuccaacaagggcgucgacaccgucuccgucggcaacacccucuacuacgucaacaagcaggagggcaagucccucuacgucaagggcgagcccaucaucaacuucuacgacccccucgucuuccccuccgacgaguucgacgccuccaucucccaggucaacgagaagaucaaccagucccucgccuucauccgcaaguccgacgagcuccuccacaacgucaacgucggcaaguccaccaccaacaucaugaucaccaccaucaucaucgucaucaucgucauccuccuccuccucaucgccgucggccucuuccucuacugcaaggcccgcuccacccccgucacccucuccaaggaccagcucuccggcaucaacaacaucgccuucuccaacugaggacuaguguccaccugucccuccugggcugcuggauugucucguuuuccugccaaauaaacaggaucagcgcuuuacagaucuaaaaaaaaaaaaaaaaaaaaaaaaaaaaaaaaaaaaaaaaaaaaaaaaaaaaaaaaaaaaaaaaugcaucccccccccccccccccccccccccccccccaaaggcucuuuucagagccaccagaauu

SEQ ID NO: 12660 - RNA, 2060 nt, Artificial Sequence
  mRNA product Design e-4 comprising derived and/or modified sequence from HRSV(Memphis-37)__AIY60640.1__F0_DSCav1 (opt3)
gggagacuccugucgggcggaaguaggaggaguagaguuuaaaaacaguacucuuuuuccgguucgggacguaguugaagcaacgacaagccggauaaccgcucuugagacaggaagcuuaccauggagcugcccauccucaagaccaacgccauuacaacuauacuugcugcagugacgcugugcuucgccagcucccagaauaucaccgaagaguuuuaccaaucuacauguucagcggucaguaaaggcuauuugagcgcuuuaagaacugggugguacaccuccguuauuacaaucgaacugucuaacauuaaggagaauaaaugcaacggaaccgacgccaaggugaaacuaaucaagcaggaacucgauaaguauaaaaaugcaguaacugagcugcagcuucugaugcagucgaccccugccgcuaacaauagggcacggcgcgaguugccacgauucaugaacuacacacucaauaacacgaagaauaacaaugugacucugagcaaaaagcguaaaagaagguuucuggguuuccucuuaggcgucgggucagccauagcuaguggaaucgccguguguaagguucugcaccuugaaggcgaggugaacaagauuaaaaaugcguugcuguccaccaacaaggcagucgugucucuaagcaacgguguauccguucucacauuuaaagugcuggaccuuaagaauuauaucgauaaacaacuguugccgauucucaacaagcagucaugcaguaucagcaauauagaaacugucauugaguuccagcagaaaaacaaucggcuguuagagaucacccgcgaauuuucugugaacgccggggugacaacccccgucuccacguacaugcugacuaauucagagcuccuuagccugauuaacgacaugccuaucacaaaugaucaaaagaaguugaugaguaacaauguucagaucgugagacagcagucuuauuccauuauguguauaaucaaagaagagguacuagcuuacgugguccaacugccacucuacggagugauugacacccccugcuggaagcugcauacuagcccucuuuguacaaccaacacgaaagaaggcucgaauaucugccugaccaggacagaucggggcugguauugugacaacgccgggucuguuuccuucuuuccacaggcagagacuugcaaggugcagucaaaucgcgucuucugugauaccaugaacaguuugacacuccccagcgaggugaaccugugcaauauagacauuuuuaacccuaaauacgauugcaagaucaugacuuccaagaccgacguaucuagcucaguuaucacaaguuuaggagcuauuguguccuguuaugguaaaaccaagugcacugccagcaauaaaaaccgaggcaucauuaagacguucucuaaugggugugauuacgucucaaacaaaggaguggacacagucagugugggcaauacccuguauuacguuaacaagcaagaagguaagagccuauaugugaaaggggagccaauaaucaauuuuuacgacccgcucguauuccccuccgaugaguucgacgcgucuauuucgcaggucaacgaaaagaucaaucagagccuggccuuuaucagaaaauccgaugaacuuuugcacaacgugaauguuggaaagucaacuaccaacauuaugauaacaaccaucauuaucgugauuaucgucauacugcuccugcuuaucgcagugggccuguucuuguacugcaaagcuaggaguacuccuguaacacucucuaaggaccagcugagcggcauuaauaacaucgccuuuuccaacugaggacuaguguccaccugucccuccugggcugcuggauugucucguuuuccugccaaauaaacaggaucagcgcuuuacagaucuaaaaaaaaaaaaaaaaaaaaaaaaaaaaaaaaaaaaaaaaaaaaaaaaaaaaaaaaaaaaaaaaugcaucccccccccccccccccccccccccccccccaaaggcucuuuucagagccaccagaauu

SEQ ID NO: 12661 - RNA, 2060 nt, Artificial Sequence
  mRNA product Design e-4 comprising derived and/or modified sequence from HRSV(Memphis-37)__AIY60640.1__F0_DSCav1 (opt4)
gggagacuccugucgggcggaaguaggaggaguagaguuuaaaaacaguacucuuuuuccgguucgggacguaguugaagcaacgacaagccggauaaccgcucuugagacaggaagcuuaccauggagcugcccauccugaagaccaacgccaucaccaccauccuggccgccgugacccugugcuucgccagcagccagaacaucaccgaggaguucuaccagagcaccugcagcgccgugagcaagggcuaccugagcgcccugagaaccggcugguacaccagcgugaucaccaucgagcugagcaacaucaaggagaacaagugcaacggcaccgacgccaaggugaagcugaucaagcaggagcuggacaaguacaagaacgccgugaccgagcugcagcugcugaugcagagcacccccgccgccaacaacagagccagaagagagcugcccagauucaugaacuacacccugaacaacaccaagaacaacaacgugacccugagcaagaagagaaagagaagauuccugggcuuccugcugggcgugggcagcgccaucgccagcggcaucgccgugugcaaggugcugcaccuggagggcgaggugaacaagaucaagaacgcccugcugagcaccaacaaggccguggugagccugagcaacggcgugagcgugcugaccuucaaggugcuggaccugaagaacuacaucgacaagcagcugcugcccauccugaacaagcagagcugcagcaucagcaacaucgagaccgugaucgaguuccagcagaagaacaacagacugcuggagaucaccagagaguucagcgugaacgccggcgugaccacccccgugagcaccuacaugcugaccaacagcgagcugcugagccugaucaacgacaugcccaucaccaacgaccagaagaagcugaugagcaacaacgugcagaucgugagacagcagagcuacagcaucaugugcaucaucaaggaggaggugcuggccuacguggugcagcugccccuguacggcgugaucgacacccccugcuggaagcugcacaccagcccccugugcaccaccaacaccaaggagggcagcaacaucugccugaccagaaccgacagaggcugguacugcgacaacgccggcagcgugagcuucuucccccaggccgagaccugcaaggugcagagcaacagaguguucugcgacaccaugaacagccugacccugcccagcgaggugaaccugugcaacaucgacaucuucaaccccaaguacgacugcaagaucaugaccagcaagaccgacgugagcagcagcgugaucaccagccugggcgccaucgugagcugcuacggcaagaccaagugcaccgccagcaacaagaacagaggcaucaucaagaccuucagcaacggcugcgacuacgugagcaacaagggcguggacaccgugagcgugggcaacacccuguacuacgugaacaagcaggagggcaagagccuguacgugaagggcgagcccaucaucaacuucuacgacccccugguguuccccagcgacgaguucgacgccagcaucagccaggugaacgagaagaucaaccagagccuggccuucaucagaaagagcgacgagcugcugcacaacgugaacgugggcaagagcaccaccaacaucaugaucaccaccaucaucaucgugaucaucgugauccugcugcugcugaucgccgugggccuguuccuguacugcaaggccagaagcacccccgugacccugagcaaggaccagcugagcggcaucaacaacaucgccuucagcaacugaggacuaguguccaccugucccuccugggcugcuggauugucucguuuuccugccaaauaaacaggaucagcgcuuuacagaucuaaaaaaaaaaaaaaaaaaaaaaaaaaaaaaaaaaaaaaaaaaaaaaaaaaaaaaaaaaaaaaaaugcaucccccccccccccccccccccccccccccccaaaggcucuuuucagagccaccagaauu

SEQ ID NO: 12662 - RNA, 2060 nt, Artificial Sequence
  mRNA product Design e-4 comprising derived and/or modified sequence from HRSV(Memphis-37)__AIY60640.1__F0_DSCav1 (opt5)
gggagacuccugucgggcggaaguaggaggaguagaguuuaaaaacaguacucuuuuuccgguucgggacguaguugaagcaacgacaagccggauaaccgcucuugagacaggaagcuuaccauggagcugcccauccucaagaccaacgccauuacaacgauccuggcugccgugacccuuugcuucgcgagcucccagaauauuacagaagaguuuuaccaaucuaccuguagcgcugucuccaaaggcuaucugucugcccucagaacagggugguacaccagcguuaucacaauugaacuguccaacaucaaggagaauaaaugcaacggaaccgacgccaaggugaaacuuaucaagcaggaacuggauaaguauaaaaaugcugugacggagcuccagcugcugaugcagucuaccccugccgcuaacaaucgggcccgcagagagcucccgcgguucaugaacuacacacugaauaacaccaagaauaacaaugucacacuuagcaaaaagcgcaaaagacgguuucugggcuuccuccugggggugggauccgcgauugccagcggcaucgcuguuuguaaggugcuucaccuggaaggggaggucaacaagauuaaaaaugcccuccugucuaccaacaaggcugugguuucccugagcaacggagugucuguccucacguuuaaagugcuggaccuuaagaauuauaucgauaaacaacugcuccccauucugaacaagcaguccugcagcaucucuaauauugaaacagugaucgaguuccagcagaaaaacaaucgccuucuggagaucaccagagaauuuuccgucaacgccggcguuacaaccccugugagcaccuacaugcucacaaauuccgagcugcugucucucauuaacgacaugcccaucacgaaugaucaaaagaagcugaugagcaacaaugugcagauuguccggcagcaguccuauagcaucauguguauuaucaaagaagaggugcuugcguacguugugcaacugccucucuacggcgucaucgacacccccugcuggaagcugcauacaucuccucuuuguaccacaaacaccaaagaaggguccaauauuugccugacgcgcacagauagaggaugguauugugacaacgccggcagcgugucuuucuuuccgcaggcugagaccugcaagguucagagcaaucggguguucugugauaccaugaacucccucacacugcccucugaggucaaccugugcaauaucgacauuuuuaacccuaaauacgauugcaagaucaugaccagcaagacagacguguccagcucugucauuacgucccucggggccaucgugagcuguuauggaaaaaccaagugcacagcuucuaauaaaaaccgcggcaucauuaagaccuucuccaaugggugugauuacguuagcaacaaaggaguggacacagucuccgugggcaauacccuguauuacguuaacaagcaagaaggcaagucucuuuaugugaaaggggagcccaucauuaauuuuuacgacccucuggucuuccccagcgaugaguucgacgccuccaucucucaggugaacgaaaagauuaaucagagccucgccuuuaucagaaaauccgaugaacugcugcacaacgugaauguuggaaagagcacgaccaacauuaugaucacaaccaucauuaucgucauuaucgugauucuucuccugcugaucgcugugggccucuuccuguacugcaaagcgcggucuacaccggucacccuuuccaaggaccagcugagcgggaucaauaacauugccuuuucuaacugaggacuaguguccaccugucccuccugggcugcuggauugucucguuuuccugccaaauaaacaggaucagcgcuuuacagaucuaaaaaaaaaaaaaaaaaaaaaaaaaaaaaaaaaaaaaaaaaaaaaaaaaaaaaaaaaaaaaaaaugcaucccccccccccccccccccccccccccccccaaaggcucuuuucagagccaccagaauu

SEQ ID NO: 12663 - RNA, 2060 nt, Artificial Sequence
  mRNA product Design e-4 comprising derived and/or modified sequence from HRSV(Memphis-37)__AIY60640.1__F0_DSCav1 (opt6)
gggagacuccugucgggcggaaguaggaggaguagaguuuaaaaacaguacucuuuuuccgguucgggacguaguugaagcaacgacaagccggauaaccgcucuugagacaggaagcuuaccauggaacucccaauccucaaaaccaaugccauaacaaccauacucgcugcaguaaccuuauguuucgcaaguagccaaaacauaaccgaagaauuuuaucaauccacaugcuccgcaguuucuaaaggauaucuaucagcauuaagaacuggaugguacacaucuguaauaacuauagaacuaagcaauauaaaagaaaacaaauguaacggaacugacgcuaaaguaaaacuuauaaaacaagaacuagauaaauacaaaaacgccguuaccgaacuacaacuauuaaugcaaucaacaccagccgcaaauaacagagcaagacgcgaauuaccaagauucaugaauuacacacuaaacaauacaaaaaauaacaauguaacacuaucaaaaaaaagaaaacgacgauucuuaggcuuccuacuaggagucggcucagcaauagcuuccggaauagccgucuguaaaguccuacaccuugaaggcgaaguaaacaaaaucaaaaacgcacuauuaucaacaaacaaagcagucguaucuuuauccaacggagucucaguccuaacauucaaaguacucgauuuaaaaaacuacaucgauaaacaacuccuucccauucuaaacaaacaauccugcucaauauccaacaucgaaacagucauagaauuucaacaaaaaaacaaccgccugcuagaaauaacaagagaauuuuccguaaaugccggcgucaccacaccaguaucaacauacaugcuaacaaacuccgaacuacucucccuaauaaacgauaugccaaucaccaacgaccaaaaaaaacuaaugucaaauaacguucaaauagucagacaacaaucauacagcauaaugugcauaauaaaagaagaagucuuagccuacguuguacaacucccauuauacggaguuaucgauacaccaugcuggaaauuacacacaucacccuuaugcaccacaaacacaaaagaaggauccaauauuugucuaacacgaacagacagaggaugguacugugauaacgcaggaucagugucauucuuuccacaagcagaaacauguaaaguucaaucuaacagaguauucugcgacaccaugaacucccuaaccuuacccucagaaguaaaucuaugcaacauagauaucuuuaacccaaaauacgacugcaaaaucaugacaucaaaaacugacguuucuucauccguuauaacuucccucggcgcuauaguguccugcuacggaaaaacuaaaugcacagcauccaacaaaaauagaggaauaauaaaaacauuuuccaacggcugcgacuauguuucaaacaaaggaguagauaccguaucagucggcaauacauuauauuauguuaacaaacaagaaggaaaaucccuauacguaaaaggagaaccuauaaucaacuucuacgacccacucguauuccccucagacgaauuugacgcaucuauaucucaaguaaaugaaaaaauaaaccaaucacucgcauuuauccgcaaaucugacgaauuacuccauaacgucaacgucggcaaaucaaccaccaacauaaugauaacaacaauuauaauaguaauaauugucauacuacuacuccuaauagcaguaggucuauuccuauacugcaaagcaagauccacccccguaacccuuuccaaagaucaacucucaggaauaaauaacauagccuuuucaaacuaaggacuaguguccaccugucccuccugggcugcuggauugucucguuuuccugccaaauaaacaggaucagcgcuuuacagaucuaaaaaaaaaaaaaaaaaaaaaaaaaaaaaaaaaaaaaaaaaaaaaaaaaaaaaaaaaaaaaaaaugcaucccccccccccccccccccccccccccccccaaaggcucuuuucagagccaccagaauu

SEQ ID NO: 12664 - RNA, 2060 nt, Artificial Sequence
  mRNA product Design e-4 comprising derived and/or modified sequence from HRSV(Memphis-37)__AIY60640.1__F0_DSCav1 (opt11)
gggagacuccugucgggcggaaguaggaggaguagaguuuaaaaacaguacucuuuuuccgguucgggacguaguugaagcaacgacaagccggauaaccgcucuugagacaggaagcuuaccauggaacuccccauacucaagacuaaugccaucaccaccauccucgccgccgugacccucugcuucgcaucgucccaaaacauaacagaagaguucuaccaaagcacaugcuccgcagucuccaaaggauaccucuccgcacuacguaccggcugguacaccagcgucaucaccaucgaacuuuccaacaucaaagagaacaaaugcaacggcaccgacgccaaaguaaaacucauaaaacaagagcuagacaaauacaaaaacgccgucacagaacuccaacuacugaugcaauccacaccggccgccaacaaccgcgcucgacgugaacucccacgcuucaugaacuacacucuuaacaacaccaaaaauaacaacgucacccuauccaaaaagcgaaagcgcagauuccucggcuuccuacuuggcgucggcucggcgauagccucuggaaucgccguuugcaagguccuccaccuagaaggcgaaguaaacaaaaucaaaaacgcacuccuaagcaccaacaaagccgucgucucacuuuccaacggcgucucaguccucacauucaaaguucucgaccuaaagaacuacaucgacaagcaacuacuacccauacucaauaaacaauccugcuccaucagcaacaucgagacagucaucgaauuucaacaaaagaacaaccgccuccucgaaauuacacgcgaguucucagucaacgccggagucaccaccccagucucaacauacaugcucaccaacagcgaacuccugucucuaaucaacgacaugcccaucacuaacgaccagaagaaacucauguccaacaacguccaaaucgugcgacaacaaucauacucuaucaugugcaucaucaaagaagaaguccucgcauacgucguccagcucccacucuacggcguaaucgacacacccugcuggaaacuccacacaucaccccuaugcaccaccaacacaaaagaaggcuccaacaucugccuaacccgaaccgacagagguugguauugcgacaacgccggcucagucucauucuucccacaagccgaaaccuguaaaguccaaucaaaccgcgucuucugcgauaccaugaacucucucacacuccccuccgaagucaaucucugcaacauagacaucuucaauccaaaguacgacugcaaaauaaugaccucgaaaaccgacguaagcuccagcgucaucaccuccuuaggcgcaaucguauccugcuacggcaaaaccaaaugcaccgccucaaacaaaaacagaggcaucaucaaaacguucucgaacggaugcgacuacguuuccaauaaaggcguagauaccgucuccgucggcaacacacucuauuacgucaacaaacaagaaggcaaaucccucuacgucaaaggugaaccuaucaucaacuucuacgacccccucgucuuccccagcgacgaguucgaugccucaaucagccaagucaacgagaaaaucaaccaaucacuggcuuucauacgcaaauccgacgaacuccuccacaacgugaacgucggcaaauccacaaccaacaucaugauaaccacaauaaucaucgucauaaucguaauccuacuccuccuuauugccguaggacuauuccuauacugcaaagcccgauccacccccgucacccucucaaaagaccaacucuccggcaucaacaauauagccuucucuaacuaaggacuaguguccaccugucccuccugggcugcuggauugucucguuuuccugccaaauaaacaggaucagcgcuuuacagaucuaaaaaaaaaaaaaaaaaaaaaaaaaaaaaaaaaaaaaaaaaaaaaaaaaaaaaaaaaaaaaaaaugcaucccccccccccccccccccccccccccccccaaaggcucuuuucagagccaccagaauu

SEQ ID NO: 12665 - RNA, 2027 nt, Artificial Sequence
  mRNA product Design e-5 comprising derived and/or modified sequence from HRSV(Memphis-37)__AIY60640.1__F0_DSCav1 (opt1)
gggagagcggcucggccauuuugucccagucaguccggaggcugcggcugcagaaguaccgccugcggaguaacugcaaagaagcuuaccauggagcugcccauccucaagaccaacgccaucaccacgauccuggccgcggugacccugugcuucgccagcucccagaacaucaccgaggaguucuaccagagcacgugcuccgccgucagcaagggcuaccucuccgcccugcgcaccgggugguacaccagcgugaucaccaucgagcuguccaacaucaaggagaacaagugcaacggcaccgacgccaaggugaagcucaucaagcaggagcuggacaaguacaagaacgcggucacggagcugcagcuccugaugcagagcaccccggccgccaacaaccgggcccgccgggagcugccccgcuucaugaacuacacccucaacaacaccaagaacaacaacgugacgcuguccaagaagcggaagcgccgguuccugggguuccuccugggcguggggagcgcgaucgccuccggcaucgccgucugcaaggugcugcaccucgagggcgaggugaacaagaucaagaacgcccugcuguccaccaacaaggccgucgugagccucuccaacggggugagcguccugaccuucaaggugcuggaccucaagaacuacaucgacaagcagcugcugcccauccugaacaagcagagcugcuccaucagcaacaucgagaccgucaucgaguuccagcagaagaacaaccgccuccuggagaucacgcgggaguucagcgugaacgcgggcgugaccacccccgucuccaccuacaugcugacgaacagcgagcuccugucccugaucaacgacaugccgaucaccaacgaccagaagaagcucaugagcaacaacgugcagaucgugcgccagcaguccuacagcaucaugugcaucaucaaggaggagguccuggccuacguggugcagcugccccucuacggggucaucgacacccccugcuggaagcugcacaccagcccccugugcacgaccaacaccaaggagggcuccaacaucugccucacccggacggaccgcgggugguacugcgacaacgccggcagcguguccuucuucccgcaggccgagaccugcaagguccagagcaaccggguguucugcgacaccaugaacucccugacccugcccagcgaggugaaccucugcaacaucgacaucuucaaccccaaguacgacugcaagaucaugacguccaagaccgacgucagcuccagcgugaucaccucccugggcgccaucgugagcugcuacgggaagaccaagugcacggcgagcaacaagaaccgcggcaucaucaagaccuucuccaacgggugcgacuacgucagcaacaagggcguggacaccguguccgucggcaacacccuguacuacgugaacaagcaggagggcaagagccucuacgugaagggggagcccaucaucaacuucuacgacccgcuggucuuccccuccgacgaguucgacgccagcaucucccaggugaacgagaagaucaaccagagccuggccuucauccggaaguccgacgagcuccugcacaacgugaacgucggcaagagcaccacgaacaucaugaucaccaccaucaucaucgugaucaucgugauccugcugcuccugaucgccgucgggcuguuccucuacugcaaggcccgcuccacccccgugacgcugagcaaggaccagcuguccgggaucaacaacaucgcguucagcaacugaggacuaguguccaccugucccuccugggcugcuggauugucucguuuuccugccaaauaaacaggaucagcgcuuuacagaucuaaaaaaaaaaaaaaaaaaaaaaaaaaaaaaaaaaaaaaaaaaaaaaaaaaaaaaaaaaaaaaaaugcaucccccccccccccccccccccccccccccccaaaggcucuuuucagagccaccagaauu

SEQ ID NO: 12666 - RNA, 2027 nt, Artificial Sequence
  mRNA product Design e-5 comprising derived and/or modified sequence from HRSV(Memphis-37)__AIY60640.1__F0_DSCav1 (opt1)
gggagagcggcucggccauuuugucccagucaguccggaggcugcggcugcagaaguaccgccugcggaguaacugcaaagaagcuuaccauggagcugcccauccucaagaccaacgccaucaccacgauccuggccgcggugacccugugcuucgccagcucccagaacaucaccgaggaguucuaccagagcacgugcuccgccgucagcaagggcuaccucuccgcccugcgcaccgggugguacaccagcgugaucaccaucgagcuguccaacaucaaggagaacaagugcaacggcaccgacgccaaggugaagcucaucaagcaggagcuggacaaguacaagaacgcggucacggagcugcagcuccugaugcagagcaccccggccgccaacaaccgggcccgccgggagcugccccgcuucaugaacuacacccucaacaacaccaagaacaacaacgugacgcuguccaagaagcggaagcgccgguuccugggguuccuccugggcguggggagcgcgaucgccuccggcaucgccgucugcaaggugcugcaccucgagggcgaggugaacaagaucaagaacgcccugcugagcaccaacaaggccgucgugucccucagcaacgggguguccguccugaccuucaaggugcuggaccucaagaacuacaucgacaagcagcugcugcccauccucaacaagcagagcugcuccaucagcaacaucgagaccgugaucgaguuccagcagaagaacaaccgccugcuggagaucacgcgggaguucuccgucaacgcgggcgugaccacccccgugagcaccuacaugcucacgaacagcgagcugcugucccucaucaacgacaugccgaucaccaacgaccagaagaagcugaugagcaacaacguccagaucgugcgccagcaguccuacagcaucaugugcaucaucaaggaggaggugcuggccuacgucgugcagcucccccuguacggggugaucgacacccccugcuggaagcugcacaccagcccccucugcacgaccaacaccaaggagggcagcaacaucugccugacccggacggaccgcgggugguacugcgacaacgccggcuccgucagcuucuucccgcaggccgagaccugcaaggugcaguccaaccgggucuucugcgacaccaugaacagccugacccuccccuccgaggugaaccugugcaacaucgacaucuucaaccccaaguacgacugcaagaucaugacgagcaagaccgacguguccagcuccgucaucaccagccugggcgccaucguguccugcuacgggaagaccaagugcacggcgagcaacaagaaccgcggcaucaucaagaccuucuccaacgggugcgacuacgugagcaacaagggcgucgacaccgugagcgugggcaacacccucuacuacgucaacaagcaggaggggaagucccuguacgugaagggcgagcccaucaucaacuucuacgacccgcugguguuccccagcgacgaguucgacgccuccaucagccaggucaacgagaagaucaaccagucccucgccuucauccggaaguccgacgagcugcugcacaacgugaacguggggaaguccaccacgaacaucaugaucaccaccaucaucaucgucaucaucgugauccugcuccugcugaucgccgugggccucuuccuguacugcaaggcccgcagcacccccgucacgcuguccaaggaccagcucagcgggaucaacaacaucgcguucuccaacugaggacuaguguccaccugucccuccugggcugcuggauugucucguuuuccugccaaauaaacaggaucagcgcuuuacagaucuaaaaaaaaaaaaaaaaaaaaaaaaaaaaaaaaaaaaaaaaaaaaaaaaaaaaaaaaaaaaaaaaugcaucccccccccccccccccccccccccccccccaaaggcucuuuucagagccaccagaauu

SEQ ID NO: 12667 - RNA, 2027 nt, Artificial Sequence
  mRNA product Design e-5 comprising derived and/or modified sequence from HRSV(Memphis-37)__AIY60640.1__F0_DSCav1 (opt2)
gggagagcggcucggccauuuugucccagucaguccggaggcugcggcugcagaaguaccgccugcggaguaacugcaaagaagcuuaccauggagcuccccauccucaagaccaacgccaucaccaccauccucgccgccgucacccucugcuucgccuccucccagaacaucaccgaggaguucuaccaguccaccugcuccgccgucuccaagggcuaccucuccgcccuccgcaccggcugguacaccuccgucaucaccaucgagcucuccaacaucaaggagaacaagugcaacggcaccgacgccaaggucaagcucaucaagcaggagcucgacaaguacaagaacgccgucaccgagcuccagcuccucaugcaguccacccccgccgccaacaaccgcgcccgccgcgagcucccccgcuucaugaacuacacccucaacaacaccaagaacaacaacgucacccucuccaagaagcgcaagcgccgcuuccucggcuuccuccucggcgucggcuccgccaucgccuccggcaucgccgucugcaagguccuccaccucgagggcgaggucaacaagaucaagaacgcccuccucuccaccaacaaggccgucgucucccucuccaacggcgucuccguccucaccuucaagguccucgaccucaagaacuacaucgacaagcagcuccuccccauccucaacaagcaguccugcuccaucuccaacaucgagaccgucaucgaguuccagcagaagaacaaccgccuccucgagaucacccgcgaguucuccgucaacgccggcgucaccacccccgucuccaccuacaugcucaccaacuccgagcuccucucccucaucaacgacaugcccaucaccaacgaccagaagaagcucauguccaacaacguccagaucguccgccagcaguccuacuccaucaugugcaucaucaaggaggagguccucgccuacgucguccagcucccccucuacggcgucaucgacacccccugcuggaagcuccacaccuccccccucugcaccaccaacaccaaggagggcuccaacaucugccucacccgcaccgaccgcggcugguacugcgacaacgccggcuccgucuccuucuucccccaggccgagaccugcaagguccaguccaaccgcgucuucugcgacaccaugaacucccucacccuccccuccgaggucaaccucugcaacaucgacaucuucaaccccaaguacgacugcaagaucaugaccuccaagaccgacgucuccuccuccgucaucaccucccucggcgccaucgucuccugcuacggcaagaccaagugcaccgccuccaacaagaaccgcggcaucaucaagaccuucuccaacggcugcgacuacgucuccaacaagggcgucgacaccgucuccgucggcaacacccucuacuacgucaacaagcaggagggcaagucccucuacgucaagggcgagcccaucaucaacuucuacgacccccucgucuuccccuccgacgaguucgacgccuccaucucccaggucaacgagaagaucaaccagucccucgccuucauccgcaaguccgacgagcuccuccacaacgucaacgucggcaaguccaccaccaacaucaugaucaccaccaucaucaucgucaucaucgucauccuccuccuccucaucgccgucggccucuuccucuacugcaaggcccgcuccacccccgucacccucuccaaggaccagcucuccggcaucaacaacaucgccuucuccaacugaggacuaguguccaccugucccuccugggcugcuggauugucucguuuuccugccaaauaaacaggaucagcgcuuuacagaucuaaaaaaaaaaaaaaaaaaaaaaaaaaaaaaaaaaaaaaaaaaaaaaaaaaaaaaaaaaaaaaaaugcaucccccccccccccccccccccccccccccccaaaggcucuuuucagagccaccagaauu

SEQ ID NO: 12668 - RNA, 2027 nt, Artificial Sequence
  mRNA product Design e-5 comprising derived and/or modified sequence from HRSV(Memphis-37)__AIY60640.1__F0_DSCav1 (opt3)
gggagagcggcucggccauuuugucccagucaguccggaggcugcggcugcagaaguaccgccugcggaguaacugcaaagaagcuuaccauggagcugcccauccucaagaccaacgccauuacaacuauacuugcugcagugacgcugugcuucgccagcucccagaauaucaccgaagaguuuuaccaaucuacauguucagcggucaguaaaggcuauuugagcgcuuuaagaacugggugguacaccuccguuauuacaaucgaacugucuaacauuaaggagaauaaaugcaacggaaccgacgccaaggugaaacuaaucaagcaggaacucgauaaguauaaaaaugcaguaacugagcugcagcuucugaugcagucgaccccugccgcuaacaauagggcacggcgcgaguugccacgauucaugaacuacacacucaauaacacgaagaauaacaaugugacucugagcaaaaagcguaaaagaagguuucuggguuuccucuuaggcgucgggucagccauagcuaguggaaucgccguguguaagguucugcaccuugaaggcgaggugaacaagauuaaaaaugcguugcuguccaccaacaaggcagucgugucucuaagcaacgguguauccguucucacauuuaaagugcuggaccuuaagaauuauaucgauaaacaacuguugccgauucucaacaagcagucaugcaguaucagcaauauagaaacugucauugaguuccagcagaaaaacaaucggcuguuagagaucacccgcgaauuuucugugaacgccggggugacaacccccgucuccacguacaugcugacuaauucagagcuccuuagccugauuaacgacaugccuaucacaaaugaucaaaagaaguugaugaguaacaauguucagaucgugagacagcagucuuauuccauuauguguauaaucaaagaagagguacuagcuuacgugguccaacugccacucuacggagugauugacacccccugcuggaagcugcauacuagcccucuuuguacaaccaacacgaaagaaggcucgaauaucugccugaccaggacagaucggggcugguauugugacaacgccgggucuguuuccuucuuuccacaggcagagacuugcaaggugcagucaaaucgcgucuucugugauaccaugaacaguuugacacuccccagcgaggugaaccugugcaauauagacauuuuuaacccuaaauacgauugcaagaucaugacuuccaagaccgacguaucuagcucaguuaucacaaguuuaggagcuauuguguccuguuaugguaaaaccaagugcacugccagcaauaaaaaccgaggcaucauuaagacguucucuaaugggugugauuacgucucaaacaaaggaguggacacagucagugugggcaauacccuguauuacguuaacaagcaagaagguaagagccuauaugugaaaggggagccaauaaucaauuuuuacgacccgcucguauuccccuccgaugaguucgacgcgucuauuucgcaggucaacgaaaagaucaaucagagccuggccuuuaucagaaaauccgaugaacuuuugcacaacgugaauguuggaaagucaacuaccaacauuaugauaacaaccaucauuaucgugauuaucgucauacugcuccugcuuaucgcagugggccuguucuuguacugcaaagcuaggaguacuccuguaacacucucuaaggaccagcugagcggcauuaauaacaucgccuuuuccaacugaggacuaguguccaccugucccuccugggcugcuggauugucucguuuuccugccaaauaaacaggaucagcgcuuuacagaucuaaaaaaaaaaaaaaaaaaaaaaaaaaaaaaaaaaaaaaaaaaaaaaaaaaaaaaaaaaaaaaaaugcaucccccccccccccccccccccccccccccccaaaggcucuuuucagagccaccagaauu

SEQ ID NO: 12669 - RNA, 2027 nt, Artificial Sequence
  mRNA product Design e-5 comprising derived and/or modified sequence from HRSV(Memphis-37)__AIY60640.1__F0_DSCav1 (opt4)
gggagagcggcucggccauuuugucccagucaguccggaggcugcggcugcagaaguaccgccugcggaguaacugcaaagaagcuuaccauggagcugcccauccugaagaccaacgccaucaccaccauccuggccgccgugacccugugcuucgccagcagccagaacaucaccgaggaguucuaccagagcaccugcagcgccgugagcaagggcuaccugagcgcccugagaaccggcugguacaccagcgugaucaccaucgagcugagcaacaucaaggagaacaagugcaacggcaccgacgccaaggugaagcugaucaagcaggagcuggacaaguacaagaacgccgugaccgagcugcagcugcugaugcagagcacccccgccgccaacaacagagccagaagagagcugcccagauucaugaacuacacccugaacaacaccaagaacaacaacgugacccugagcaagaagagaaagagaagauuccugggcuuccugcugggcgugggcagcgccaucgccagcggcaucgccgugugcaaggugcugcaccuggagggcgaggugaacaagaucaagaacgcccugcugagcaccaacaaggccguggugagccugagcaacggcgugagcgugcugaccuucaaggugcuggaccugaagaacuacaucgacaagcagcugcugcccauccugaacaagcagagcugcagcaucagcaacaucgagaccgugaucgaguuccagcagaagaacaacagacugcuggagaucaccagagaguucagcgugaacgccggcgugaccacccccgugagcaccuacaugcugaccaacagcgagcugcugagccugaucaacgacaugcccaucaccaacgaccagaagaagcugaugagcaacaacgugcagaucgugagacagcagagcuacagcaucaugugcaucaucaaggaggaggugcuggccuacguggugcagcugccccuguacggcgugaucgacacccccugcuggaagcugcacaccagcccccugugcaccaccaacaccaaggagggcagcaacaucugccugaccagaaccgacagaggcugguacugcgacaacgccggcagcgugagcuucuucccccaggccgagaccugcaaggugcagagcaacagaguguucugcgacaccaugaacagccugacccugcccagcgaggugaaccugugcaacaucgacaucuucaaccccaaguacgacugcaagaucaugaccagcaagaccgacgugagcagcagcgugaucaccagccugggcgccaucgugagcugcuacggcaagaccaagugcaccgccagcaacaagaacagaggcaucaucaagaccuucagcaacggcugcgacuacgugagcaacaagggcguggacaccgugagcgugggcaacacccuguacuacgugaacaagcaggagggcaagagccuguacgugaagggcgagcccaucaucaacuucuacgacccccugguguuccccagcgacgaguucgacgccagcaucagccaggugaacgagaagaucaaccagagccuggccuucaucagaaagagcgacgagcugcugcacaacgugaacgugggcaagagcaccaccaacaucaugaucaccaccaucaucaucgugaucaucgugauccugcugcugcugaucgccgugggccuguuccuguacugcaaggccagaagcacccccgugacccugagcaaggaccagcugagcggcaucaacaacaucgccuucagcaacugaggacuaguguccaccugucccuccugggcugcuggauugucucguuuuccugccaaauaaacaggaucagcgcuuuacagaucuaaaaaaaaaaaaaaaaaaaaaaaaaaaaaaaaaaaaaaaaaaaaaaaaaaaaaaaaaaaaaaaaugcaucccccccccccccccccccccccccccccccaaaggcucuuuucagagccaccagaauu

SEQ ID NO: 12670 - RNA, 2027 nt, Artificial Sequence
  mRNA product Design e-5 comprising derived and/or modified sequence from HRSV(Memphis-37)__AIY60640.1__F0_DSCav1 (opt5)
gggagagcggcucggccauuuugucccagucaguccggaggcugcggcugcagaaguaccgccugcggaguaacugcaaagaagcuuaccauggagcugcccauccucaagaccaacgccauuacaacgauccuggcugccgugacccuuugcuucgcgagcucccagaauauuacagaagaguuuuaccaaucuaccuguagcgcugucuccaaaggcuaucugucugcccucagaacagggugguacaccagcguuaucacaauugaacuguccaacaucaaggagaauaaaugcaacggaaccgacgccaaggugaaacuuaucaagcaggaacuggauaaguauaaaaaugcugugacggagcuccagcugcugaugcagucuaccccugccgcuaacaaucgggcccgcagagagcucccgcgguucaugaacuacacacugaauaacaccaagaauaacaaugucacacuuagcaaaaagcgcaaaagacgguuucugggcuuccuccugggggugggauccgcgauugccagcggcaucgcuguuuguaaggugcuucaccuggaaggggaggucaacaagauuaaaaaugcccuccugucuaccaacaaggcugugguuucccugagcaacggagugucuguccucacguuuaaagugcuggaccuuaagaauuauaucgauaaacaacugcuccccauucugaacaagcaguccugcagcaucucuaauauugaaacagugaucgaguuccagcagaaaaacaaucgccuucuggagaucaccagagaauuuuccgucaacgccggcguuacaaccccugugagcaccuacaugcucacaaauuccgagcugcugucucucauuaacgacaugcccaucacgaaugaucaaaagaagcugaugagcaacaaugugcagauuguccggcagcaguccuauagcaucauguguauuaucaaagaagaggugcuugcguacguugugcaacugccucucuacggcgucaucgacacccccugcuggaagcugcauacaucuccucuuuguaccacaaacaccaaagaaggguccaauauuugccugacgcgcacagauagaggaugguauugugacaacgccggcagcgugucuuucuuuccgcaggcugagaccugcaagguucagagcaaucggguguucugugauaccaugaacucccucacacugcccucugaggucaaccugugcaauaucgacauuuuuaacccuaaauacgauugcaagaucaugaccagcaagacagacguguccagcucugucauuacgucccucggggccaucgugagcuguuauggaaaaaccaagugcacagcuucuaauaaaaaccgcggcaucauuaagaccuucuccaaugggugugauuacguuagcaacaaaggaguggacacagucuccgugggcaauacccuguauuacguuaacaagcaagaaggcaagucucuuuaugugaaaggggagcccaucauuaauuuuuacgacccucuggucuuccccagcgaugaguucgacgccuccaucucucaggugaacgaaaagauuaaucagagccucgccuuuaucagaaaauccgaugaacugcugcacaacgugaauguuggaaagagcacgaccaacauuaugaucacaaccaucauuaucgucauuaucgugauucuucuccugcugaucgcugugggccucuuccuguacugcaaagcgcggucuacaccggucacccuuuccaaggaccagcugagcgggaucaauaacauugccuuuucuaacugaggacuaguguccaccugucccuccugggcugcuggauugucucguuuuccugccaaauaaacaggaucagcgcuuuacagaucuaaaaaaaaaaaaaaaaaaaaaaaaaaaaaaaaaaaaaaaaaaaaaaaaaaaaaaaaaaaaaaaaugcaucccccccccccccccccccccccccccccccaaaggcucuuuucagagccaccagaauu

SEQ ID NO: 12671 - RNA, 2027 nt, Artificial Sequence
  mRNA product Design e-5 comprising derived and/or modified sequence from HRSV(Memphis-37)__AIY60640.1__F0_DSCav1 (opt6)
gggagagcggcucggccauuuugucccagucaguccggaggcugcggcugcagaaguaccgccugcggaguaacugcaaagaagcuuaccauggaacucccaauccucaaaaccaaugccauaacaaccauacucgcugcaguaaccuuauguuucgcaaguagccaaaacauaaccgaagaauuuuaucaauccacaugcuccgcaguuucuaaaggauaucuaucagcauuaagaacuggaugguacacaucuguaauaacuauagaacuaagcaauauaaaagaaaacaaauguaacggaacugacgcuaaaguaaaacuuauaaaacaagaacuagauaaauacaaaaacgccguuaccgaacuacaacuauuaaugcaaucaacaccagccgcaaauaacagagcaagacgcgaauuaccaagauucaugaauuacacacuaaacaauacaaaaaauaacaauguaacacuaucaaaaaaaagaaaacgacgauucuuaggcuuccuacuaggagucggcucagcaauagcuuccggaauagccgucuguaaaguccuacaccuugaaggcgaaguaaacaaaaucaaaaacgcacuauuaucaacaaacaaagcagucguaucuuuauccaacggagucucaguccuaacauucaaaguacucgauuuaaaaaacuacaucgauaaacaacuccuucccauucuaaacaaacaauccugcucaauauccaacaucgaaacagucauagaauuucaacaaaaaaacaaccgccugcuagaaauaacaagagaauuuuccguaaaugccggcgucaccacaccaguaucaacauacaugcuaacaaacuccgaacuacucucccuaauaaacgauaugccaaucaccaacgaccaaaaaaaacuaaugucaaauaacguucaaauagucagacaacaaucauacagcauaaugugcauaauaaaagaagaagucuuagccuacguuguacaacucccauuauacggaguuaucgauacaccaugcuggaaauuacacacaucacccuuaugcaccacaaacacaaaagaaggauccaauauuugucuaacacgaacagacagaggaugguacugugauaacgcaggaucagugucauucuuuccacaagcagaaacauguaaaguucaaucuaacagaguauucugcgacaccaugaacucccuaaccuuacccucagaaguaaaucuaugcaacauagauaucuuuaacccaaaauacgacugcaaaaucaugacaucaaaaacugacguuucuucauccguuauaacuucccucggcgcuauaguguccugcuacggaaaaacuaaaugcacagcauccaacaaaaauagaggaauaauaaaaacauuuuccaacggcugcgacuauguuucaaacaaaggaguagauaccguaucagucggcaauacauuauauuauguuaacaaacaagaaggaaaaucccuauacguaaaaggagaaccuauaaucaacuucuacgacccacucguauuccccucagacgaauuugacgcaucuauaucucaaguaaaugaaaaaauaaaccaaucacucgcauuuauccgcaaaucugacgaauuacuccauaacgucaacgucggcaaaucaaccaccaacauaaugauaacaacaauuauaauaguaauaauugucauacuacuacuccuaauagcaguaggucuauuccuauacugcaaagcaagauccacccccguaacccuuuccaaagaucaacucucaggaauaaauaacauagccuuuucaaacuaaggacuaguguccaccugucccuccugggcugcuggauugucucguuuuccugccaaauaaacaggaucagcgcuuuacagaucuaaaaaaaaaaaaaaaaaaaaaaaaaaaaaaaaaaaaaaaaaaaaaaaaaaaaaaaaaaaaaaaaugcaucccccccccccccccccccccccccccccccaaaggcucuuuucagagccaccagaauu

SEQ ID NO: 12672 - RNA, 2027 nt, Artificial Sequence
  mRNA product Design e-5 comprising derived and/or modified sequence from HRSV(Memphis-37)__AIY60640.1__F0_DSCav1 (opt11)
gggagagcggcucggccauuuugucccagucaguccggaggcugcggcugcagaaguaccgccugcggaguaacugcaaagaagcuuaccauggaacuccccauacucaagacuaaugccaucaccaccauccucgccgccgugacccucugcuucgcaucgucccaaaacauaacagaagaguucuaccaaagcacaugcuccgcagucuccaaaggauaccucuccgcacuacguaccggcugguacaccagcgucaucaccaucgaacuuuccaacaucaaagagaacaaaugcaacggcaccgacgccaaaguaaaacucauaaaacaagagcuagacaaauacaaaaacgccgucacagaacuccaacuacugaugcaauccacaccggccgccaacaaccgcgcucgacgugaacucccacgcuucaugaacuacacucuuaacaacaccaaaaauaacaacgucacccuauccaaaaagcgaaagcgcagauuccucggcuuccuacuuggcgucggcucggcgauagccucuggaaucgccguuugcaagguccuccaccuagaaggcgaaguaaacaaaaucaaaaacgcacuccuaagcaccaacaaagccgucgucucacuuuccaacggcgucucaguccucacauucaaaguucucgaccuaaagaacuacaucgacaagcaacuacuacccauacucaauaaacaauccugcuccaucagcaacaucgagacagucaucgaauuucaacaaaagaacaaccgccuccucgaaauuacacgcgaguucucagucaacgccggagucaccaccccagucucaacauacaugcucaccaacagcgaacuccugucucuaaucaacgacaugcccaucacuaacgaccagaagaaacucauguccaacaacguccaaaucgugcgacaacaaucauacucuaucaugugcaucaucaaagaagaaguccucgcauacgucguccagcucccacucuacggcguaaucgacacacccugcuggaaacuccacacaucaccccuaugcaccaccaacacaaaagaaggcuccaacaucugccuaacccgaaccgacagagguugguauugcgacaacgccggcucagucucauucuucccacaagccgaaaccuguaaaguccaaucaaaccgcgucuucugcgauaccaugaacucucucacacuccccuccgaagucaaucucugcaacauagacaucuucaauccaaaguacgacugcaaaauaaugaccucgaaaaccgacguaagcuccagcgucaucaccuccuuaggcgcaaucguauccugcuacggcaaaaccaaaugcaccgccucaaacaaaaacagaggcaucaucaaaacguucucgaacggaugcgacuacguuuccaauaaaggcguagauaccgucuccgucggcaacacacucuauuacgucaacaaacaagaaggcaaaucccucuacgucaaaggugaaccuaucaucaacuucuacgacccccucgucuuccccagcgacgaguucgaugccucaaucagccaagucaacgagaaaaucaaccaaucacuggcuuucauacgcaaauccgacgaacuccuccacaacgugaacgucggcaaauccacaaccaacaucaugauaaccacaauaaucaucgucauaaucguaauccuacuccuccuuauugccguaggacuauuccuauacugcaaagcccgauccacccccgucacccucucaaaagaccaacucuccggcaucaacaauauagccuucucuaacuaaggacuaguguccaccugucccuccugggcugcuggauugucucguuuuccugccaaauaaacaggaucagcgcuuuacagaucuaaaaaaaaaaaaaaaaaaaaaaaaaaaaaaaaaaaaaaaaaaaaaaaaaaaaaaaaaaaaaaaaugcaucccccccccccccccccccccccccccccccaaaggcucuuuucagagccaccagaauu

SEQ ID NO: 12673 - RNA, 2094 nt, Artificial Sequence
  mRNA product Design e-6 comprising derived and/or modified sequence from HRSV(Memphis-37)__AIY60640.1__F0_DSCav1 (opt1)
gggagagcggcucggccauuuugucccagucaguccggaggcugcggcugcagaaguaccgccugcggaguaacugcaaagaagcuuaccauggagcugcccauccucaagaccaacgccaucaccacgauccuggccgcggugacccugugcuucgccagcucccagaacaucaccgaggaguucuaccagagcacgugcuccgccgucagcaagggcuaccucuccgcccugcgcaccgggugguacaccagcgugaucaccaucgagcuguccaacaucaaggagaacaagugcaacggcaccgacgccaaggugaagcucaucaagcaggagcuggacaaguacaagaacgcggucacggagcugcagcuccugaugcagagcaccccggccgccaacaaccgggcccgccgggagcugccccgcuucaugaacuacacccucaacaacaccaagaacaacaacgugacgcuguccaagaagcggaagcgccgguuccugggguuccuccugggcguggggagcgcgaucgccuccggcaucgccgucugcaaggugcugcaccucgagggcgaggugaacaagaucaagaacgcccugcuguccaccaacaaggccgucgugagccucuccaacggggugagcguccugaccuucaaggugcuggaccucaagaacuacaucgacaagcagcugcugcccauccugaacaagcagagcugcuccaucagcaacaucgagaccgucaucgaguuccagcagaagaacaaccgccuccuggagaucacgcgggaguucagcgugaacgcgggcgugaccacccccgucuccaccuacaugcugacgaacagcgagcuccugucccugaucaacgacaugccgaucaccaacgaccagaagaagcucaugagcaacaacgugcagaucgugcgccagcaguccuacagcaucaugugcaucaucaaggaggagguccuggccuacguggugcagcugccccucuacggggucaucgacacccccugcuggaagcugcacaccagcccccugugcacgaccaacaccaaggagggcuccaacaucugccucacccggacggaccgcgggugguacugcgacaacgccggcagcguguccuucuucccgcaggccgagaccugcaagguccagagcaaccggguguucugcgacaccaugaacucccugacccugcccagcgaggugaaccucugcaacaucgacaucuucaaccccaaguacgacugcaagaucaugacguccaagaccgacgucagcuccagcgugaucaccucccugggcgccaucgugagcugcuacgggaagaccaagugcacggcgagcaacaagaaccgcggcaucaucaagaccuucuccaacgggugcgacuacgucagcaacaagggcguggacaccguguccgucggcaacacccuguacuacgugaacaagcaggagggcaagagccucuacgugaagggggagcccaucaucaacuucuacgacccgcuggucuuccccuccgacgaguucgacgccagcaucucccaggugaacgagaagaucaaccagagccuggccuucauccggaaguccgacgagcuccugcacaacgugaacgucggcaagagcaccacgaacaucaugaucaccaccaucaucaucgugaucaucgugauccugcugcuccugaucgccgucgggcuguuccucuacugcaaggcccgcuccacccccgugacgcugagcaaggaccagcuguccgggaucaacaacaucgcguucagcaacugaggacuaguacuggcugcaucucccuuuccucuguccuccauccuucucccaggauggugaagggggaccugguacccagugauccccaccccaggauccuaaaucaugacuuaccugcuaauaaaaacucauuggaaaagugagaagaucuaaaaaaaaaaaaaaaaaaaaaaaaaaaaaaaaaaaaaaaaaaaaaaaaaaaaaaaaaaaaaaaaugcaucccccccccccccccccccccccccccccccaaaggcucuuuucagagccaccagaauu

SEQ ID NO: 12674 - RNA, 2094 nt, Artificial Sequence
  mRNA product Design e-6 comprising derived and/or modified sequence from HRSV(Memphis-37)__AIY60640.1__F0_DSCav1 (opt1)
gggagagcggcucggccauuuugucccagucaguccggaggcugcggcugcagaaguaccgccugcggaguaacugcaaagaagcuuaccauggagcugcccauccucaagaccaacgccaucaccacgauccuggccgcggugacccugugcuucgccagcucccagaacaucaccgaggaguucuaccagagcacgugcuccgccgucagcaagggcuaccucuccgcccugcgcaccgggugguacaccagcgugaucaccaucgagcuguccaacaucaaggagaacaagugcaacggcaccgacgccaaggugaagcucaucaagcaggagcuggacaaguacaagaacgcggucacggagcugcagcuccugaugcagagcaccccggccgccaacaaccgggcccgccgggagcugccccgcuucaugaacuacacccucaacaacaccaagaacaacaacgugacgcuguccaagaagcggaagcgccgguuccugggguuccuccugggcguggggagcgcgaucgccuccggcaucgccgucugcaaggugcugcaccucgagggcgaggugaacaagaucaagaacgcccugcugagcaccaacaaggccgucgugucccucagcaacgggguguccguccugaccuucaaggugcuggaccucaagaacuacaucgacaagcagcugcugcccauccucaacaagcagagcugcuccaucagcaacaucgagaccgugaucgaguuccagcagaagaacaaccgccugcuggagaucacgcgggaguucuccgucaacgcgggcgugaccacccccgugagcaccuacaugcucacgaacagcgagcugcugucccucaucaacgacaugccgaucaccaacgaccagaagaagcugaugagcaacaacguccagaucgugcgccagcaguccuacagcaucaugugcaucaucaaggaggaggugcuggccuacgucgugcagcucccccuguacggggugaucgacacccccugcuggaagcugcacaccagcccccucugcacgaccaacaccaaggagggcagcaacaucugccugacccggacggaccgcgggugguacugcgacaacgccggcuccgucagcuucuucccgcaggccgagaccugcaaggugcaguccaaccgggucuucugcgacaccaugaacagccugacccuccccuccgaggugaaccugugcaacaucgacaucuucaaccccaaguacgacugcaagaucaugacgagcaagaccgacguguccagcuccgucaucaccagccugggcgccaucguguccugcuacgggaagaccaagugcacggcgagcaacaagaaccgcggcaucaucaagaccuucuccaacgggugcgacuacgugagcaacaagggcgucgacaccgugagcgugggcaacacccucuacuacgucaacaagcaggaggggaagucccuguacgugaagggcgagcccaucaucaacuucuacgacccgcugguguuccccagcgacgaguucgacgccuccaucagccaggucaacgagaagaucaaccagucccucgccuucauccggaaguccgacgagcugcugcacaacgugaacguggggaaguccaccacgaacaucaugaucaccaccaucaucaucgucaucaucgugauccugcuccugcugaucgccgugggccucuuccuguacugcaaggcccgcagcacccccgucacgcuguccaaggaccagcucagcgggaucaacaacaucgcguucuccaacugaggacuaguacuggcugcaucucccuuuccucuguccuccauccuucucccaggauggugaagggggaccugguacccagugauccccaccccaggauccuaaaucaugacuuaccugcuaauaaaaacucauuggaaaagugagaagaucuaaaaaaaaaaaaaaaaaaaaaaaaaaaaaaaaaaaaaaaaaaaaaaaaaaaaaaaaaaaaaaaaugcaucccccccccccccccccccccccccccccccaaaggcucuuuucagagccaccagaauu

SEQ ID NO: 12675 - RNA, 2094 nt, Artificial Sequence
  mRNA product Design e-6 comprising derived and/or modified sequence from HRSV(Memphis-37)__AIY60640.1__F0_DSCav1 (opt2)
gggagagcggcucggccauuuugucccagucaguccggaggcugcggcugcagaaguaccgccugcggaguaacugcaaagaagcuuaccauggagcuccccauccucaagaccaacgccaucaccaccauccucgccgccgucacccucugcuucgccuccucccagaacaucaccgaggaguucuaccaguccaccugcuccgccgucuccaagggcuaccucuccgcccuccgcaccggcugguacaccuccgucaucaccaucgagcucuccaacaucaaggagaacaagugcaacggcaccgacgccaaggucaagcucaucaagcaggagcucgacaaguacaagaacgccgucaccgagcuccagcuccucaugcaguccacccccgccgccaacaaccgcgcccgccgcgagcucccccgcuucaugaacuacacccucaacaacaccaagaacaacaacgucacccucuccaagaagcgcaagcgccgcuuccucggcuuccuccucggcgucggcuccgccaucgccuccggcaucgccgucugcaagguccuccaccucgagggcgaggucaacaagaucaagaacgcccuccucuccaccaacaaggccgucgucucccucuccaacggcgucuccguccucaccuucaagguccucgaccucaagaacuacaucgacaagcagcuccuccccauccucaacaagcaguccugcuccaucuccaacaucgagaccgucaucgaguuccagcagaagaacaaccgccuccucgagaucacccgcgaguucuccgucaacgccggcgucaccacccccgucuccaccuacaugcucaccaacuccgagcuccucucccucaucaacgacaugcccaucaccaacgaccagaagaagcucauguccaacaacguccagaucguccgccagcaguccuacuccaucaugugcaucaucaaggaggagguccucgccuacgucguccagcucccccucuacggcgucaucgacacccccugcuggaagcuccacaccuccccccucugcaccaccaacaccaaggagggcuccaacaucugccucacccgcaccgaccgcggcugguacugcgacaacgccggcuccgucuccuucuucccccaggccgagaccugcaagguccaguccaaccgcgucuucugcgacaccaugaacucccucacccuccccuccgaggucaaccucugcaacaucgacaucuucaaccccaaguacgacugcaagaucaugaccuccaagaccgacgucuccuccuccgucaucaccucccucggcgccaucgucuccugcuacggcaagaccaagugcaccgccuccaacaagaaccgcggcaucaucaagaccuucuccaacggcugcgacuacgucuccaacaagggcgucgacaccgucuccgucggcaacacccucuacuacgucaacaagcaggagggcaagucccucuacgucaagggcgagcccaucaucaacuucuacgacccccucgucuuccccuccgacgaguucgacgccuccaucucccaggucaacgagaagaucaaccagucccucgccuucauccgcaaguccgacgagcuccuccacaacgucaacgucggcaaguccaccaccaacaucaugaucaccaccaucaucaucgucaucaucgucauccuccuccuccucaucgccgucggccucuuccucuacugcaaggcccgcuccacccccgucacccucuccaaggaccagcucuccggcaucaacaacaucgccuucuccaacugaggacuaguacuggcugcaucucccuuuccucuguccuccauccuucucccaggauggugaagggggaccugguacccagugauccccaccccaggauccuaaaucaugacuuaccugcuaauaaaaacucauuggaaaagugagaagaucuaaaaaaaaaaaaaaaaaaaaaaaaaaaaaaaaaaaaaaaaaaaaaaaaaaaaaaaaaaaaaaaaugcaucccccccccccccccccccccccccccccccaaaggcucuuuucagagccaccagaauu

SEQ ID NO: 12676 - RNA, 2094 nt, Artificial Sequence
  mRNA product Design e-6 comprising derived and/or modified sequence from HRSV(Memphis-37)__AIY60640.1__F0_DSCav1 (opt3)
gggagagcggcucggccauuuugucccagucaguccggaggcugcggcugcagaaguaccgccugcggaguaacugcaaagaagcuuaccauggagcugcccauccucaagaccaacgccauuacaacuauacuugcugcagugacgcugugcuucgccagcucccagaauaucaccgaagaguuuuaccaaucuacauguucagcggucaguaaaggcuauuugagcgcuuuaagaacugggugguacaccuccguuauuacaaucgaacugucuaacauuaaggagaauaaaugcaacggaaccgacgccaaggugaaacuaaucaagcaggaacucgauaaguauaaaaaugcaguaacugagcugcagcuucugaugcagucgaccccugccgcuaacaauagggcacggcgcgaguugccacgauucaugaacuacacacucaauaacacgaagaauaacaaugugacucugagcaaaaagcguaaaagaagguuucuggguuuccucuuaggcgucgggucagccauagcuaguggaaucgccguguguaagguucugcaccuugaaggcgaggugaacaagauuaaaaaugcguugcuguccaccaacaaggcagucgugucucuaagcaacgguguauccguucucacauuuaaagugcuggaccuuaagaauuauaucgauaaacaacuguugccgauucucaacaagcagucaugcaguaucagcaauauagaaacugucauugaguuccagcagaaaaacaaucggcuguuagagaucacccgcgaauuuucugugaacgccggggugacaacccccgucuccacguacaugcugacuaauucagagcuccuuagccugauuaacgacaugccuaucacaaaugaucaaaagaaguugaugaguaacaauguucagaucgugagacagcagucuuauuccauuauguguauaaucaaagaagagguacuagcuuacgugguccaacugccacucuacggagugauugacacccccugcuggaagcugcauacuagcccucuuuguacaaccaacacgaaagaaggcucgaauaucugccugaccaggacagaucggggcugguauugugacaacgccgggucuguuuccuucuuuccacaggcagagacuugcaaggugcagucaaaucgcgucuucugugauaccaugaacaguuugacacuccccagcgaggugaaccugugcaauauagacauuuuuaacccuaaauacgauugcaagaucaugacuuccaagaccgacguaucuagcucaguuaucacaaguuuaggagcuauuguguccuguuaugguaaaaccaagugcacugccagcaauaaaaaccgaggcaucauuaagacguucucuaaugggugugauuacgucucaaacaaaggaguggacacagucagugugggcaauacccuguauuacguuaacaagcaagaagguaagagccuauaugugaaaggggagccaauaaucaauuuuuacgacccgcucguauuccccuccgaugaguucgacgcgucuauuucgcaggucaacgaaaagaucaaucagagccuggccuuuaucagaaaauccgaugaacuuuugcacaacgugaauguuggaaagucaacuaccaacauuaugauaacaaccaucauuaucgugauuaucgucauacugcuccugcuuaucgcagugggccuguucuuguacugcaaagcuaggaguacuccuguaacacucucuaaggaccagcugagcggcauuaauaacaucgccuuuuccaacugaggacuaguacuggcugcaucucccuuuccucuguccuccauccuucucccaggauggugaagggggaccugguacccagugauccccaccccaggauccuaaaucaugacuuaccugcuaauaaaaacucauuggaaaagugagaagaucuaaaaaaaaaaaaaaaaaaaaaaaaaaaaaaaaaaaaaaaaaaaaaaaaaaaaaaaaaaaaaaaaugcaucccccccccccccccccccccccccccccccaaaggcucuuuucagagccaccagaauu

SEQ ID NO: 12677 - RNA, 2094 nt, Artificial Sequence
  mRNA product Design e-6 comprising derived and/or modified sequence from HRSV(Memphis-37)__AIY60640.1__F0_DSCav1 (opt4)
gggagagcggcucggccauuuugucccagucaguccggaggcugcggcugcagaaguaccgccugcggaguaacugcaaagaagcuuaccauggagcugcccauccugaagaccaacgccaucaccaccauccuggccgccgugacccugugcuucgccagcagccagaacaucaccgaggaguucuaccagagcaccugcagcgccgugagcaagggcuaccugagcgcccugagaaccggcugguacaccagcgugaucaccaucgagcugagcaacaucaaggagaacaagugcaacggcaccgacgccaaggugaagcugaucaagcaggagcuggacaaguacaagaacgccgugaccgagcugcagcugcugaugcagagcacccccgccgccaacaacagagccagaagagagcugcccagauucaugaacuacacccugaacaacaccaagaacaacaacgugacccugagcaagaagagaaagagaagauuccugggcuuccugcugggcgugggcagcgccaucgccagcggcaucgccgugugcaaggugcugcaccuggagggcgaggugaacaagaucaagaacgcccugcugagcaccaacaaggccguggugagccugagcaacggcgugagcgugcugaccuucaaggugcuggaccugaagaacuacaucgacaagcagcugcugcccauccugaacaagcagagcugcagcaucagcaacaucgagaccgugaucgaguuccagcagaagaacaacagacugcuggagaucaccagagaguucagcgugaacgccggcgugaccacccccgugagcaccuacaugcugaccaacagcgagcugcugagccugaucaacgacaugcccaucaccaacgaccagaagaagcugaugagcaacaacgugcagaucgugagacagcagagcuacagcaucaugugcaucaucaaggaggaggugcuggccuacguggugcagcugccccuguacggcgugaucgacacccccugcuggaagcugcacaccagcccccugugcaccaccaacaccaaggagggcagcaacaucugccugaccagaaccgacagaggcugguacugcgacaacgccggcagcgugagcuucuucccccaggccgagaccugcaaggugcagagcaacagaguguucugcgacaccaugaacagccugacccugcccagcgaggugaaccugugcaacaucgacaucuucaaccccaaguacgacugcaagaucaugaccagcaagaccgacgugagcagcagcgugaucaccagccugggcgccaucgugagcugcuacggcaagaccaagugcaccgccagcaacaagaacagaggcaucaucaagaccuucagcaacggcugcgacuacgugagcaacaagggcguggacaccgugagcgugggcaacacccuguacuacgugaacaagcaggagggcaagagccuguacgugaagggcgagcccaucaucaacuucuacgacccccugguguuccccagcgacgaguucgacgccagcaucagccaggugaacgagaagaucaaccagagccuggccuucaucagaaagagcgacgagcugcugcacaacgugaacgugggcaagagcaccaccaacaucaugaucaccaccaucaucaucgugaucaucgugauccugcugcugcugaucgccgugggccuguuccuguacugcaaggccagaagcacccccgugacccugagcaaggaccagcugagcggcaucaacaacaucgccuucagcaacugaggacuaguacuggcugcaucucccuuuccucuguccuccauccuucucccaggauggugaagggggaccugguacccagugauccccaccccaggauccuaaaucaugacuuaccugcuaauaaaaacucauuggaaaagugagaagaucuaaaaaaaaaaaaaaaaaaaaaaaaaaaaaaaaaaaaaaaaaaaaaaaaaaaaaaaaaaaaaaaaugcaucccccccccccccccccccccccccccccccaaaggcucuuuucagagccaccagaauu

SEQ ID NO: 12678 - RNA, 2094 nt, Artificial Sequence
  mRNA product Design e-6 comprising derived and/or modified sequence from HRSV(Memphis-37)__AIY60640.1__F0_DSCav1 (opt5)
gggagagcggcucggccauuuugucccagucaguccggaggcugcggcugcagaaguaccgccugcggaguaacugcaaagaagcuuaccauggagcugcccauccucaagaccaacgccauuacaacgauccuggcugccgugacccuuugcuucgcgagcucccagaauauuacagaagaguuuuaccaaucuaccuguagcgcugucuccaaaggcuaucugucugcccucagaacagggugguacaccagcguuaucacaauugaacuguccaacaucaaggagaauaaaugcaacggaaccgacgccaaggugaaacuuaucaagcaggaacuggauaaguauaaaaaugcugugacggagcuccagcugcugaugcagucuaccccugccgcuaacaaucgggcccgcagagagcucccgcgguucaugaacuacacacugaauaacaccaagaauaacaaugucacacuuagcaaaaagcgcaaaagacgguuucugggcuuccuccugggggugggauccgcgauugccagcggcaucgcuguuuguaaggugcuucaccuggaaggggaggucaacaagauuaaaaaugcccuccugucuaccaacaaggcugugguuucccugagcaacggagugucuguccucacguuuaaagugcuggaccuuaagaauuauaucgauaaacaacugcuccccauucugaacaagcaguccugcagcaucucuaauauugaaacagugaucgaguuccagcagaaaaacaaucgccuucuggagaucaccagagaauuuuccgucaacgccggcguuacaaccccugugagcaccuacaugcucacaaauuccgagcugcugucucucauuaacgacaugcccaucacgaaugaucaaaagaagcugaugagcaacaaugugcagauuguccggcagcaguccuauagcaucauguguauuaucaaagaagaggugcuugcguacguugugcaacugccucucuacggcgucaucgacacccccugcuggaagcugcauacaucuccucuuuguaccacaaacaccaaagaaggguccaauauuugccugacgcgcacagauagaggaugguauugugacaacgccggcagcgugucuuucuuuccgcaggcugagaccugcaagguucagagcaaucggguguucugugauaccaugaacucccucacacugcccucugaggucaaccugugcaauaucgacauuuuuaacccuaaauacgauugcaagaucaugaccagcaagacagacguguccagcucugucauuacgucccucggggccaucgugagcuguuauggaaaaaccaagugcacagcuucuaauaaaaaccgcggcaucauuaagaccuucuccaaugggugugauuacguuagcaacaaaggaguggacacagucuccgugggcaauacccuguauuacguuaacaagcaagaaggcaagucucuuuaugugaaaggggagcccaucauuaauuuuuacgacccucuggucuuccccagcgaugaguucgacgccuccaucucucaggugaacgaaaagauuaaucagagccucgccuuuaucagaaaauccgaugaacugcugcacaacgugaauguuggaaagagcacgaccaacauuaugaucacaaccaucauuaucgucauuaucgugauucuucuccugcugaucgcugugggccucuuccuguacugcaaagcgcggucuacaccggucacccuuuccaaggaccagcugagcgggaucaauaacauugccuuuucuaacugaggacuaguacuggcugcaucucccuuuccucuguccuccauccuucucccaggauggugaagggggaccugguacccagugauccccaccccaggauccuaaaucaugacuuaccugcuaauaaaaacucauuggaaaagugagaagaucuaaaaaaaaaaaaaaaaaaaaaaaaaaaaaaaaaaaaaaaaaaaaaaaaaaaaaaaaaaaaaaaaugcaucccccccccccccccccccccccccccccccaaaggcucuuuucagagccaccagaauu

SEQ ID NO: 12679 - RNA, 2094 nt, Artificial Sequence
  mRNA product Design e-6 comprising derived and/or modified sequence from HRSV(Memphis-37)__AIY60640.1__F0_DSCav1 (opt6)
gggagagcggcucggccauuuugucccagucaguccggaggcugcggcugcagaaguaccgccugcggaguaacugcaaagaagcuuaccauggaacucccaauccucaaaaccaaugccauaacaaccauacucgcugcaguaaccuuauguuucgcaaguagccaaaacauaaccgaagaauuuuaucaauccacaugcuccgcaguuucuaaaggauaucuaucagcauuaagaacuggaugguacacaucuguaauaacuauagaacuaagcaauauaaaagaaaacaaauguaacggaacugacgcuaaaguaaaacuuauaaaacaagaacuagauaaauacaaaaacgccguuaccgaacuacaacuauuaaugcaaucaacaccagccgcaaauaacagagcaagacgcgaauuaccaagauucaugaauuacacacuaaacaauacaaaaaauaacaauguaacacuaucaaaaaaaagaaaacgacgauucuuaggcuuccuacuaggagucggcucagcaauagcuuccggaauagccgucuguaaaguccuacaccuugaaggcgaaguaaacaaaaucaaaaacgcacuauuaucaacaaacaaagcagucguaucuuuauccaacggagucucaguccuaacauucaaaguacucgauuuaaaaaacuacaucgauaaacaacuccuucccauucuaaacaaacaauccugcucaauauccaacaucgaaacagucauagaauuucaacaaaaaaacaaccgccugcuagaaauaacaagagaauuuuccguaaaugccggcgucaccacaccaguaucaacauacaugcuaacaaacuccgaacuacucucccuaauaaacgauaugccaaucaccaacgaccaaaaaaaacuaaugucaaauaacguucaaauagucagacaacaaucauacagcauaaugugcauaauaaaagaagaagucuuagccuacguuguacaacucccauuauacggaguuaucgauacaccaugcuggaaauuacacacaucacccuuaugcaccacaaacacaaaagaaggauccaauauuugucuaacacgaacagacagaggaugguacugugauaacgcaggaucagugucauucuuuccacaagcagaaacauguaaaguucaaucuaacagaguauucugcgacaccaugaacucccuaaccuuacccucagaaguaaaucuaugcaacauagauaucuuuaacccaaaauacgacugcaaaaucaugacaucaaaaacugacguuucuucauccguuauaacuucccucggcgcuauaguguccugcuacggaaaaacuaaaugcacagcauccaacaaaaauagaggaauaauaaaaacauuuuccaacggcugcgacuauguuucaaacaaaggaguagauaccguaucagucggcaauacauuauauuauguuaacaaacaagaaggaaaaucccuauacguaaaaggagaaccuauaaucaacuucuacgacccacucguauuccccucagacgaauuugacgcaucuauaucucaaguaaaugaaaaaauaaaccaaucacucgcauuuauccgcaaaucugacgaauuacuccauaacgucaacgucggcaaaucaaccaccaacauaaugauaacaacaauuauaauaguaauaauugucauacuacuacuccuaauagcaguaggucuauuccuauacugcaaagcaagauccacccccguaacccuuuccaaagaucaacucucaggaauaaauaacauagccuuuucaaacuaaggacuaguacuggcugcaucucccuuuccucuguccuccauccuucucccaggauggugaagggggaccugguacccagugauccccaccccaggauccuaaaucaugacuuaccugcuaauaaaaacucauuggaaaagugagaagaucuaaaaaaaaaaaaaaaaaaaaaaaaaaaaaaaaaaaaaaaaaaaaaaaaaaaaaaaaaaaaaaaaugcaucccccccccccccccccccccccccccccccaaaggcucuuuucagagccaccagaauu

SEQ ID NO: 12680 - RNA, 2094 nt, Artificial Sequence
  mRNA product Design e-6 comprising derived and/or modified sequence from HRSV(Memphis-37)__AIY60640.1__F0_DSCav1 (opt11)
gggagagcggcucggccauuuugucccagucaguccggaggcugcggcugcagaaguaccgccugcggaguaacugcaaagaagcuuaccauggaacuccccauacucaagacuaaugccaucaccaccauccucgccgccgugacccucugcuucgcaucgucccaaaacauaacagaagaguucuaccaaagcacaugcuccgcagucuccaaaggauaccucuccgcacuacguaccggcugguacaccagcgucaucaccaucgaacuuuccaacaucaaagagaacaaaugcaacggcaccgacgccaaaguaaaacucauaaaacaagagcuagacaaauacaaaaacgccgucacagaacuccaacuacugaugcaauccacaccggccgccaacaaccgcgcucgacgugaacucccacgcuucaugaacuacacucuuaacaacaccaaaaauaacaacgucacccuauccaaaaagcgaaagcgcagauuccucggcuuccuacuuggcgucggcucggcgauagccucuggaaucgccguuugcaagguccuccaccuagaaggcgaaguaaacaaaaucaaaaacgcacuccuaagcaccaacaaagccgucgucucacuuuccaacggcgucucaguccucacauucaaaguucucgaccuaaagaacuacaucgacaagcaacuacuacccauacucaauaaacaauccugcuccaucagcaacaucgagacagucaucgaauuucaacaaaagaacaaccgccuccucgaaauuacacgcgaguucucagucaacgccggagucaccaccccagucucaacauacaugcucaccaacagcgaacuccugucucuaaucaacgacaugcccaucacuaacgaccagaagaaacucauguccaacaacguccaaaucgugcgacaacaaucauacucuaucaugugcaucaucaaagaagaaguccucgcauacgucguccagcucccacucuacggcguaaucgacacacccugcuggaaacuccacacaucaccccuaugcaccaccaacacaaaagaaggcuccaacaucugccuaacccgaaccgacagagguugguauugcgacaacgccggcucagucucauucuucccacaagccgaaaccuguaaaguccaaucaaaccgcgucuucugcgauaccaugaacucucucacacuccccuccgaagucaaucucugcaacauagacaucuucaauccaaaguacgacugcaaaauaaugaccucgaaaaccgacguaagcuccagcgucaucaccuccuuaggcgcaaucguauccugcuacggcaaaaccaaaugcaccgccucaaacaaaaacagaggcaucaucaaaacguucucgaacggaugcgacuacguuuccaauaaaggcguagauaccgucuccgucggcaacacacucuauuacgucaacaaacaagaaggcaaaucccucuacgucaaaggugaaccuaucaucaacuucuacgacccccucgucuuccccagcgacgaguucgaugccucaaucagccaagucaacgagaaaaucaaccaaucacuggcuuucauacgcaaauccgacgaacuccuccacaacgugaacgucggcaaauccacaaccaacaucaugauaaccacaauaaucaucgucauaaucguaauccuacuccuccuuauugccguaggacuauuccuauacugcaaagcccgauccacccccgucacccucucaaaagaccaacucuccggcaucaacaauauagccuucucuaacuaaggacuaguacuggcugcaucucccuuuccucuguccuccauccuucucccaggauggugaagggggaccugguacccagugauccccaccccaggauccuaaaucaugacuuaccugcuaauaaaaacucauuggaaaagugagaagaucuaaaaaaaaaaaaaaaaaaaaaaaaaaaaaaaaaaaaaaaaaaaaaaaaaaaaaaaaaaaaaaaaugcaucccccccccccccccccccccccccccccccaaaggcucuuuucagagccaccagaauu

SEQ ID NO: 12681 - RNA, 2310 nt, Artificial Sequence
  mRNA product Design f-1 comprising derived and/or modified sequence from HRSV(Memphis-37)__AIY60640.1__F0_DSCav1 (opt1)
gggagagcggcucggccauuuugucccagucaguccggaggcugcggcugcagaaguaccgccugcggaguaacugcaaagaagcuuaccauggagcugcccauccucaagaccaacgccaucaccacgauccuggccgcggugacccugugcuucgccagcucccagaacaucaccgaggaguucuaccagagcacgugcuccgccgucagcaagggcuaccucuccgcccugcgcaccgggugguacaccagcgugaucaccaucgagcuguccaacaucaaggagaacaagugcaacggcaccgacgccaaggugaagcucaucaagcaggagcuggacaaguacaagaacgcggucacggagcugcagcuccugaugcagagcaccccggccgccaacaaccgggcccgccgggagcugccccgcuucaugaacuacacccucaacaacaccaagaacaacaacgugacgcuguccaagaagcggaagcgccgguuccugggguuccuccugggcguggggagcgcgaucgccuccggcaucgccgucugcaaggugcugcaccucgagggcgaggugaacaagaucaagaacgcccugcuguccaccaacaaggccgucgugagccucuccaacggggugagcguccugaccuucaaggugcuggaccucaagaacuacaucgacaagcagcugcugcccauccugaacaagcagagcugcuccaucagcaacaucgagaccgucaucgaguuccagcagaagaacaaccgccuccuggagaucacgcgggaguucagcgugaacgcgggcgugaccacccccgucuccaccuacaugcugacgaacagcgagcuccugucccugaucaacgacaugccgaucaccaacgaccagaagaagcucaugagcaacaacgugcagaucgugcgccagcaguccuacagcaucaugugcaucaucaaggaggagguccuggccuacguggugcagcugccccucuacggggucaucgacacccccugcuggaagcugcacaccagcccccugugcacgaccaacaccaaggagggcuccaacaucugccucacccggacggaccgcgggugguacugcgacaacgccggcagcguguccuucuucccgcaggccgagaccugcaagguccagagcaaccggguguucugcgacaccaugaacucccugacccugcccagcgaggugaaccucugcaacaucgacaucuucaaccccaaguacgacugcaagaucaugacguccaagaccgacgucagcuccagcgugaucaccucccugggcgccaucgugagcugcuacgggaagaccaagugcacggcgagcaacaagaaccgcggcaucaucaagaccuucuccaacgggugcgacuacgucagcaacaagggcguggacaccguguccgucggcaacacccuguacuacgugaacaagcaggagggcaagagccucuacgugaagggggagcccaucaucaacuucuacgacccgcuggucuuccccuccgacgaguucgacgccagcaucucccaggugaacgagaagaucaaccagagccuggccuucauccggaaguccgacgagcuccugcacaacgugaacgucggcaagagcaccacgaacaucaugaucaccaccaucaucaucgugaucaucgugauccugcugcuccugaucgccgucgggcuguuccucuacugcaaggcccgcuccacccccgugacgcugagcaaggaccagcuguccgggaucaacaacaucgcguucagcaacugaggacuagugaagggaacacccaaauuuaauucagccuuaagcacaauuaauuaagagugaaacguaauuguacaagcaguuggucacccaccauagggcaugaucaacaccgcaaccuuuccuuuuucccccagugauucugaaaaaccccucuucccuucagcuugcuuagauguuccaaauuuaguaagcuuaaggcggccuacagaagaaaaagaaaaaaaaggccacaaaaguucccucucacuuucaguaaauaaaauaaaagcagcaacagaaauaaagaaauaaaugaaauucaaaaugaaauaaauauuguguugugcagcauuaaaaaaucaauaaaaauuaaaaaugagcaagaucuaaaaaaaaaaaaaaaaaaaaaaaaaaaaaaaaaaaaaaaaaaaaaaaaaaaaaaaaaaaaaaaaugcaucccccccccccccccccccccccccccccccaaaggcucuuuucagagccaccagaauu

SEQ ID NO: 12682 - RNA, 2310 nt, Artificial Sequence
  mRNA product Design f-1 comprising derived and/or modified sequence from HRSV(Memphis-37)__AIY60640.1__F0_DSCav1 (opt1)
gggagagcggcucggccauuuugucccagucaguccggaggcugcggcugcagaaguaccgccugcggaguaacugcaaagaagcuuaccauggagcugcccauccucaagaccaacgccaucaccacgauccuggccgcggugacccugugcuucgccagcucccagaacaucaccgaggaguucuaccagagcacgugcuccgccgucagcaagggcuaccucuccgcccugcgcaccgggugguacaccagcgugaucaccaucgagcuguccaacaucaaggagaacaagugcaacggcaccgacgccaaggugaagcucaucaagcaggagcuggacaaguacaagaacgcggucacggagcugcagcuccugaugcagagcaccccggccgccaacaaccgggcccgccgggagcugccccgcuucaugaacuacacccucaacaacaccaagaacaacaacgugacgcuguccaagaagcggaagcgccgguuccugggguuccuccugggcguggggagcgcgaucgccuccggcaucgccgucugcaaggugcugcaccucgagggcgaggugaacaagaucaagaacgcccugcugagcaccaacaaggccgucgugucccucagcaacgggguguccguccugaccuucaaggugcuggaccucaagaacuacaucgacaagcagcugcugcccauccucaacaagcagagcugcuccaucagcaacaucgagaccgugaucgaguuccagcagaagaacaaccgccugcuggagaucacgcgggaguucuccgucaacgcgggcgugaccacccccgugagcaccuacaugcucacgaacagcgagcugcugucccucaucaacgacaugccgaucaccaacgaccagaagaagcugaugagcaacaacguccagaucgugcgccagcaguccuacagcaucaugugcaucaucaaggaggaggugcuggccuacgucgugcagcucccccuguacggggugaucgacacccccugcuggaagcugcacaccagcccccucugcacgaccaacaccaaggagggcagcaacaucugccugacccggacggaccgcgggugguacugcgacaacgccggcuccgucagcuucuucccgcaggccgagaccugcaaggugcaguccaaccgggucuucugcgacaccaugaacagccugacccuccccuccgaggugaaccugugcaacaucgacaucuucaaccccaaguacgacugcaagaucaugacgagcaagaccgacguguccagcuccgucaucaccagccugggcgccaucguguccugcuacgggaagaccaagugcacggcgagcaacaagaaccgcggcaucaucaagaccuucuccaacgggugcgacuacgugagcaacaagggcgucgacaccgugagcgugggcaacacccucuacuacgucaacaagcaggaggggaagucccuguacgugaagggcgagcccaucaucaacuucuacgacccgcugguguuccccagcgacgaguucgacgccuccaucagccaggucaacgagaagaucaaccagucccucgccuucauccggaaguccgacgagcugcugcacaacgugaacguggggaaguccaccacgaacaucaugaucaccaccaucaucaucgucaucaucgugauccugcuccugcugaucgccgugggccucuuccuguacugcaaggcccgcagcacccccgucacgcuguccaaggaccagcucagcgggaucaacaacaucgcguucuccaacugaggacuagugaagggaacacccaaauuuaauucagccuuaagcacaauuaauuaagagugaaacguaauuguacaagcaguuggucacccaccauagggcaugaucaacaccgcaaccuuuccuuuuucccccagugauucugaaaaaccccucuucccuucagcuugcuuagauguuccaaauuuaguaagcuuaaggcggccuacagaagaaaaagaaaaaaaaggccacaaaaguucccucucacuuucaguaaauaaaauaaaagcagcaacagaaauaaagaaauaaaugaaauucaaaaugaaauaaauauuguguugugcagcauuaaaaaaucaauaaaaauuaaaaaugagcaagaucuaaaaaaaaaaaaaaaaaaaaaaaaaaaaaaaaaaaaaaaaaaaaaaaaaaaaaaaaaaaaaaaaugcaucccccccccccccccccccccccccccccccaaaggcucuuuucagagccaccagaauu

SEQ ID NO: 12683 - RNA, 2310 nt, Artificial Sequence
  mRNA product Design f-1 comprising derived and/or modified sequence from HRSV(Memphis-37)__AIY60640.1__F0_DSCav1 (opt2)
gggagagcggcucggccauuuugucccagucaguccggaggcugcggcugcagaaguaccgccugcggaguaacugcaaagaagcuuaccauggagcuccccauccucaagaccaacgccaucaccaccauccucgccgccgucacccucugcuucgccuccucccagaacaucaccgaggaguucuaccaguccaccugcuccgccgucuccaagggcuaccucuccgcccuccgcaccggcugguacaccuccgucaucaccaucgagcucuccaacaucaaggagaacaagugcaacggcaccgacgccaaggucaagcucaucaagcaggagcucgacaaguacaagaacgccgucaccgagcuccagcuccucaugcaguccacccccgccgccaacaaccgcgcccgccgcgagcucccccgcuucaugaacuacacccucaacaacaccaagaacaacaacgucacccucuccaagaagcgcaagcgccgcuuccucggcuuccuccucggcgucggcuccgccaucgccuccggcaucgccgucugcaagguccuccaccucgagggcgaggucaacaagaucaagaacgcccuccucuccaccaacaaggccgucgucucccucuccaacggcgucuccguccucaccuucaagguccucgaccucaagaacuacaucgacaagcagcuccuccccauccucaacaagcaguccugcuccaucuccaacaucgagaccgucaucgaguuccagcagaagaacaaccgccuccucgagaucacccgcgaguucuccgucaacgccggcgucaccacccccgucuccaccuacaugcucaccaacuccgagcuccucucccucaucaacgacaugcccaucaccaacgaccagaagaagcucauguccaacaacguccagaucguccgccagcaguccuacuccaucaugugcaucaucaaggaggagguccucgccuacgucguccagcucccccucuacggcgucaucgacacccccugcuggaagcuccacaccuccccccucugcaccaccaacaccaaggagggcuccaacaucugccucacccgcaccgaccgcggcugguacugcgacaacgccggcuccgucuccuucuucccccaggccgagaccugcaagguccaguccaaccgcgucuucugcgacaccaugaacucccucacccuccccuccgaggucaaccucugcaacaucgacaucuucaaccccaaguacgacugcaagaucaugaccuccaagaccgacgucuccuccuccgucaucaccucccucggcgccaucgucuccugcuacggcaagaccaagugcaccgccuccaacaagaaccgcggcaucaucaagaccuucuccaacggcugcgacuacgucuccaacaagggcgucgacaccgucuccgucggcaacacccucuacuacgucaacaagcaggagggcaagucccucuacgucaagggcgagcccaucaucaacuucuacgacccccucgucuuccccuccgacgaguucgacgccuccaucucccaggucaacgagaagaucaaccagucccucgccuucauccgcaaguccgacgagcuccuccacaacgucaacgucggcaaguccaccaccaacaucaugaucaccaccaucaucaucgucaucaucgucauccuccuccuccucaucgccgucggccucuuccucuacugcaaggcccgcuccacccccgucacccucuccaaggaccagcucuccggcaucaacaacaucgccuucuccaacugaggacuagugaagggaacacccaaauuuaauucagccuuaagcacaauuaauuaagagugaaacguaauuguacaagcaguuggucacccaccauagggcaugaucaacaccgcaaccuuuccuuuuucccccagugauucugaaaaaccccucuucccuucagcuugcuuagauguuccaaauuuaguaagcuuaaggcggccuacagaagaaaaagaaaaaaaaggccacaaaaguucccucucacuuucaguaaauaaaauaaaagcagcaacagaaauaaagaaauaaaugaaauucaaaaugaaauaaauauuguguugugcagcauuaaaaaaucaauaaaaauuaaaaaugagcaagaucuaaaaaaaaaaaaaaaaaaaaaaaaaaaaaaaaaaaaaaaaaaaaaaaaaaaaaaaaaaaaaaaaugcaucccccccccccccccccccccccccccccccaaaggcucuuuucagagccaccagaauu

SEQ ID NO: 12684 - RNA, 2310 nt, Artificial Sequence
  mRNA product Design f-1 comprising derived and/or modified sequence from HRSV(Memphis-37)__AIY60640.1__F0_DSCav1 (opt3)
gggagagcggcucggccauuuugucccagucaguccggaggcugcggcugcagaaguaccgccugcggaguaacugcaaagaagcuuaccauggagcugcccauccucaagaccaacgccauuacaacuauacuugcugcagugacgcugugcuucgccagcucccagaauaucaccgaagaguuuuaccaaucuacauguucagcggucaguaaaggcuauuugagcgcuuuaagaacugggugguacaccuccguuauuacaaucgaacugucuaacauuaaggagaauaaaugcaacggaaccgacgccaaggugaaacuaaucaagcaggaacucgauaaguauaaaaaugcaguaacugagcugcagcuucugaugcagucgaccccugccgcuaacaauagggcacggcgcgaguugccacgauucaugaacuacacacucaauaacacgaagaauaacaaugugacucugagcaaaaagcguaaaagaagguuucuggguuuccucuuaggcgucgggucagccauagcuaguggaaucgccguguguaagguucugcaccuugaaggcgaggugaacaagauuaaaaaugcguugcuguccaccaacaaggcagucgugucucuaagcaacgguguauccguucucacauuuaaagugcuggaccuuaagaauuauaucgauaaacaacuguugccgauucucaacaagcagucaugcaguaucagcaauauagaaacugucauugaguuccagcagaaaaacaaucggcuguuagagaucacccgcgaauuuucugugaacgccggggugacaacccccgucuccacguacaugcugacuaauucagagcuccuuagccugauuaacgacaugccuaucacaaaugaucaaaagaaguugaugaguaacaauguucagaucgugagacagcagucuuauuccauuauguguauaaucaaagaagagguacuagcuuacgugguccaacugccacucuacggagugauugacacccccugcuggaagcugcauacuagcccucuuuguacaaccaacacgaaagaaggcucgaauaucugccugaccaggacagaucggggcugguauugugacaacgccgggucuguuuccuucuuuccacaggcagagacuugcaaggugcagucaaaucgcgucuucugugauaccaugaacaguuugacacuccccagcgaggugaaccugugcaauauagacauuuuuaacccuaaauacgauugcaagaucaugacuuccaagaccgacguaucuagcucaguuaucacaaguuuaggagcuauuguguccuguuaugguaaaaccaagugcacugccagcaauaaaaaccgaggcaucauuaagacguucucuaaugggugugauuacgucucaaacaaaggaguggacacagucagugugggcaauacccuguauuacguuaacaagcaagaagguaagagccuauaugugaaaggggagccaauaaucaauuuuuacgacccgcucguauuccccuccgaugaguucgacgcgucuauuucgcaggucaacgaaaagaucaaucagagccuggccuuuaucagaaaauccgaugaacuuuugcacaacgugaauguuggaaagucaacuaccaacauuaugauaacaaccaucauuaucgugauuaucgucauacugcuccugcuuaucgcagugggccuguucuuguacugcaaagcuaggaguacuccuguaacacucucuaaggaccagcugagcggcauuaauaacaucgccuuuuccaacugaggacuagugaagggaacacccaaauuuaauucagccuuaagcacaauuaauuaagagugaaacguaauuguacaagcaguuggucacccaccauagggcaugaucaacaccgcaaccuuuccuuuuucccccagugauucugaaaaaccccucuucccuucagcuugcuuagauguuccaaauuuaguaagcuuaaggcggccuacagaagaaaaagaaaaaaaaggccacaaaaguucccucucacuuucaguaaauaaaauaaaagcagcaacagaaauaaagaaauaaaugaaauucaaaaugaaauaaauauuguguugugcagcauuaaaaaaucaauaaaaauuaaaaaugagcaagaucuaaaaaaaaaaaaaaaaaaaaaaaaaaaaaaaaaaaaaaaaaaaaaaaaaaaaaaaaaaaaaaaaugcaucccccccccccccccccccccccccccccccaaaggcucuuuucagagccaccagaauu

SEQ ID NO: 12685 - RNA, 2310 nt, Artificial Sequence
  mRNA product Design f-1 comprising derived and/or modified sequence from HRSV(Memphis-37)__AIY60640.1__F0_DSCav1 (opt4)
gggagagcggcucggccauuuugucccagucaguccggaggcugcggcugcagaaguaccgccugcggaguaacugcaaagaagcuuaccauggagcugcccauccugaagaccaacgccaucaccaccauccuggccgccgugacccugugcuucgccagcagccagaacaucaccgaggaguucuaccagagcaccugcagcgccgugagcaagggcuaccugagcgcccugagaaccggcugguacaccagcgugaucaccaucgagcugagcaacaucaaggagaacaagugcaacggcaccgacgccaaggugaagcugaucaagcaggagcuggacaaguacaagaacgccgugaccgagcugcagcugcugaugcagagcacccccgccgccaacaacagagccagaagagagcugcccagauucaugaacuacacccugaacaacaccaagaacaacaacgugacccugagcaagaagagaaagagaagauuccugggcuuccugcugggcgugggcagcgccaucgccagcggcaucgccgugugcaaggugcugcaccuggagggcgaggugaacaagaucaagaacgcccugcugagcaccaacaaggccguggugagccugagcaacggcgugagcgugcugaccuucaaggugcuggaccugaagaacuacaucgacaagcagcugcugcccauccugaacaagcagagcugcagcaucagcaacaucgagaccgugaucgaguuccagcagaagaacaacagacugcuggagaucaccagagaguucagcgugaacgccggcgugaccacccccgugagcaccuacaugcugaccaacagcgagcugcugagccugaucaacgacaugcccaucaccaacgaccagaagaagcugaugagcaacaacgugcagaucgugagacagcagagcuacagcaucaugugcaucaucaaggaggaggugcuggccuacguggugcagcugccccuguacggcgugaucgacacccccugcuggaagcugcacaccagcccccugugcaccaccaacaccaaggagggcagcaacaucugccugaccagaaccgacagaggcugguacugcgacaacgccggcagcgugagcuucuucccccaggccgagaccugcaaggugcagagcaacagaguguucugcgacaccaugaacagccugacccugcccagcgaggugaaccugugcaacaucgacaucuucaaccccaaguacgacugcaagaucaugaccagcaagaccgacgugagcagcagcgugaucaccagccugggcgccaucgugagcugcuacggcaagaccaagugcaccgccagcaacaagaacagaggcaucaucaagaccuucagcaacggcugcgacuacgugagcaacaagggcguggacaccgugagcgugggcaacacccuguacuacgugaacaagcaggagggcaagagccuguacgugaagggcgagcccaucaucaacuucuacgacccccugguguuccccagcgacgaguucgacgccagcaucagccaggugaacgagaagaucaaccagagccuggccuucaucagaaagagcgacgagcugcugcacaacgugaacgugggcaagagcaccaccaacaucaugaucaccaccaucaucaucgugaucaucgugauccugcugcugcugaucgccgugggccuguuccuguacugcaaggccagaagcacccccgugacccugagcaaggaccagcugagcggcaucaacaacaucgccuucagcaacugaggacuagugaagggaacacccaaauuuaauucagccuuaagcacaauuaauuaagagugaaacguaauuguacaagcaguuggucacccaccauagggcaugaucaacaccgcaaccuuuccuuuuucccccagugauucugaaaaaccccucuucccuucagcuugcuuagauguuccaaauuuaguaagcuuaaggcggccuacagaagaaaaagaaaaaaaaggccacaaaaguucccucucacuuucaguaaauaaaauaaaagcagcaacagaaauaaagaaauaaaugaaauucaaaaugaaauaaauauuguguugugcagcauuaaaaaaucaauaaaaauuaaaaaugagcaagaucuaaaaaaaaaaaaaaaaaaaaaaaaaaaaaaaaaaaaaaaaaaaaaaaaaaaaaaaaaaaaaaaaugcaucccccccccccccccccccccccccccccccaaaggcucuuuucagagccaccagaauu

SEQ ID NO: 12686 - RNA, 2310 nt, Artificial Sequence
  mRNA product Design f-1 comprising derived and/or modified sequence from HRSV(Memphis-37)__AIY60640.1__F0_DSCav1 (opt5)
gggagagcggcucggccauuuugucccagucaguccggaggcugcggcugcagaaguaccgccugcggaguaacugcaaagaagcuuaccauggagcugcccauccucaagaccaacgccauuacaacgauccuggcugccgugacccuuugcuucgcgagcucccagaauauuacagaagaguuuuaccaaucuaccuguagcgcugucuccaaaggcuaucugucugcccucagaacagggugguacaccagcguuaucacaauugaacuguccaacaucaaggagaauaaaugcaacggaaccgacgccaaggugaaacuuaucaagcaggaacuggauaaguauaaaaaugcugugacggagcuccagcugcugaugcagucuaccccugccgcuaacaaucgggcccgcagagagcucccgcgguucaugaacuacacacugaauaacaccaagaauaacaaugucacacuuagcaaaaagcgcaaaagacgguuucugggcuuccuccugggggugggauccgcgauugccagcggcaucgcuguuuguaaggugcuucaccuggaaggggaggucaacaagauuaaaaaugcccuccugucuaccaacaaggcugugguuucccugagcaacggagugucuguccucacguuuaaagugcuggaccuuaagaauuauaucgauaaacaacugcuccccauucugaacaagcaguccugcagcaucucuaauauugaaacagugaucgaguuccagcagaaaaacaaucgccuucuggagaucaccagagaauuuuccgucaacgccggcguuacaaccccugugagcaccuacaugcucacaaauuccgagcugcugucucucauuaacgacaugcccaucacgaaugaucaaaagaagcugaugagcaacaaugugcagauuguccggcagcaguccuauagcaucauguguauuaucaaagaagaggugcuugcguacguugugcaacugccucucuacggcgucaucgacacccccugcuggaagcugcauacaucuccucuuuguaccacaaacaccaaagaaggguccaauauuugccugacgcgcacagauagaggaugguauugugacaacgccggcagcgugucuuucuuuccgcaggcugagaccugcaagguucagagcaaucggguguucugugauaccaugaacucccucacacugcccucugaggucaaccugugcaauaucgacauuuuuaacccuaaauacgauugcaagaucaugaccagcaagacagacguguccagcucugucauuacgucccucggggccaucgugagcuguuauggaaaaaccaagugcacagcuucuaauaaaaaccgcggcaucauuaagaccuucuccaaugggugugauuacguuagcaacaaaggaguggacacagucuccgugggcaauacccuguauuacguuaacaagcaagaaggcaagucucuuuaugugaaaggggagcccaucauuaauuuuuacgacccucuggucuuccccagcgaugaguucgacgccuccaucucucaggugaacgaaaagauuaaucagagccucgccuuuaucagaaaauccgaugaacugcugcacaacgugaauguuggaaagagcacgaccaacauuaugaucacaaccaucauuaucgucauuaucgugauucuucuccugcugaucgcugugggccucuuccuguacugcaaagcgcggucuacaccggucacccuuuccaaggaccagcugagcgggaucaauaacauugccuuuucuaacugaggacuagugaagggaacacccaaauuuaauucagccuuaagcacaauuaauuaagagugaaacguaauuguacaagcaguuggucacccaccauagggcaugaucaacaccgcaaccuuuccuuuuucccccagugauucugaaaaaccccucuucccuucagcuugcuuagauguuccaaauuuaguaagcuuaaggcggccuacagaagaaaaagaaaaaaaaggccacaaaaguucccucucacuuucaguaaauaaaauaaaagcagcaacagaaauaaagaaauaaaugaaauucaaaaugaaauaaauauuguguugugcagcauuaaaaaaucaauaaaaauuaaaaaugagcaagaucuaaaaaaaaaaaaaaaaaaaaaaaaaaaaaaaaaaaaaaaaaaaaaaaaaaaaaaaaaaaaaaaaugcaucccccccccccccccccccccccccccccccaaaggcucuuuucagagccaccagaauu

SEQ ID NO: 12687 - RNA, 2310 nt, Artificial Sequence
  mRNA product Design f-1 comprising derived and/or modified sequence from HRSV(Memphis-37)__AIY60640.1__F0_DSCav1 (opt6)
gggagagcggcucggccauuuugucccagucaguccggaggcugcggcugcagaaguaccgccugcggaguaacugcaaagaagcuuaccauggaacucccaauccucaaaaccaaugccauaacaaccauacucgcugcaguaaccuuauguuucgcaaguagccaaaacauaaccgaagaauuuuaucaauccacaugcuccgcaguuucuaaaggauaucuaucagcauuaagaacuggaugguacacaucuguaauaacuauagaacuaagcaauauaaaagaaaacaaauguaacggaacugacgcuaaaguaaaacuuauaaaacaagaacuagauaaauacaaaaacgccguuaccgaacuacaacuauuaaugcaaucaacaccagccgcaaauaacagagcaagacgcgaauuaccaagauucaugaauuacacacuaaacaauacaaaaaauaacaauguaacacuaucaaaaaaaagaaaacgacgauucuuaggcuuccuacuaggagucggcucagcaauagcuuccggaauagccgucuguaaaguccuacaccuugaaggcgaaguaaacaaaaucaaaaacgcacuauuaucaacaaacaaagcagucguaucuuuauccaacggagucucaguccuaacauucaaaguacucgauuuaaaaaacuacaucgauaaacaacuccuucccauucuaaacaaacaauccugcucaauauccaacaucgaaacagucauagaauuucaacaaaaaaacaaccgccugcuagaaauaacaagagaauuuuccguaaaugccggcgucaccacaccaguaucaacauacaugcuaacaaacuccgaacuacucucccuaauaaacgauaugccaaucaccaacgaccaaaaaaaacuaaugucaaauaacguucaaauagucagacaacaaucauacagcauaaugugcauaauaaaagaagaagucuuagccuacguuguacaacucccauuauacggaguuaucgauacaccaugcuggaaauuacacacaucacccuuaugcaccacaaacacaaaagaaggauccaauauuugucuaacacgaacagacagaggaugguacugugauaacgcaggaucagugucauucuuuccacaagcagaaacauguaaaguucaaucuaacagaguauucugcgacaccaugaacucccuaaccuuacccucagaaguaaaucuaugcaacauagauaucuuuaacccaaaauacgacugcaaaaucaugacaucaaaaacugacguuucuucauccguuauaacuucccucggcgcuauaguguccugcuacggaaaaacuaaaugcacagcauccaacaaaaauagaggaauaauaaaaacauuuuccaacggcugcgacuauguuucaaacaaaggaguagauaccguaucagucggcaauacauuauauuauguuaacaaacaagaaggaaaaucccuauacguaaaaggagaaccuauaaucaacuucuacgacccacucguauuccccucagacgaauuugacgcaucuauaucucaaguaaaugaaaaaauaaaccaaucacucgcauuuauccgcaaaucugacgaauuacuccauaacgucaacgucggcaaaucaaccaccaacauaaugauaacaacaauuauaauaguaauaauugucauacuacuacuccuaauagcaguaggucuauuccuauacugcaaagcaagauccacccccguaacccuuuccaaagaucaacucucaggaauaaauaacauagccuuuucaaacuaaggacuagugaagggaacacccaaauuuaauucagccuuaagcacaauuaauuaagagugaaacguaauuguacaagcaguuggucacccaccauagggcaugaucaacaccgcaaccuuuccuuuuucccccagugauucugaaaaaccccucuucccuucagcuugcuuagauguuccaaauuuaguaagcuuaaggcggccuacagaagaaaaagaaaaaaaaggccacaaaaguucccucucacuuucaguaaauaaaauaaaagcagcaacagaaauaaagaaauaaaugaaauucaaaaugaaauaaauauuguguugugcagcauuaaaaaaucaauaaaaauuaaaaaugagcaagaucuaaaaaaaaaaaaaaaaaaaaaaaaaaaaaaaaaaaaaaaaaaaaaaaaaaaaaaaaaaaaaaaaugcaucccccccccccccccccccccccccccccccaaaggcucuuuucagagccaccagaauu

SEQ ID NO: 12688 - RNA, 2310 nt, Artificial Sequence
  mRNA product Design f-1 comprising derived and/or modified sequence from HRSV(Memphis-37)__AIY60640.1__F0_DSCav1 (opt11)
gggagagcggcucggccauuuugucccagucaguccggaggcugcggcugcagaaguaccgccugcggaguaacugcaaagaagcuuaccauggaacuccccauacucaagacuaaugccaucaccaccauccucgccgccgugacccucugcuucgcaucgucccaaaacauaacagaagaguucuaccaaagcacaugcuccgcagucuccaaaggauaccucuccgcacuacguaccggcugguacaccagcgucaucaccaucgaacuuuccaacaucaaagagaacaaaugcaacggcaccgacgccaaaguaaaacucauaaaacaagagcuagacaaauacaaaaacgccgucacagaacuccaacuacugaugcaauccacaccggccgccaacaaccgcgcucgacgugaacucccacgcuucaugaacuacacucuuaacaacaccaaaaauaacaacgucacccuauccaaaaagcgaaagcgcagauuccucggcuuccuacuuggcgucggcucggcgauagccucuggaaucgccguuugcaagguccuccaccuagaaggcgaaguaaacaaaaucaaaaacgcacuccuaagcaccaacaaagccgucgucucacuuuccaacggcgucucaguccucacauucaaaguucucgaccuaaagaacuacaucgacaagcaacuacuacccauacucaauaaacaauccugcuccaucagcaacaucgagacagucaucgaauuucaacaaaagaacaaccgccuccucgaaauuacacgcgaguucucagucaacgccggagucaccaccccagucucaacauacaugcucaccaacagcgaacuccugucucuaaucaacgacaugcccaucacuaacgaccagaagaaacucauguccaacaacguccaaaucgugcgacaacaaucauacucuaucaugugcaucaucaaagaagaaguccucgcauacgucguccagcucccacucuacggcguaaucgacacacccugcuggaaacuccacacaucaccccuaugcaccaccaacacaaaagaaggcuccaacaucugccuaacccgaaccgacagagguugguauugcgacaacgccggcucagucucauucuucccacaagccgaaaccuguaaaguccaaucaaaccgcgucuucugcgauaccaugaacucucucacacuccccuccgaagucaaucucugcaacauagacaucuucaauccaaaguacgacugcaaaauaaugaccucgaaaaccgacguaagcuccagcgucaucaccuccuuaggcgcaaucguauccugcuacggcaaaaccaaaugcaccgccucaaacaaaaacagaggcaucaucaaaacguucucgaacggaugcgacuacguuuccaauaaaggcguagauaccgucuccgucggcaacacacucuauuacgucaacaaacaagaaggcaaaucccucuacgucaaaggugaaccuaucaucaacuucuacgacccccucgucuuccccagcgacgaguucgaugccucaaucagccaagucaacgagaaaaucaaccaaucacuggcuuucauacgcaaauccgacgaacuccuccacaacgugaacgucggcaaauccacaaccaacaucaugauaaccacaauaaucaucgucauaaucguaauccuacuccuccuuauugccguaggacuauuccuauacugcaaagcccgauccacccccgucacccucucaaaagaccaacucuccggcaucaacaauauagccuucucuaacuaaggacuagugaagggaacacccaaauuuaauucagccuuaagcacaauuaauuaagagugaaacguaauuguacaagcaguuggucacccaccauagggcaugaucaacaccgcaaccuuuccuuuuucccccagugauucugaaaaaccccucuucccuucagcuugcuuagauguuccaaauuuaguaagcuuaaggcggccuacagaagaaaaagaaaaaaaaggccacaaaaguucccucucacuuucaguaaauaaaauaaaagcagcaacagaaauaaagaaauaaaugaaauucaaaaugaaauaaauauuguguugugcagcauuaaaaaaucaauaaaaauuaaaaaugagcaagaucuaaaaaaaaaaaaaaaaaaaaaaaaaaaaaaaaaaaaaaaaaaaaaaaaaaaaaaaaaaaaaaaaugcaucccccccccccccccccccccccccccccccaaaggcucuuuucagagccaccagaauu

SEQ ID NO: 12689 - RNA, 2090 nt, Artificial Sequence
  mRNA product Design f-2 comprising derived and/or modified sequence from HRSV(Memphis-37)__AIY60640.1__F0_DSCav1 (opt1)
gggagagcggcucggccauuuugucccagucaguccggaggcugcggcugcagaaguaccgccugcggaguaacugcaaagaagcuuaccauggagcugcccauccucaagaccaacgccaucaccacgauccuggccgcggugacccugugcuucgccagcucccagaacaucaccgaggaguucuaccagagcacgugcuccgccgucagcaagggcuaccucuccgcccugcgcaccgggugguacaccagcgugaucaccaucgagcuguccaacaucaaggagaacaagugcaacggcaccgacgccaaggugaagcucaucaagcaggagcuggacaaguacaagaacgcggucacggagcugcagcuccugaugcagagcaccccggccgccaacaaccgggcccgccgggagcugccccgcuucaugaacuacacccucaacaacaccaagaacaacaacgugacgcuguccaagaagcggaagcgccgguuccugggguuccuccugggcguggggagcgcgaucgccuccggcaucgccgucugcaaggugcugcaccucgagggcgaggugaacaagaucaagaacgcccugcuguccaccaacaaggccgucgugagccucuccaacggggugagcguccugaccuucaaggugcuggaccucaagaacuacaucgacaagcagcugcugcccauccugaacaagcagagcugcuccaucagcaacaucgagaccgucaucgaguuccagcagaagaacaaccgccuccuggagaucacgcgggaguucagcgugaacgcgggcgugaccacccccgucuccaccuacaugcugacgaacagcgagcuccugucccugaucaacgacaugccgaucaccaacgaccagaagaagcucaugagcaacaacgugcagaucgugcgccagcaguccuacagcaucaugugcaucaucaaggaggagguccuggccuacguggugcagcugccccucuacggggucaucgacacccccugcuggaagcugcacaccagcccccugugcacgaccaacaccaaggagggcuccaacaucugccucacccggacggaccgcgggugguacugcgacaacgccggcagcguguccuucuucccgcaggccgagaccugcaagguccagagcaaccggguguucugcgacaccaugaacucccugacccugcccagcgaggugaaccucugcaacaucgacaucuucaaccccaaguacgacugcaagaucaugacguccaagaccgacgucagcuccagcgugaucaccucccugggcgccaucgugagcugcuacgggaagaccaagugcacggcgagcaacaagaaccgcggcaucaucaagaccuucuccaacgggugcgacuacgucagcaacaagggcguggacaccguguccgucggcaacacccuguacuacgugaacaagcaggagggcaagagccucuacgugaagggggagcccaucaucaacuucuacgacccgcuggucuuccccuccgacgaguucgacgccagcaucucccaggugaacgagaagaucaaccagagccuggccuucauccggaaguccgacgagcuccugcacaacgugaacgucggcaagagcaccacgaacaucaugaucaccaccaucaucaucgugaucaucgugauccugcugcuccugaucgccgucgggcuguuccucuacugcaaggcccgcuccacccccgugacgcugagcaaggaccagcuguccgggaucaacaacaucgcguucagcaacugaggacuaguggaagcauuuuccuggcugauuaaaagaaauuacucagcuauggucaucuguuccuguuagaaggcuaugcagcauauuauauacuaugcgcauguuaugaaaugcauaauaaaaaauuuuaaaaaaucuaaaagaucuaaaaaaaaaaaaaaaaaaaaaaaaaaaaaaaaaaaaaaaaaaaaaaaaaaaaaaaaaaaaaaaaugcaucccccccccccccccccccccccccccccccaaaggcucuuuucagagccaccagaauu

SEQ ID NO: 12690 - RNA, 2090 nt, Artificial Sequence
  mRNA product Design f-2 comprising derived and/or modified sequence from HRSV(Memphis-37)__AIY60640.1__F0_DSCav1 (opt1)
gggagagcggcucggccauuuugucccagucaguccggaggcugcggcugcagaaguaccgccugcggaguaacugcaaagaagcuuaccauggagcugcccauccucaagaccaacgccaucaccacgauccuggccgcggugacccugugcuucgccagcucccagaacaucaccgaggaguucuaccagagcacgugcuccgccgucagcaagggcuaccucuccgcccugcgcaccgggugguacaccagcgugaucaccaucgagcuguccaacaucaaggagaacaagugcaacggcaccgacgccaaggugaagcucaucaagcaggagcuggacaaguacaagaacgcggucacggagcugcagcuccugaugcagagcaccccggccgccaacaaccgggcccgccgggagcugccccgcuucaugaacuacacccucaacaacaccaagaacaacaacgugacgcuguccaagaagcggaagcgccgguuccugggguuccuccugggcguggggagcgcgaucgccuccggcaucgccgucugcaaggugcugcaccucgagggcgaggugaacaagaucaagaacgcccugcugagcaccaacaaggccgucgugucccucagcaacgggguguccguccugaccuucaaggugcuggaccucaagaacuacaucgacaagcagcugcugcccauccucaacaagcagagcugcuccaucagcaacaucgagaccgugaucgaguuccagcagaagaacaaccgccugcuggagaucacgcgggaguucuccgucaacgcgggcgugaccacccccgugagcaccuacaugcucacgaacagcgagcugcugucccucaucaacgacaugccgaucaccaacgaccagaagaagcugaugagcaacaacguccagaucgugcgccagcaguccuacagcaucaugugcaucaucaaggaggaggugcuggccuacgucgugcagcucccccuguacggggugaucgacacccccugcuggaagcugcacaccagcccccucugcacgaccaacaccaaggagggcagcaacaucugccugacccggacggaccgcgggugguacugcgacaacgccggcuccgucagcuucuucccgcaggccgagaccugcaaggugcaguccaaccgggucuucugcgacaccaugaacagccugacccuccccuccgaggugaaccugugcaacaucgacaucuucaaccccaaguacgacugcaagaucaugacgagcaagaccgacguguccagcuccgucaucaccagccugggcgccaucguguccugcuacgggaagaccaagugcacggcgagcaacaagaaccgcggcaucaucaagaccuucuccaacgggugcgacuacgugagcaacaagggcgucgacaccgugagcgugggcaacacccucuacuacgucaacaagcaggaggggaagucccuguacgugaagggcgagcccaucaucaacuucuacgacccgcugguguuccccagcgacgaguucgacgccuccaucagccaggucaacgagaagaucaaccagucccucgccuucauccggaaguccgacgagcugcugcacaacgugaacguggggaaguccaccacgaacaucaugaucaccaccaucaucaucgucaucaucgugauccugcuccugcugaucgccgugggccucuuccuguacugcaaggcccgcagcacccccgucacgcuguccaaggaccagcucagcgggaucaacaacaucgcguucuccaacugaggacuaguggaagcauuuuccuggcugauuaaaagaaauuacucagcuauggucaucuguuccuguuagaaggcuaugcagcauauuauauacuaugcgcauguuaugaaaugcauaauaaaaaauuuuaaaaaaucuaaaagaucuaaaaaaaaaaaaaaaaaaaaaaaaaaaaaaaaaaaaaaaaaaaaaaaaaaaaaaaaaaaaaaaaugcaucccccccccccccccccccccccccccccccaaaggcucuuuucagagccaccagaauu

SEQ ID NO: 12691 - RNA, 2090 nt, Artificial Sequence
  mRNA product Design f-2 comprising derived and/or modified sequence from HRSV(Memphis-37)__AIY60640.1__F0_DSCav1 (opt2)
gggagagcggcucggccauuuugucccagucaguccggaggcugcggcugcagaaguaccgccugcggaguaacugcaaagaagcuuaccauggagcuccccauccucaagaccaacgccaucaccaccauccucgccgccgucacccucugcuucgccuccucccagaacaucaccgaggaguucuaccaguccaccugcuccgccgucuccaagggcuaccucuccgcccuccgcaccggcugguacaccuccgucaucaccaucgagcucuccaacaucaaggagaacaagugcaacggcaccgacgccaaggucaagcucaucaagcaggagcucgacaaguacaagaacgccgucaccgagcuccagcuccucaugcaguccacccccgccgccaacaaccgcgcccgccgcgagcucccccgcuucaugaacuacacccucaacaacaccaagaacaacaacgucacccucuccaagaagcgcaagcgccgcuuccucggcuuccuccucggcgucggcuccgccaucgccuccggcaucgccgucugcaagguccuccaccucgagggcgaggucaacaagaucaagaacgcccuccucuccaccaacaaggccgucgucucccucuccaacggcgucuccguccucaccuucaagguccucgaccucaagaacuacaucgacaagcagcuccuccccauccucaacaagcaguccugcuccaucuccaacaucgagaccgucaucgaguuccagcagaagaacaaccgccuccucgagaucacccgcgaguucuccgucaacgccggcgucaccacccccgucuccaccuacaugcucaccaacuccgagcuccucucccucaucaacgacaugcccaucaccaacgaccagaagaagcucauguccaacaacguccagaucguccgccagcaguccuacuccaucaugugcaucaucaaggaggagguccucgccuacgucguccagcucccccucuacggcgucaucgacacccccugcuggaagcuccacaccuccccccucugcaccaccaacaccaaggagggcuccaacaucugccucacccgcaccgaccgcggcugguacugcgacaacgccggcuccgucuccuucuucccccaggccgagaccugcaagguccaguccaaccgcgucuucugcgacaccaugaacucccucacccuccccuccgaggucaaccucugcaacaucgacaucuucaaccccaaguacgacugcaagaucaugaccuccaagaccgacgucuccuccuccgucaucaccucccucggcgccaucgucuccugcuacggcaagaccaagugcaccgccuccaacaagaaccgcggcaucaucaagaccuucuccaacggcugcgacuacgucuccaacaagggcgucgacaccgucuccgucggcaacacccucuacuacgucaacaagcaggagggcaagucccucuacgucaagggcgagcccaucaucaacuucuacgacccccucgucuuccccuccgacgaguucgacgccuccaucucccaggucaacgagaagaucaaccagucccucgccuucauccgcaaguccgacgagcuccuccacaacgucaacgucggcaaguccaccaccaacaucaugaucaccaccaucaucaucgucaucaucgucauccuccuccuccucaucgccgucggccucuuccucuacugcaaggcccgcuccacccccgucacccucuccaaggaccagcucuccggcaucaacaacaucgccuucuccaacugaggacuaguggaagcauuuuccuggcugauuaaaagaaauuacucagcuauggucaucuguuccuguuagaaggcuaugcagcauauuauauacuaugcgcauguuaugaaaugcauaauaaaaaauuuuaaaaaaucuaaaagaucuaaaaaaaaaaaaaaaaaaaaaaaaaaaaaaaaaaaaaaaaaaaaaaaaaaaaaaaaaaaaaaaaugcaucccccccccccccccccccccccccccccccaaaggcucuuuucagagccaccagaauu

SEQ ID NO: 12692 - RNA, 2090 nt, Artificial Sequence
  mRNA product Design f-2 comprising derived and/or modified sequence from HRSV(Memphis-37)__AIY60640.1__F0_DSCav1 (opt3)
gggagagcggcucggccauuuugucccagucaguccggaggcugcggcugcagaaguaccgccugcggaguaacugcaaagaagcuuaccauggagcugcccauccucaagaccaacgccauuacaacuauacuugcugcagugacgcugugcuucgccagcucccagaauaucaccgaagaguuuuaccaaucuacauguucagcggucaguaaaggcuauuugagcgcuuuaagaacugggugguacaccuccguuauuacaaucgaacugucuaacauuaaggagaauaaaugcaacggaaccgacgccaaggugaaacuaaucaagcaggaacucgauaaguauaaaaaugcaguaacugagcugcagcuucugaugcagucgaccccugccgcuaacaauagggcacggcgcgaguugccacgauucaugaacuacacacucaauaacacgaagaauaacaaugugacucugagcaaaaagcguaaaagaagguuucuggguuuccucuuaggcgucgggucagccauagcuaguggaaucgccguguguaagguucugcaccuugaaggcgaggugaacaagauuaaaaaugcguugcuguccaccaacaaggcagucgugucucuaagcaacgguguauccguucucacauuuaaagugcuggaccuuaagaauuauaucgauaaacaacuguugccgauucucaacaagcagucaugcaguaucagcaauauagaaacugucauugaguuccagcagaaaaacaaucggcuguuagagaucacccgcgaauuuucugugaacgccggggugacaacccccgucuccacguacaugcugacuaauucagagcuccuuagccugauuaacgacaugccuaucacaaaugaucaaaagaaguugaugaguaacaauguucagaucgugagacagcagucuuauuccauuauguguauaaucaaagaagagguacuagcuuacgugguccaacugccacucuacggagugauugacacccccugcuggaagcugcauacuagcccucuuuguacaaccaacacgaaagaaggcucgaauaucugccugaccaggacagaucggggcugguauugugacaacgccgggucuguuuccuucuuuccacaggcagagacuugcaaggugcagucaaaucgcgucuucugugauaccaugaacaguuugacacuccccagcgaggugaaccugugcaauauagacauuuuuaacccuaaauacgauugcaagaucaugacuuccaagaccgacguaucuagcucaguuaucacaaguuuaggagcuauuguguccuguuaugguaaaaccaagugcacugccagcaauaaaaaccgaggcaucauuaagacguucucuaaugggugugauuacgucucaaacaaaggaguggacacagucagugugggcaauacccuguauuacguuaacaagcaagaagguaagagccuauaugugaaaggggagccaauaaucaauuuuuacgacccgcucguauuccccuccgaugaguucgacgcgucuauuucgcaggucaacgaaaagaucaaucagagccuggccuuuaucagaaaauccgaugaacuuuugcacaacgugaauguuggaaagucaacuaccaacauuaugauaacaaccaucauuaucgugauuaucgucauacugcuccugcuuaucgcagugggccuguucuuguacugcaaagcuaggaguacuccuguaacacucucuaaggaccagcugagcggcauuaauaacaucgccuuuuccaacugaggacuaguggaagcauuuuccuggcugauuaaaagaaauuacucagcuauggucaucuguuccuguuagaaggcuaugcagcauauuauauacuaugcgcauguuaugaaaugcauaauaaaaaauuuuaaaaaaucuaaaagaucuaaaaaaaaaaaaaaaaaaaaaaaaaaaaaaaaaaaaaaaaaaaaaaaaaaaaaaaaaaaaaaaaugcaucccccccccccccccccccccccccccccccaaaggcucuuuucagagccaccagaauu

SEQ ID NO: 12693 - RNA, 2090 nt, Artificial Sequence
  mRNA product Design f-2 comprising derived and/or modified sequence from HRSV(Memphis-37)__AIY60640.1__F0_DSCav1 (opt4)
gggagagcggcucggccauuuugucccagucaguccggaggcugcggcugcagaaguaccgccugcggaguaacugcaaagaagcuuaccauggagcugcccauccugaagaccaacgccaucaccaccauccuggccgccgugacccugugcuucgccagcagccagaacaucaccgaggaguucuaccagagcaccugcagcgccgugagcaagggcuaccugagcgcccugagaaccggcugguacaccagcgugaucaccaucgagcugagcaacaucaaggagaacaagugcaacggcaccgacgccaaggugaagcugaucaagcaggagcuggacaaguacaagaacgccgugaccgagcugcagcugcugaugcagagcacccccgccgccaacaacagagccagaagagagcugcccagauucaugaacuacacccugaacaacaccaagaacaacaacgugacccugagcaagaagagaaagagaagauuccugggcuuccugcugggcgugggcagcgccaucgccagcggcaucgccgugugcaaggugcugcaccuggagggcgaggugaacaagaucaagaacgcccugcugagcaccaacaaggccguggugagccugagcaacggcgugagcgugcugaccuucaaggugcuggaccugaagaacuacaucgacaagcagcugcugcccauccugaacaagcagagcugcagcaucagcaacaucgagaccgugaucgaguuccagcagaagaacaacagacugcuggagaucaccagagaguucagcgugaacgccggcgugaccacccccgugagcaccuacaugcugaccaacagcgagcugcugagccugaucaacgacaugcccaucaccaacgaccagaagaagcugaugagcaacaacgugcagaucgugagacagcagagcuacagcaucaugugcaucaucaaggaggaggugcuggccuacguggugcagcugccccuguacggcgugaucgacacccccugcuggaagcugcacaccagcccccugugcaccaccaacaccaaggagggcagcaacaucugccugaccagaaccgacagaggcugguacugcgacaacgccggcagcgugagcuucuucccccaggccgagaccugcaaggugcagagcaacagaguguucugcgacaccaugaacagccugacccugcccagcgaggugaaccugugcaacaucgacaucuucaaccccaaguacgacugcaagaucaugaccagcaagaccgacgugagcagcagcgugaucaccagccugggcgccaucgugagcugcuacggcaagaccaagugcaccgccagcaacaagaacagaggcaucaucaagaccuucagcaacggcugcgacuacgugagcaacaagggcguggacaccgugagcgugggcaacacccuguacuacgugaacaagcaggagggcaagagccuguacgugaagggcgagcccaucaucaacuucuacgacccccugguguuccccagcgacgaguucgacgccagcaucagccaggugaacgagaagaucaaccagagccuggccuucaucagaaagagcgacgagcugcugcacaacgugaacgugggcaagagcaccaccaacaucaugaucaccaccaucaucaucgugaucaucgugauccugcugcugcugaucgccgugggccuguuccuguacugcaaggccagaagcacccccgugacccugagcaaggaccagcugagcggcaucaacaacaucgccuucagcaacugaggacuaguggaagcauuuuccuggcugauuaaaagaaauuacucagcuauggucaucuguuccuguuagaaggcuaugcagcauauuauauacuaugcgcauguuaugaaaugcauaauaaaaaauuuuaaaaaaucuaaaagaucuaaaaaaaaaaaaaaaaaaaaaaaaaaaaaaaaaaaaaaaaaaaaaaaaaaaaaaaaaaaaaaaaugcaucccccccccccccccccccccccccccccccaaaggcucuuuucagagccaccagaauu

SEQ ID NO: 12694 - RNA, 2090 nt, Artificial Sequence
  mRNA product Design f-2 comprising derived and/or modified sequence from HRSV(Memphis-37)__AIY60640.1__F0_DSCav1 (opt5)
gggagagcggcucggccauuuugucccagucaguccggaggcugcggcugcagaaguaccgccugcggaguaacugcaaagaagcuuaccauggagcugcccauccucaagaccaacgccauuacaacgauccuggcugccgugacccuuugcuucgcgagcucccagaauauuacagaagaguuuuaccaaucuaccuguagcgcugucuccaaaggcuaucugucugcccucagaacagggugguacaccagcguuaucacaauugaacuguccaacaucaaggagaauaaaugcaacggaaccgacgccaaggugaaacuuaucaagcaggaacuggauaaguauaaaaaugcugugacggagcuccagcugcugaugcagucuaccccugccgcuaacaaucgggcccgcagagagcucccgcgguucaugaacuacacacugaauaacaccaagaauaacaaugucacacuuagcaaaaagcgcaaaagacgguuucugggcuuccuccugggggugggauccgcgauugccagcggcaucgcuguuuguaaggugcuucaccuggaaggggaggucaacaagauuaaaaaugcccuccugucuaccaacaaggcugugguuucccugagcaacggagugucuguccucacguuuaaagugcuggaccuuaagaauuauaucgauaaacaacugcuccccauucugaacaagcaguccugcagcaucucuaauauugaaacagugaucgaguuccagcagaaaaacaaucgccuucuggagaucaccagagaauuuuccgucaacgccggcguuacaaccccugugagcaccuacaugcucacaaauuccgagcugcugucucucauuaacgacaugcccaucacgaaugaucaaaagaagcugaugagcaacaaugugcagauuguccggcagcaguccuauagcaucauguguauuaucaaagaagaggugcuugcguacguugugcaacugccucucuacggcgucaucgacacccccugcuggaagcugcauacaucuccucuuuguaccacaaacaccaaagaaggguccaauauuugccugacgcgcacagauagaggaugguauugugacaacgccggcagcgugucuuucuuuccgcaggcugagaccugcaagguucagagcaaucggguguucugugauaccaugaacucccucacacugcccucugaggucaaccugugcaauaucgacauuuuuaacccuaaauacgauugcaagaucaugaccagcaagacagacguguccagcucugucauuacgucccucggggccaucgugagcuguuauggaaaaaccaagugcacagcuucuaauaaaaaccgcggcaucauuaagaccuucuccaaugggugugauuacguuagcaacaaaggaguggacacagucuccgugggcaauacccuguauuacguuaacaagcaagaaggcaagucucuuuaugugaaaggggagcccaucauuaauuuuuacgacccucuggucuuccccagcgaugaguucgacgccuccaucucucaggugaacgaaaagauuaaucagagccucgccuuuaucagaaaauccgaugaacugcugcacaacgugaauguuggaaagagcacgaccaacauuaugaucacaaccaucauuaucgucauuaucgugauucuucuccugcugaucgcugugggccucuuccuguacugcaaagcgcggucuacaccggucacccuuuccaaggaccagcugagcgggaucaauaacauugccuuuucuaacugaggacuaguggaagcauuuuccuggcugauuaaaagaaauuacucagcuauggucaucuguuccuguuagaaggcuaugcagcauauuauauacuaugcgcauguuaugaaaugcauaauaaaaaauuuuaaaaaaucuaaaagaucuaaaaaaaaaaaaaaaaaaaaaaaaaaaaaaaaaaaaaaaaaaaaaaaaaaaaaaaaaaaaaaaaugcaucccccccccccccccccccccccccccccccaaaggcucuuuucagagccaccagaauu

SEQ ID NO: 12695 - RNA, 2090 nt, Artificial Sequence
  mRNA product Design f-2 comprising derived and/or modified sequence from HRSV(Memphis-37)__AIY60640.1__F0_DSCav1 (opt6)
gggagagcggcucggccauuuugucccagucaguccggaggcugcggcugcagaaguaccgccugcggaguaacugcaaagaagcuuaccauggaacucccaauccucaaaaccaaugccauaacaaccauacucgcugcaguaaccuuauguuucgcaaguagccaaaacauaaccgaagaauuuuaucaauccacaugcuccgcaguuucuaaaggauaucuaucagcauuaagaacuggaugguacacaucuguaauaacuauagaacuaagcaauauaaaagaaaacaaauguaacggaacugacgcuaaaguaaaacuuauaaaacaagaacuagauaaauacaaaaacgccguuaccgaacuacaacuauuaaugcaaucaacaccagccgcaaauaacagagcaagacgcgaauuaccaagauucaugaauuacacacuaaacaauacaaaaaauaacaauguaacacuaucaaaaaaaagaaaacgacgauucuuaggcuuccuacuaggagucggcucagcaauagcuuccggaauagccgucuguaaaguccuacaccuugaaggcgaaguaaacaaaaucaaaaacgcacuauuaucaacaaacaaagcagucguaucuuuauccaacggagucucaguccuaacauucaaaguacucgauuuaaaaaacuacaucgauaaacaacuccuucccauucuaaacaaacaauccugcucaauauccaacaucgaaacagucauagaauuucaacaaaaaaacaaccgccugcuagaaauaacaagagaauuuuccguaaaugccggcgucaccacaccaguaucaacauacaugcuaacaaacuccgaacuacucucccuaauaaacgauaugccaaucaccaacgaccaaaaaaaacuaaugucaaauaacguucaaauagucagacaacaaucauacagcauaaugugcauaauaaaagaagaagucuuagccuacguuguacaacucccauuauacggaguuaucgauacaccaugcuggaaauuacacacaucacccuuaugcaccacaaacacaaaagaaggauccaauauuugucuaacacgaacagacagaggaugguacugugauaacgcaggaucagugucauucuuuccacaagcagaaacauguaaaguucaaucuaacagaguauucugcgacaccaugaacucccuaaccuuacccucagaaguaaaucuaugcaacauagauaucuuuaacccaaaauacgacugcaaaaucaugacaucaaaaacugacguuucuucauccguuauaacuucccucggcgcuauaguguccugcuacggaaaaacuaaaugcacagcauccaacaaaaauagaggaauaauaaaaacauuuuccaacggcugcgacuauguuucaaacaaaggaguagauaccguaucagucggcaauacauuauauuauguuaacaaacaagaaggaaaaucccuauacguaaaaggagaaccuauaaucaacuucuacgacccacucguauuccccucagacgaauuugacgcaucuauaucucaaguaaaugaaaaaauaaaccaaucacucgcauuuauccgcaaaucugacgaauuacuccauaacgucaacgucggcaaaucaaccaccaacauaaugauaacaacaauuauaauaguaauaauugucauacuacuacuccuaauagcaguaggucuauuccuauacugcaaagcaagauccacccccguaacccuuuccaaagaucaacucucaggaauaaauaacauagccuuuucaaacuaaggacuaguggaagcauuuuccuggcugauuaaaagaaauuacucagcuauggucaucuguuccuguuagaaggcuaugcagcauauuauauacuaugcgcauguuaugaaaugcauaauaaaaaauuuuaaaaaaucuaaaagaucuaaaaaaaaaaaaaaaaaaaaaaaaaaaaaaaaaaaaaaaaaaaaaaaaaaaaaaaaaaaaaaaaugcaucccccccccccccccccccccccccccccccaaaggcucuuuucagagccaccagaauu

SEQ ID NO: 12696 - RNA, 2090 nt, Artificial Sequence
  mRNA product Design f-2 comprising derived and/or modified sequence from HRSV(Memphis-37)__AIY60640.1__F0_DSCav1 (opt11)
gggagagcggcucggccauuuugucccagucaguccggaggcugcggcugcagaaguaccgccugcggaguaacugcaaagaagcuuaccauggaacuccccauacucaagacuaaugccaucaccaccauccucgccgccgugacccucugcuucgcaucgucccaaaacauaacagaagaguucuaccaaagcacaugcuccgcagucuccaaaggauaccucuccgcacuacguaccggcugguacaccagcgucaucaccaucgaacuuuccaacaucaaagagaacaaaugcaacggcaccgacgccaaaguaaaacucauaaaacaagagcuagacaaauacaaaaacgccgucacagaacuccaacuacugaugcaauccacaccggccgccaacaaccgcgcucgacgugaacucccacgcuucaugaacuacacucuuaacaacaccaaaaauaacaacgucacccuauccaaaaagcgaaagcgcagauuccucggcuuccuacuuggcgucggcucggcgauagccucuggaaucgccguuugcaagguccuccaccuagaaggcgaaguaaacaaaaucaaaaacgcacuccuaagcaccaacaaagccgucgucucacuuuccaacggcgucucaguccucacauucaaaguucucgaccuaaagaacuacaucgacaagcaacuacuacccauacucaauaaacaauccugcuccaucagcaacaucgagacagucaucgaauuucaacaaaagaacaaccgccuccucgaaauuacacgcgaguucucagucaacgccggagucaccaccccagucucaacauacaugcucaccaacagcgaacuccugucucuaaucaacgacaugcccaucacuaacgaccagaagaaacucauguccaacaacguccaaaucgugcgacaacaaucauacucuaucaugugcaucaucaaagaagaaguccucgcauacgucguccagcucccacucuacggcguaaucgacacacccugcuggaaacuccacacaucaccccuaugcaccaccaacacaaaagaaggcuccaacaucugccuaacccgaaccgacagagguugguauugcgacaacgccggcucagucucauucuucccacaagccgaaaccuguaaaguccaaucaaaccgcgucuucugcgauaccaugaacucucucacacuccccuccgaagucaaucucugcaacauagacaucuucaauccaaaguacgacugcaaaauaaugaccucgaaaaccgacguaagcuccagcgucaucaccuccuuaggcgcaaucguauccugcuacggcaaaaccaaaugcaccgccucaaacaaaaacagaggcaucaucaaaacguucucgaacggaugcgacuacguuuccaauaaaggcguagauaccgucuccgucggcaacacacucuauuacgucaacaaacaagaaggcaaaucccucuacgucaaaggugaaccuaucaucaacuucuacgacccccucgucuuccccagcgacgaguucgaugccucaaucagccaagucaacgagaaaaucaaccaaucacuggcuuucauacgcaaauccgacgaacuccuccacaacgugaacgucggcaaauccacaaccaacaucaugauaaccacaauaaucaucgucauaaucguaauccuacuccuccuuauugccguaggacuauuccuauacugcaaagcccgauccacccccgucacccucucaaaagaccaacucuccggcaucaacaauauagccuucucuaacuaaggacuaguggaagcauuuuccuggcugauuaaaagaaauuacucagcuauggucaucuguuccuguuagaaggcuaugcagcauauuauauacuaugcgcauguuaugaaaugcauaauaaaaaauuuuaaaaaaucuaaaagaucuaaaaaaaaaaaaaaaaaaaaaaaaaaaaaaaaaaaaaaaaaaaaaaaaaaaaaaaaaaaaaaaaugcaucccccccccccccccccccccccccccccccaaaggcucuuuucagagccaccagaauu

SEQ ID NO: 12697 - RNA, 2081 nt, Artificial Sequence
  mRNA product Design f-3 comprising derived and/or modified sequence from HRSV(Memphis-37)__AIY60640.1__F0_DSCav1 (opt1)
gggagagucccgcagucggcguccagcggcucugcuuguucgugugugugucguugcaggccuuauucaagcuuaccauggagcugcccauccucaagaccaacgccaucaccacgauccuggccgcggugacccugugcuucgccagcucccagaacaucaccgaggaguucuaccagagcacgugcuccgccgucagcaagggcuaccucuccgcccugcgcaccgggugguacaccagcgugaucaccaucgagcuguccaacaucaaggagaacaagugcaacggcaccgacgccaaggugaagcucaucaagcaggagcuggacaaguacaagaacgcggucacggagcugcagcuccugaugcagagcaccccggccgccaacaaccgggcccgccgggagcugccccgcuucaugaacuacacccucaacaacaccaagaacaacaacgugacgcuguccaagaagcggaagcgccgguuccugggguuccuccugggcguggggagcgcgaucgccuccggcaucgccgucugcaaggugcugcaccucgagggcgaggugaacaagaucaagaacgcccugcuguccaccaacaaggccgucgugagccucuccaacggggugagcguccugaccuucaaggugcuggaccucaagaacuacaucgacaagcagcugcugcccauccugaacaagcagagcugcuccaucagcaacaucgagaccgucaucgaguuccagcagaagaacaaccgccuccuggagaucacgcgggaguucagcgugaacgcgggcgugaccacccccgucuccaccuacaugcugacgaacagcgagcuccugucccugaucaacgacaugccgaucaccaacgaccagaagaagcucaugagcaacaacgugcagaucgugcgccagcaguccuacagcaucaugugcaucaucaaggaggagguccuggccuacguggugcagcugccccucuacggggucaucgacacccccugcuggaagcugcacaccagcccccugugcacgaccaacaccaaggagggcuccaacaucugccucacccggacggaccgcgggugguacugcgacaacgccggcagcguguccuucuucccgcaggccgagaccugcaagguccagagcaaccggguguucugcgacaccaugaacucccugacccugcccagcgaggugaaccucugcaacaucgacaucuucaaccccaaguacgacugcaagaucaugacguccaagaccgacgucagcuccagcgugaucaccucccugggcgccaucgugagcugcuacgggaagaccaagugcacggcgagcaacaagaaccgcggcaucaucaagaccuucuccaacgggugcgacuacgucagcaacaagggcguggacaccguguccgucggcaacacccuguacuacgugaacaagcaggagggcaagagccucuacgugaagggggagcccaucaucaacuucuacgacccgcuggucuuccccuccgacgaguucgacgccagcaucucccaggugaacgagaagaucaaccagagccuggccuucauccggaaguccgacgagcuccugcacaacgugaacgucggcaagagcaccacgaacaucaugaucaccaccaucaucaucgugaucaucgugauccugcugcuccugaucgccgucgggcuguuccucuacugcaaggcccgcuccacccccgugacgcugagcaaggaccagcuguccgggaucaacaacaucgcguucagcaacugaggacuaguacuggcugcaucucccuuuccucuguccuccauccuucucccaggauggugaagggggaccugguacccagugauccccaccccaggauccuaaaucaugacuuaccugcuaauaaaaacucauuggaaaagugagaagaucuaaaaaaaaaaaaaaaaaaaaaaaaaaaaaaaaaaaaaaaaaaaaaaaaaaaaaaaaaaaaaaaaugcaucccccccccccccccccccccccccccccccaaaggcucuuuucagagccaccagaauu

SEQ ID NO: 12698 - RNA, 2081 nt, Artificial Sequence
  mRNA product Design f-3 comprising derived and/or modified sequence from HRSV(Memphis-37)__AIY60640.1__F0_DSCav1 (opt1)
gggagagucccgcagucggcguccagcggcucugcuuguucgugugugugucguugcaggccuuauucaagcuuaccauggagcugcccauccucaagaccaacgccaucaccacgauccuggccgcggugacccugugcuucgccagcucccagaacaucaccgaggaguucuaccagagcacgugcuccgccgucagcaagggcuaccucuccgcccugcgcaccgggugguacaccagcgugaucaccaucgagcuguccaacaucaaggagaacaagugcaacggcaccgacgccaaggugaagcucaucaagcaggagcuggacaaguacaagaacgcggucacggagcugcagcuccugaugcagagcaccccggccgccaacaaccgggcccgccgggagcugccccgcuucaugaacuacacccucaacaacaccaagaacaacaacgugacgcuguccaagaagcggaagcgccgguuccugggguuccuccugggcguggggagcgcgaucgccuccggcaucgccgucugcaaggugcugcaccucgagggcgaggugaacaagaucaagaacgcccugcugagcaccaacaaggccgucgugucccucagcaacgggguguccguccugaccuucaaggugcuggaccucaagaacuacaucgacaagcagcugcugcccauccucaacaagcagagcugcuccaucagcaacaucgagaccgugaucgaguuccagcagaagaacaaccgccugcuggagaucacgcgggaguucuccgucaacgcgggcgugaccacccccgugagcaccuacaugcucacgaacagcgagcugcugucccucaucaacgacaugccgaucaccaacgaccagaagaagcugaugagcaacaacguccagaucgugcgccagcaguccuacagcaucaugugcaucaucaaggaggaggugcuggccuacgucgugcagcucccccuguacggggugaucgacacccccugcuggaagcugcacaccagcccccucugcacgaccaacaccaaggagggcagcaacaucugccugacccggacggaccgcgggugguacugcgacaacgccggcuccgucagcuucuucccgcaggccgagaccugcaaggugcaguccaaccgggucuucugcgacaccaugaacagccugacccuccccuccgaggugaaccugugcaacaucgacaucuucaaccccaaguacgacugcaagaucaugacgagcaagaccgacguguccagcuccgucaucaccagccugggcgccaucguguccugcuacgggaagaccaagugcacggcgagcaacaagaaccgcggcaucaucaagaccuucuccaacgggugcgacuacgugagcaacaagggcgucgacaccgugagcgugggcaacacccucuacuacgucaacaagcaggaggggaagucccuguacgugaagggcgagcccaucaucaacuucuacgacccgcugguguuccccagcgacgaguucgacgccuccaucagccaggucaacgagaagaucaaccagucccucgccuucauccggaaguccgacgagcugcugcacaacgugaacguggggaaguccaccacgaacaucaugaucaccaccaucaucaucgucaucaucgugauccugcuccugcugaucgccgugggccucuuccuguacugcaaggcccgcagcacccccgucacgcuguccaaggaccagcucagcgggaucaacaacaucgcguucuccaacugaggacuaguacuggcugcaucucccuuuccucuguccuccauccuucucccaggauggugaagggggaccugguacccagugauccccaccccaggauccuaaaucaugacuuaccugcuaauaaaaacucauuggaaaagugagaagaucuaaaaaaaaaaaaaaaaaaaaaaaaaaaaaaaaaaaaaaaaaaaaaaaaaaaaaaaaaaaaaaaaugcaucccccccccccccccccccccccccccccccaaaggcucuuuucagagccaccagaauu

SEQ ID NO: 12699 - RNA, 2081 nt, Artificial Sequence
  mRNA product Design f-3 comprising derived and/or modified sequence from HRSV(Memphis-37)__AIY60640.1__F0_DSCav1 (opt2)
gggagagucccgcagucggcguccagcggcucugcuuguucgugugugugucguugcaggccuuauucaagcuuaccauggagcuccccauccucaagaccaacgccaucaccaccauccucgccgccgucacccucugcuucgccuccucccagaacaucaccgaggaguucuaccaguccaccugcuccgccgucuccaagggcuaccucuccgcccuccgcaccggcugguacaccuccgucaucaccaucgagcucuccaacaucaaggagaacaagugcaacggcaccgacgccaaggucaagcucaucaagcaggagcucgacaaguacaagaacgccgucaccgagcuccagcuccucaugcaguccacccccgccgccaacaaccgcgcccgccgcgagcucccccgcuucaugaacuacacccucaacaacaccaagaacaacaacgucacccucuccaagaagcgcaagcgccgcuuccucggcuuccuccucggcgucggcuccgccaucgccuccggcaucgccgucugcaagguccuccaccucgagggcgaggucaacaagaucaagaacgcccuccucuccaccaacaaggccgucgucucccucuccaacggcgucuccguccucaccuucaagguccucgaccucaagaacuacaucgacaagcagcuccuccccauccucaacaagcaguccugcuccaucuccaacaucgagaccgucaucgaguuccagcagaagaacaaccgccuccucgagaucacccgcgaguucuccgucaacgccggcgucaccacccccgucuccaccuacaugcucaccaacuccgagcuccucucccucaucaacgacaugcccaucaccaacgaccagaagaagcucauguccaacaacguccagaucguccgccagcaguccuacuccaucaugugcaucaucaaggaggagguccucgccuacgucguccagcucccccucuacggcgucaucgacacccccugcuggaagcuccacaccuccccccucugcaccaccaacaccaaggagggcuccaacaucugccucacccgcaccgaccgcggcugguacugcgacaacgccggcuccgucuccuucuucccccaggccgagaccugcaagguccaguccaaccgcgucuucugcgacaccaugaacucccucacccuccccuccgaggucaaccucugcaacaucgacaucuucaaccccaaguacgacugcaagaucaugaccuccaagaccgacgucuccuccuccgucaucaccucccucggcgccaucgucuccugcuacggcaagaccaagugcaccgccuccaacaagaaccgcggcaucaucaagaccuucuccaacggcugcgacuacgucuccaacaagggcgucgacaccgucuccgucggcaacacccucuacuacgucaacaagcaggagggcaagucccucuacgucaagggcgagcccaucaucaacuucuacgacccccucgucuuccccuccgacgaguucgacgccuccaucucccaggucaacgagaagaucaaccagucccucgccuucauccgcaaguccgacgagcuccuccacaacgucaacgucggcaaguccaccaccaacaucaugaucaccaccaucaucaucgucaucaucgucauccuccuccuccucaucgccgucggccucuuccucuacugcaaggcccgcuccacccccgucacccucuccaaggaccagcucuccggcaucaacaacaucgccuucuccaacugaggacuaguacuggcugcaucucccuuuccucuguccuccauccuucucccaggauggugaagggggaccugguacccagugauccccaccccaggauccuaaaucaugacuuaccugcuaauaaaaacucauuggaaaagugagaagaucuaaaaaaaaaaaaaaaaaaaaaaaaaaaaaaaaaaaaaaaaaaaaaaaaaaaaaaaaaaaaaaaaugcaucccccccccccccccccccccccccccccccaaaggcucuuuucagagccaccagaauu

SEQ ID NO: 12700 - RNA, 2081 nt, Artificial Sequence
  mRNA product Design f-3 comprising derived and/or modified sequence from HRSV(Memphis-37)__AIY60640.1__F0_DSCav1 (opt3)
gggagagucccgcagucggcguccagcggcucugcuuguucgugugugugucguugcaggccuuauucaagcuuaccauggagcugcccauccucaagaccaacgccauuacaacuauacuugcugcagugacgcugugcuucgccagcucccagaauaucaccgaagaguuuuaccaaucuacauguucagcggucaguaaaggcuauuugagcgcuuuaagaacugggugguacaccuccguuauuacaaucgaacugucuaacauuaaggagaauaaaugcaacggaaccgacgccaaggugaaacuaaucaagcaggaacucgauaaguauaaaaaugcaguaacugagcugcagcuucugaugcagucgaccccugccgcuaacaauagggcacggcgcgaguugccacgauucaugaacuacacacucaauaacacgaagaauaacaaugugacucugagcaaaaagcguaaaagaagguuucuggguuuccucuuaggcgucgggucagccauagcuaguggaaucgccguguguaagguucugcaccuugaaggcgaggugaacaagauuaaaaaugcguugcuguccaccaacaaggcagucgugucucuaagcaacgguguauccguucucacauuuaaagugcuggaccuuaagaauuauaucgauaaacaacuguugccgauucucaacaagcagucaugcaguaucagcaauauagaaacugucauugaguuccagcagaaaaacaaucggcuguuagagaucacccgcgaauuuucugugaacgccggggugacaacccccgucuccacguacaugcugacuaauucagagcuccuuagccugauuaacgacaugccuaucacaaaugaucaaaagaaguugaugaguaacaauguucagaucgugagacagcagucuuauuccauuauguguauaaucaaagaagagguacuagcuuacgugguccaacugccacucuacggagugauugacacccccugcuggaagcugcauacuagcccucuuuguacaaccaacacgaaagaaggcucgaauaucugccugaccaggacagaucggggcugguauugugacaacgccgggucuguuuccuucuuuccacaggcagagacuugcaaggugcagucaaaucgcgucuucugugauaccaugaacaguuugacacuccccagcgaggugaaccugugcaauauagacauuuuuaacccuaaauacgauugcaagaucaugacuuccaagaccgacguaucuagcucaguuaucacaaguuuaggagcuauuguguccuguuaugguaaaaccaagugcacugccagcaauaaaaaccgaggcaucauuaagacguucucuaaugggugugauuacgucucaaacaaaggaguggacacagucagugugggcaauacccuguauuacguuaacaagcaagaagguaagagccuauaugugaaaggggagccaauaaucaauuuuuacgacccgcucguauuccccuccgaugaguucgacgcgucuauuucgcaggucaacgaaaagaucaaucagagccuggccuuuaucagaaaauccgaugaacuuuugcacaacgugaauguuggaaagucaacuaccaacauuaugauaacaaccaucauuaucgugauuaucgucauacugcuccugcuuaucgcagugggccuguucuuguacugcaaagcuaggaguacuccuguaacacucucuaaggaccagcugagcggcauuaauaacaucgccuuuuccaacugaggacuaguacuggcugcaucucccuuuccucuguccuccauccuucucccaggauggugaagggggaccugguacccagugauccccaccccaggauccuaaaucaugacuuaccugcuaauaaaaacucauuggaaaagugagaagaucuaaaaaaaaaaaaaaaaaaaaaaaaaaaaaaaaaaaaaaaaaaaaaaaaaaaaaaaaaaaaaaaaugcaucccccccccccccccccccccccccccccccaaaggcucuuuucagagccaccagaauu

SEQ ID NO: 12701 - RNA, 2081 nt, Artificial Sequence
  mRNA product Design f-3 comprising derived and/or modified sequence from HRSV(Memphis-37)__AIY60640.1__F0_DSCav1 (opt4)
gggagagucccgcagucggcguccagcggcucugcuuguucgugugugugucguugcaggccuuauucaagcuuaccauggagcugcccauccugaagaccaacgccaucaccaccauccuggccgccgugacccugugcuucgccagcagccagaacaucaccgaggaguucuaccagagcaccugcagcgccgugagcaagggcuaccugagcgcccugagaaccggcugguacaccagcgugaucaccaucgagcugagcaacaucaaggagaacaagugcaacggcaccgacgccaaggugaagcugaucaagcaggagcuggacaaguacaagaacgccgugaccgagcugcagcugcugaugcagagcacccccgccgccaacaacagagccagaagagagcugcccagauucaugaacuacacccugaacaacaccaagaacaacaacgugacccugagcaagaagagaaagagaagauuccugggcuuccugcugggcgugggcagcgccaucgccagcggcaucgccgugugcaaggugcugcaccuggagggcgaggugaacaagaucaagaacgcccugcugagcaccaacaaggccguggugagccugagcaacggcgugagcgugcugaccuucaaggugcuggaccugaagaacuacaucgacaagcagcugcugcccauccugaacaagcagagcugcagcaucagcaacaucgagaccgugaucgaguuccagcagaagaacaacagacugcuggagaucaccagagaguucagcgugaacgccggcgugaccacccccgugagcaccuacaugcugaccaacagcgagcugcugagccugaucaacgacaugcccaucaccaacgaccagaagaagcugaugagcaacaacgugcagaucgugagacagcagagcuacagcaucaugugcaucaucaaggaggaggugcuggccuacguggugcagcugccccuguacggcgugaucgacacccccugcuggaagcugcacaccagcccccugugcaccaccaacaccaaggagggcagcaacaucugccugaccagaaccgacagaggcugguacugcgacaacgccggcagcgugagcuucuucccccaggccgagaccugcaaggugcagagcaacagaguguucugcgacaccaugaacagccugacccugcccagcgaggugaaccugugcaacaucgacaucuucaaccccaaguacgacugcaagaucaugaccagcaagaccgacgugagcagcagcgugaucaccagccugggcgccaucgugagcugcuacggcaagaccaagugcaccgccagcaacaagaacagaggcaucaucaagaccuucagcaacggcugcgacuacgugagcaacaagggcguggacaccgugagcgugggcaacacccuguacuacgugaacaagcaggagggcaagagccuguacgugaagggcgagcccaucaucaacuucuacgacccccugguguuccccagcgacgaguucgacgccagcaucagccaggugaacgagaagaucaaccagagccuggccuucaucagaaagagcgacgagcugcugcacaacgugaacgugggcaagagcaccaccaacaucaugaucaccaccaucaucaucgugaucaucgugauccugcugcugcugaucgccgugggccuguuccuguacugcaaggccagaagcacccccgugacccugagcaaggaccagcugagcggcaucaacaacaucgccuucagcaacugaggacuaguacuggcugcaucucccuuuccucuguccuccauccuucucccaggauggugaagggggaccugguacccagugauccccaccccaggauccuaaaucaugacuuaccugcuaauaaaaacucauuggaaaagugagaagaucuaaaaaaaaaaaaaaaaaaaaaaaaaaaaaaaaaaaaaaaaaaaaaaaaaaaaaaaaaaaaaaaaugcaucccccccccccccccccccccccccccccccaaaggcucuuuucagagccaccagaauu

SEQ ID NO: 12702 - RNA, 2081 nt, Artificial Sequence
  mRNA product Design f-3 comprising derived and/or modified sequence from HRSV(Memphis-37)__AIY60640.1__F0_DSCav1 (opt5)
gggagagucccgcagucggcguccagcggcucugcuuguucgugugugugucguugcaggccuuauucaagcuuaccauggagcugcccauccucaagaccaacgccauuacaacgauccuggcugccgugacccuuugcuucgcgagcucccagaauauuacagaagaguuuuaccaaucuaccuguagcgcugucuccaaaggcuaucugucugcccucagaacagggugguacaccagcguuaucacaauugaacuguccaacaucaaggagaauaaaugcaacggaaccgacgccaaggugaaacuuaucaagcaggaacuggauaaguauaaaaaugcugugacggagcuccagcugcugaugcagucuaccccugccgcuaacaaucgggcccgcagagagcucccgcgguucaugaacuacacacugaauaacaccaagaauaacaaugucacacuuagcaaaaagcgcaaaagacgguuucugggcuuccuccugggggugggauccgcgauugccagcggcaucgcuguuuguaaggugcuucaccuggaaggggaggucaacaagauuaaaaaugcccuccugucuaccaacaaggcugugguuucccugagcaacggagugucuguccucacguuuaaagugcuggaccuuaagaauuauaucgauaaacaacugcuccccauucugaacaagcaguccugcagcaucucuaauauugaaacagugaucgaguuccagcagaaaaacaaucgccuucuggagaucaccagagaauuuuccgucaacgccggcguuacaaccccugugagcaccuacaugcucacaaauuccgagcugcugucucucauuaacgacaugcccaucacgaaugaucaaaagaagcugaugagcaacaaugugcagauuguccggcagcaguccuauagcaucauguguauuaucaaagaagaggugcuugcguacguugugcaacugccucucuacggcgucaucgacacccccugcuggaagcugcauacaucuccucuuuguaccacaaacaccaaagaaggguccaauauuugccugacgcgcacagauagaggaugguauugugacaacgccggcagcgugucuuucuuuccgcaggcugagaccugcaagguucagagcaaucggguguucugugauaccaugaacucccucacacugcccucugaggucaaccugugcaauaucgacauuuuuaacccuaaauacgauugcaagaucaugaccagcaagacagacguguccagcucugucauuacgucccucggggccaucgugagcuguuauggaaaaaccaagugcacagcuucuaauaaaaaccgcggcaucauuaagaccuucuccaaugggugugauuacguuagcaacaaaggaguggacacagucuccgugggcaauacccuguauuacguuaacaagcaagaaggcaagucucuuuaugugaaaggggagcccaucauuaauuuuuacgacccucuggucuuccccagcgaugaguucgacgccuccaucucucaggugaacgaaaagauuaaucagagccucgccuuuaucagaaaauccgaugaacugcugcacaacgugaauguuggaaagagcacgaccaacauuaugaucacaaccaucauuaucgucauuaucgugauucuucuccugcugaucgcugugggccucuuccuguacugcaaagcgcggucuacaccggucacccuuuccaaggaccagcugagcgggaucaauaacauugccuuuucuaacugaggacuaguacuggcugcaucucccuuuccucuguccuccauccuucucccaggauggugaagggggaccugguacccagugauccccaccccaggauccuaaaucaugacuuaccugcuaauaaaaacucauuggaaaagugagaagaucuaaaaaaaaaaaaaaaaaaaaaaaaaaaaaaaaaaaaaaaaaaaaaaaaaaaaaaaaaaaaaaaaugcaucccccccccccccccccccccccccccccccaaaggcucuuuucagagccaccagaauu

SEQ ID NO: 12703 - RNA, 2081 nt, Artificial Sequence
  mRNA product Design f-3 comprising derived and/or modified sequence from HRSV(Memphis-37)__AIY60640.1__F0_DSCav1 (opt6)
gggagagucccgcagucggcguccagcggcucugcuuguucgugugugugucguugcaggccuuauucaagcuuaccauggaacucccaauccucaaaaccaaugccauaacaaccauacucgcugcaguaaccuuauguuucgcaaguagccaaaacauaaccgaagaauuuuaucaauccacaugcuccgcaguuucuaaaggauaucuaucagcauuaagaacuggaugguacacaucuguaauaacuauagaacuaagcaauauaaaagaaaacaaauguaacggaacugacgcuaaaguaaaacuuauaaaacaagaacuagauaaauacaaaaacgccguuaccgaacuacaacuauuaaugcaaucaacaccagccgcaaauaacagagcaagacgcgaauuaccaagauucaugaauuacacacuaaacaauacaaaaaauaacaauguaacacuaucaaaaaaaagaaaacgacgauucuuaggcuuccuacuaggagucggcucagcaauagcuuccggaauagccgucuguaaaguccuacaccuugaaggcgaaguaaacaaaaucaaaaacgcacuauuaucaacaaacaaagcagucguaucuuuauccaacggagucucaguccuaacauucaaaguacucgauuuaaaaaacuacaucgauaaacaacuccuucccauucuaaacaaacaauccugcucaauauccaacaucgaaacagucauagaauuucaacaaaaaaacaaccgccugcuagaaauaacaagagaauuuuccguaaaugccggcgucaccacaccaguaucaacauacaugcuaacaaacuccgaacuacucucccuaauaaacgauaugccaaucaccaacgaccaaaaaaaacuaaugucaaauaacguucaaauagucagacaacaaucauacagcauaaugugcauaauaaaagaagaagucuuagccuacguuguacaacucccauuauacggaguuaucgauacaccaugcuggaaauuacacacaucacccuuaugcaccacaaacacaaaagaaggauccaauauuugucuaacacgaacagacagaggaugguacugugauaacgcaggaucagugucauucuuuccacaagcagaaacauguaaaguucaaucuaacagaguauucugcgacaccaugaacucccuaaccuuacccucagaaguaaaucuaugcaacauagauaucuuuaacccaaaauacgacugcaaaaucaugacaucaaaaacugacguuucuucauccguuauaacuucccucggcgcuauaguguccugcuacggaaaaacuaaaugcacagcauccaacaaaaauagaggaauaauaaaaacauuuuccaacggcugcgacuauguuucaaacaaaggaguagauaccguaucagucggcaauacauuauauuauguuaacaaacaagaaggaaaaucccuauacguaaaaggagaaccuauaaucaacuucuacgacccacucguauuccccucagacgaauuugacgcaucuauaucucaaguaaaugaaaaaauaaaccaaucacucgcauuuauccgcaaaucugacgaauuacuccauaacgucaacgucggcaaaucaaccaccaacauaaugauaacaacaauuauaauaguaauaauugucauacuacuacuccuaauagcaguaggucuauuccuauacugcaaagcaagauccacccccguaacccuuuccaaagaucaacucucaggaauaaauaacauagccuuuucaaacuaaggacuaguacuggcugcaucucccuuuccucuguccuccauccuucucccaggauggugaagggggaccugguacccagugauccccaccccaggauccuaaaucaugacuuaccugcuaauaaaaacucauuggaaaagugagaagaucuaaaaaaaaaaaaaaaaaaaaaaaaaaaaaaaaaaaaaaaaaaaaaaaaaaaaaaaaaaaaaaaaugcaucccccccccccccccccccccccccccccccaaaggcucuuuucagagccaccagaauu

SEQ ID NO: 12704 - RNA, 2081 nt, Artificial Sequence
  mRNA product Design f-3 comprising derived and/or modified sequence from HRSV(Memphis-37)__AIY60640.1__F0_DSCav1 (opt11)
gggagagucccgcagucggcguccagcggcucugcuuguucgugugugugucguugcaggccuuauucaagcuuaccauggaacuccccauacucaagacuaaugccaucaccaccauccucgccgccgugacccucugcuucgcaucgucccaaaacauaacagaagaguucuaccaaagcacaugcuccgcagucuccaaaggauaccucuccgcacuacguaccggcugguacaccagcgucaucaccaucgaacuuuccaacaucaaagagaacaaaugcaacggcaccgacgccaaaguaaaacucauaaaacaagagcuagacaaauacaaaaacgccgucacagaacuccaacuacugaugcaauccacaccggccgccaacaaccgcgcucgacgugaacucccacgcuucaugaacuacacucuuaacaacaccaaaaauaacaacgucacccuauccaaaaagcgaaagcgcagauuccucggcuuccuacuuggcgucggcucggcgauagccucuggaaucgccguuugcaagguccuccaccuagaaggcgaaguaaacaaaaucaaaaacgcacuccuaagcaccaacaaagccgucgucucacuuuccaacggcgucucaguccucacauucaaaguucucgaccuaaagaacuacaucgacaagcaacuacuacccauacucaauaaacaauccugcuccaucagcaacaucgagacagucaucgaauuucaacaaaagaacaaccgccuccucgaaauuacacgcgaguucucagucaacgccggagucaccaccccagucucaacauacaugcucaccaacagcgaacuccugucucuaaucaacgacaugcccaucacuaacgaccagaagaaacucauguccaacaacguccaaaucgugcgacaacaaucauacucuaucaugugcaucaucaaagaagaaguccucgcauacgucguccagcucccacucuacggcguaaucgacacacccugcuggaaacuccacacaucaccccuaugcaccaccaacacaaaagaaggcuccaacaucugccuaacccgaaccgacagagguugguauugcgacaacgccggcucagucucauucuucccacaagccgaaaccuguaaaguccaaucaaaccgcgucuucugcgauaccaugaacucucucacacuccccuccgaagucaaucucugcaacauagacaucuucaauccaaaguacgacugcaaaauaaugaccucgaaaaccgacguaagcuccagcgucaucaccuccuuaggcgcaaucguauccugcuacggcaaaaccaaaugcaccgccucaaacaaaaacagaggcaucaucaaaacguucucgaacggaugcgacuacguuuccaauaaaggcguagauaccgucuccgucggcaacacacucuauuacgucaacaaacaagaaggcaaaucccucuacgucaaaggugaaccuaucaucaacuucuacgacccccucgucuuccccagcgacgaguucgaugccucaaucagccaagucaacgagaaaaucaaccaaucacuggcuuucauacgcaaauccgacgaacuccuccacaacgugaacgucggcaaauccacaaccaacaucaugauaaccacaauaaucaucgucauaaucguaauccuacuccuccuuauugccguaggacuauuccuauacugcaaagcccgauccacccccgucacccucucaaaagaccaacucuccggcaucaacaauauagccuucucuaacuaaggacuaguacuggcugcaucucccuuuccucuguccuccauccuucucccaggauggugaagggggaccugguacccagugauccccaccccaggauccuaaaucaugacuuaccugcuaauaaaaacucauuggaaaagugagaagaucuaaaaaaaaaaaaaaaaaaaaaaaaaaaaaaaaaaaaaaaaaaaaaaaaaaaaaaaaaaaaaaaaugcaucccccccccccccccccccccccccccccccaaaggcucuuuucagagccaccagaauu

SEQ ID NO: 12705 - RNA, 2297 nt, Artificial Sequence
  mRNA product Design f-4 comprising derived and/or modified sequence from HRSV(Memphis-37)__AIY60640.1__F0_DSCav1 (opt1)
gggagagucccgcagucggcguccagcggcucugcuuguucgugugugugucguugcaggccuuauucaagcuuaccauggagcugcccauccucaagaccaacgccaucaccacgauccuggccgcggugacccugugcuucgccagcucccagaacaucaccgaggaguucuaccagagcacgugcuccgccgucagcaagggcuaccucuccgcccugcgcaccgggugguacaccagcgugaucaccaucgagcuguccaacaucaaggagaacaagugcaacggcaccgacgccaaggugaagcucaucaagcaggagcuggacaaguacaagaacgcggucacggagcugcagcuccugaugcagagcaccccggccgccaacaaccgggcccgccgggagcugccccgcuucaugaacuacacccucaacaacaccaagaacaacaacgugacgcuguccaagaagcggaagcgccgguuccugggguuccuccugggcguggggagcgcgaucgccuccggcaucgccgucugcaaggugcugcaccucgagggcgaggugaacaagaucaagaacgcccugcuguccaccaacaaggccgucgugagccucuccaacggggugagcguccugaccuucaaggugcuggaccucaagaacuacaucgacaagcagcugcugcccauccugaacaagcagagcugcuccaucagcaacaucgagaccgucaucgaguuccagcagaagaacaaccgccuccuggagaucacgcgggaguucagcgugaacgcgggcgugaccacccccgucuccaccuacaugcugacgaacagcgagcuccugucccugaucaacgacaugccgaucaccaacgaccagaagaagcucaugagcaacaacgugcagaucgugcgccagcaguccuacagcaucaugugcaucaucaaggaggagguccuggccuacguggugcagcugccccucuacggggucaucgacacccccugcuggaagcugcacaccagcccccugugcacgaccaacaccaaggagggcuccaacaucugccucacccggacggaccgcgggugguacugcgacaacgccggcagcguguccuucuucccgcaggccgagaccugcaagguccagagcaaccggguguucugcgacaccaugaacucccugacccugcccagcgaggugaaccucugcaacaucgacaucuucaaccccaaguacgacugcaagaucaugacguccaagaccgacgucagcuccagcgugaucaccucccugggcgccaucgugagcugcuacgggaagaccaagugcacggcgagcaacaagaaccgcggcaucaucaagaccuucuccaacgggugcgacuacgucagcaacaagggcguggacaccguguccgucggcaacacccuguacuacgugaacaagcaggagggcaagagccucuacgugaagggggagcccaucaucaacuucuacgacccgcuggucuuccccuccgacgaguucgacgccagcaucucccaggugaacgagaagaucaaccagagccuggccuucauccggaaguccgacgagcuccugcacaacgugaacgucggcaagagcaccacgaacaucaugaucaccaccaucaucaucgugaucaucgugauccugcugcuccugaucgccgucgggcuguuccucuacugcaaggcccgcuccacccccgugacgcugagcaaggaccagcuguccgggaucaacaacaucgcguucagcaacugaggacuagugaagggaacacccaaauuuaauucagccuuaagcacaauuaauuaagagugaaacguaauuguacaagcaguuggucacccaccauagggcaugaucaacaccgcaaccuuuccuuuuucccccagugauucugaaaaaccccucuucccuucagcuugcuuagauguuccaaauuuaguaagcuuaaggcggccuacagaagaaaaagaaaaaaaaggccacaaaaguucccucucacuuucaguaaauaaaauaaaagcagcaacagaaauaaagaaauaaaugaaauucaaaaugaaauaaauauuguguugugcagcauuaaaaaaucaauaaaaauuaaaaaugagcaagaucuaaaaaaaaaaaaaaaaaaaaaaaaaaaaaaaaaaaaaaaaaaaaaaaaaaaaaaaaaaaaaaaaugcaucccccccccccccccccccccccccccccccaaaggcucuuuucagagccaccagaauu

SEQ ID NO: 12706 - RNA, 2297 nt, Artificial Sequence
  mRNA product Design f-4 comprising derived and/or modified sequence from HRSV(Memphis-37)__AIY60640.1__F0_DSCav1 (opt1)
gggagagucccgcagucggcguccagcggcucugcuuguucgugugugugucguugcaggccuuauucaagcuuaccauggagcugcccauccucaagaccaacgccaucaccacgauccuggccgcggugacccugugcuucgccagcucccagaacaucaccgaggaguucuaccagagcacgugcuccgccgucagcaagggcuaccucuccgcccugcgcaccgggugguacaccagcgugaucaccaucgagcuguccaacaucaaggagaacaagugcaacggcaccgacgccaaggugaagcucaucaagcaggagcuggacaaguacaagaacgcggucacggagcugcagcuccugaugcagagcaccccggccgccaacaaccgggcccgccgggagcugccccgcuucaugaacuacacccucaacaacaccaagaacaacaacgugacgcuguccaagaagcggaagcgccgguuccugggguuccuccugggcguggggagcgcgaucgccuccggcaucgccgucugcaaggugcugcaccucgagggcgaggugaacaagaucaagaacgcccugcugagcaccaacaaggccgucgugucccucagcaacgggguguccguccugaccuucaaggugcuggaccucaagaacuacaucgacaagcagcugcugcccauccucaacaagcagagcugcuccaucagcaacaucgagaccgugaucgaguuccagcagaagaacaaccgccugcuggagaucacgcgggaguucuccgucaacgcgggcgugaccacccccgugagcaccuacaugcucacgaacagcgagcugcugucccucaucaacgacaugccgaucaccaacgaccagaagaagcugaugagcaacaacguccagaucgugcgccagcaguccuacagcaucaugugcaucaucaaggaggaggugcuggccuacgucgugcagcucccccuguacggggugaucgacacccccugcuggaagcugcacaccagcccccucugcacgaccaacaccaaggagggcagcaacaucugccugacccggacggaccgcgggugguacugcgacaacgccggcuccgucagcuucuucccgcaggccgagaccugcaaggugcaguccaaccgggucuucugcgacaccaugaacagccugacccuccccuccgaggugaaccugugcaacaucgacaucuucaaccccaaguacgacugcaagaucaugacgagcaagaccgacguguccagcuccgucaucaccagccugggcgccaucguguccugcuacgggaagaccaagugcacggcgagcaacaagaaccgcggcaucaucaagaccuucuccaacgggugcgacuacgugagcaacaagggcgucgacaccgugagcgugggcaacacccucuacuacgucaacaagcaggaggggaagucccuguacgugaagggcgagcccaucaucaacuucuacgacccgcugguguuccccagcgacgaguucgacgccuccaucagccaggucaacgagaagaucaaccagucccucgccuucauccggaaguccgacgagcugcugcacaacgugaacguggggaaguccaccacgaacaucaugaucaccaccaucaucaucgucaucaucgugauccugcuccugcugaucgccgugggccucuuccuguacugcaaggcccgcagcacccccgucacgcuguccaaggaccagcucagcgggaucaacaacaucgcguucuccaacugaggacuagugaagggaacacccaaauuuaauucagccuuaagcacaauuaauuaagagugaaacguaauuguacaagcaguuggucacccaccauagggcaugaucaacaccgcaaccuuuccuuuuucccccagugauucugaaaaaccccucuucccuucagcuugcuuagauguuccaaauuuaguaagcuuaaggcggccuacagaagaaaaagaaaaaaaaggccacaaaaguucccucucacuuucaguaaauaaaauaaaagcagcaacagaaauaaagaaauaaaugaaauucaaaaugaaauaaauauuguguugugcagcauuaaaaaaucaauaaaaauuaaaaaugagcaagaucuaaaaaaaaaaaaaaaaaaaaaaaaaaaaaaaaaaaaaaaaaaaaaaaaaaaaaaaaaaaaaaaaugcaucccccccccccccccccccccccccccccccaaaggcucuuuucagagccaccagaauu

SEQ ID NO: 12707 - RNA, 2297 nt, Artificial Sequence
  mRNA product Design f-4 comprising derived and/or modified sequence from HRSV(Memphis-37)__AIY60640.1__F0_DSCav1 (opt2)
gggagagucccgcagucggcguccagcggcucugcuuguucgugugugugucguugcaggccuuauucaagcuuaccauggagcuccccauccucaagaccaacgccaucaccaccauccucgccgccgucacccucugcuucgccuccucccagaacaucaccgaggaguucuaccaguccaccugcuccgccgucuccaagggcuaccucuccgcccuccgcaccggcugguacaccuccgucaucaccaucgagcucuccaacaucaaggagaacaagugcaacggcaccgacgccaaggucaagcucaucaagcaggagcucgacaaguacaagaacgccgucaccgagcuccagcuccucaugcaguccacccccgccgccaacaaccgcgcccgccgcgagcucccccgcuucaugaacuacacccucaacaacaccaagaacaacaacgucacccucuccaagaagcgcaagcgccgcuuccucggcuuccuccucggcgucggcuccgccaucgccuccggcaucgccgucugcaagguccuccaccucgagggcgaggucaacaagaucaagaacgcccuccucuccaccaacaaggccgucgucucccucuccaacggcgucuccguccucaccuucaagguccucgaccucaagaacuacaucgacaagcagcuccuccccauccucaacaagcaguccugcuccaucuccaacaucgagaccgucaucgaguuccagcagaagaacaaccgccuccucgagaucacccgcgaguucuccgucaacgccggcgucaccacccccgucuccaccuacaugcucaccaacuccgagcuccucucccucaucaacgacaugcccaucaccaacgaccagaagaagcucauguccaacaacguccagaucguccgccagcaguccuacuccaucaugugcaucaucaaggaggagguccucgccuacgucguccagcucccccucuacggcgucaucgacacccccugcuggaagcuccacaccuccccccucugcaccaccaacaccaaggagggcuccaacaucugccucacccgcaccgaccgcggcugguacugcgacaacgccggcuccgucuccuucuucccccaggccgagaccugcaagguccaguccaaccgcgucuucugcgacaccaugaacucccucacccuccccuccgaggucaaccucugcaacaucgacaucuucaaccccaaguacgacugcaagaucaugaccuccaagaccgacgucuccuccuccgucaucaccucccucggcgccaucgucuccugcuacggcaagaccaagugcaccgccuccaacaagaaccgcggcaucaucaagaccuucuccaacggcugcgacuacgucuccaacaagggcgucgacaccgucuccgucggcaacacccucuacuacgucaacaagcaggagggcaagucccucuacgucaagggcgagcccaucaucaacuucuacgacccccucgucuuccccuccgacgaguucgacgccuccaucucccaggucaacgagaagaucaaccagucccucgccuucauccgcaaguccgacgagcuccuccacaacgucaacgucggcaaguccaccaccaacaucaugaucaccaccaucaucaucgucaucaucgucauccuccuccuccucaucgccgucggccucuuccucuacugcaaggcccgcuccacccccgucacccucuccaaggaccagcucuccggcaucaacaacaucgccuucuccaacugaggacuagugaagggaacacccaaauuuaauucagccuuaagcacaauuaauuaagagugaaacguaauuguacaagcaguuggucacccaccauagggcaugaucaacaccgcaaccuuuccuuuuucccccagugauucugaaaaaccccucuucccuucagcuugcuuagauguuccaaauuuaguaagcuuaaggcggccuacagaagaaaaagaaaaaaaaggccacaaaaguucccucucacuuucaguaaauaaaauaaaagcagcaacagaaauaaagaaauaaaugaaauucaaaaugaaauaaauauuguguugugcagcauuaaaaaaucaauaaaaauuaaaaaugagcaagaucuaaaaaaaaaaaaaaaaaaaaaaaaaaaaaaaaaaaaaaaaaaaaaaaaaaaaaaaaaaaaaaaaugcaucccccccccccccccccccccccccccccccaaaggcucuuuucagagccaccagaauu

SEQ ID NO: 12708 - RNA, 2297 nt, Artificial Sequence
  mRNA product Design f-4 comprising derived and/or modified sequence from HRSV(Memphis-37)__AIY60640.1__F0_DSCav1 (opt3)
gggagagucccgcagucggcguccagcggcucugcuuguucgugugugugucguugcaggccuuauucaagcuuaccauggagcugcccauccucaagaccaacgccauuacaacuauacuugcugcagugacgcugugcuucgccagcucccagaauaucaccgaagaguuuuaccaaucuacauguucagcggucaguaaaggcuauuugagcgcuuuaagaacugggugguacaccuccguuauuacaaucgaacugucuaacauuaaggagaauaaaugcaacggaaccgacgccaaggugaaacuaaucaagcaggaacucgauaaguauaaaaaugcaguaacugagcugcagcuucugaugcagucgaccccugccgcuaacaauagggcacggcgcgaguugccacgauucaugaacuacacacucaauaacacgaagaauaacaaugugacucugagcaaaaagcguaaaagaagguuucuggguuuccucuuaggcgucgggucagccauagcuaguggaaucgccguguguaagguucugcaccuugaaggcgaggugaacaagauuaaaaaugcguugcuguccaccaacaaggcagucgugucucuaagcaacgguguauccguucucacauuuaaagugcuggaccuuaagaauuauaucgauaaacaacuguugccgauucucaacaagcagucaugcaguaucagcaauauagaaacugucauugaguuccagcagaaaaacaaucggcuguuagagaucacccgcgaauuuucugugaacgccggggugacaacccccgucuccacguacaugcugacuaauucagagcuccuuagccugauuaacgacaugccuaucacaaaugaucaaaagaaguugaugaguaacaauguucagaucgugagacagcagucuuauuccauuauguguauaaucaaagaagagguacuagcuuacgugguccaacugccacucuacggagugauugacacccccugcuggaagcugcauacuagcccucuuuguacaaccaacacgaaagaaggcucgaauaucugccugaccaggacagaucggggcugguauugugacaacgccgggucuguuuccuucuuuccacaggcagagacuugcaaggugcagucaaaucgcgucuucugugauaccaugaacaguuugacacuccccagcgaggugaaccugugcaauauagacauuuuuaacccuaaauacgauugcaagaucaugacuuccaagaccgacguaucuagcucaguuaucacaaguuuaggagcuauuguguccuguuaugguaaaaccaagugcacugccagcaauaaaaaccgaggcaucauuaagacguucucuaaugggugugauuacgucucaaacaaaggaguggacacagucagugugggcaauacccuguauuacguuaacaagcaagaagguaagagccuauaugugaaaggggagccaauaaucaauuuuuacgacccgcucguauuccccuccgaugaguucgacgcgucuauuucgcaggucaacgaaaagaucaaucagagccuggccuuuaucagaaaauccgaugaacuuuugcacaacgugaauguuggaaagucaacuaccaacauuaugauaacaaccaucauuaucgugauuaucgucauacugcuccugcuuaucgcagugggccuguucuuguacugcaaagcuaggaguacuccuguaacacucucuaaggaccagcugagcggcauuaauaacaucgccuuuuccaacugaggacuagugaagggaacacccaaauuuaauucagccuuaagcacaauuaauuaagagugaaacguaauuguacaagcaguuggucacccaccauagggcaugaucaacaccgcaaccuuuccuuuuucccccagugauucugaaaaaccccucuucccuucagcuugcuuagauguuccaaauuuaguaagcuuaaggcggccuacagaagaaaaagaaaaaaaaggccacaaaaguucccucucacuuucaguaaauaaaauaaaagcagcaacagaaauaaagaaauaaaugaaauucaaaaugaaauaaauauuguguugugcagcauuaaaaaaucaauaaaaauuaaaaaugagcaagaucuaaaaaaaaaaaaaaaaaaaaaaaaaaaaaaaaaaaaaaaaaaaaaaaaaaaaaaaaaaaaaaaaugcaucccccccccccccccccccccccccccccccaaaggcucuuuucagagccaccagaauu

SEQ ID NO: 12709 - RNA, 2297 nt, Artificial Sequence
  mRNA product Design f-4 comprising derived and/or modified sequence from HRSV(Memphis-37)__AIY60640.1__F0_DSCav1 (opt4)
gggagagucccgcagucggcguccagcggcucugcuuguucgugugugugucguugcaggccuuauucaagcuuaccauggagcugcccauccugaagaccaacgccaucaccaccauccuggccgccgugacccugugcuucgccagcagccagaacaucaccgaggaguucuaccagagcaccugcagcgccgugagcaagggcuaccugagcgcccugagaaccggcugguacaccagcgugaucaccaucgagcugagcaacaucaaggagaacaagugcaacggcaccgacgccaaggugaagcugaucaagcaggagcuggacaaguacaagaacgccgugaccgagcugcagcugcugaugcagagcacccccgccgccaacaacagagccagaagagagcugcccagauucaugaacuacacccugaacaacaccaagaacaacaacgugacccugagcaagaagagaaagagaagauuccugggcuuccugcugggcgugggcagcgccaucgccagcggcaucgccgugugcaaggugcugcaccuggagggcgaggugaacaagaucaagaacgcccugcugagcaccaacaaggccguggugagccugagcaacggcgugagcgugcugaccuucaaggugcuggaccugaagaacuacaucgacaagcagcugcugcccauccugaacaagcagagcugcagcaucagcaacaucgagaccgugaucgaguuccagcagaagaacaacagacugcuggagaucaccagagaguucagcgugaacgccggcgugaccacccccgugagcaccuacaugcugaccaacagcgagcugcugagccugaucaacgacaugcccaucaccaacgaccagaagaagcugaugagcaacaacgugcagaucgugagacagcagagcuacagcaucaugugcaucaucaaggaggaggugcuggccuacguggugcagcugccccuguacggcgugaucgacacccccugcuggaagcugcacaccagcccccugugcaccaccaacaccaaggagggcagcaacaucugccugaccagaaccgacagaggcugguacugcgacaacgccggcagcgugagcuucuucccccaggccgagaccugcaaggugcagagcaacagaguguucugcgacaccaugaacagccugacccugcccagcgaggugaaccugugcaacaucgacaucuucaaccccaaguacgacugcaagaucaugaccagcaagaccgacgugagcagcagcgugaucaccagccugggcgccaucgugagcugcuacggcaagaccaagugcaccgccagcaacaagaacagaggcaucaucaagaccuucagcaacggcugcgacuacgugagcaacaagggcguggacaccgugagcgugggcaacacccuguacuacgugaacaagcaggagggcaagagccuguacgugaagggcgagcccaucaucaacuucuacgacccccugguguuccccagcgacgaguucgacgccagcaucagccaggugaacgagaagaucaaccagagccuggccuucaucagaaagagcgacgagcugcugcacaacgugaacgugggcaagagcaccaccaacaucaugaucaccaccaucaucaucgugaucaucgugauccugcugcugcugaucgccgugggccuguuccuguacugcaaggccagaagcacccccgugacccugagcaaggaccagcugagcggcaucaacaacaucgccuucagcaacugaggacuagugaagggaacacccaaauuuaauucagccuuaagcacaauuaauuaagagugaaacguaauuguacaagcaguuggucacccaccauagggcaugaucaacaccgcaaccuuuccuuuuucccccagugauucugaaaaaccccucuucccuucagcuugcuuagauguuccaaauuuaguaagcuuaaggcggccuacagaagaaaaagaaaaaaaaggccacaaaaguucccucucacuuucaguaaauaaaauaaaagcagcaacagaaauaaagaaauaaaugaaauucaaaaugaaauaaauauuguguugugcagcauuaaaaaaucaauaaaaauuaaaaaugagcaagaucuaaaaaaaaaaaaaaaaaaaaaaaaaaaaaaaaaaaaaaaaaaaaaaaaaaaaaaaaaaaaaaaaugcaucccccccccccccccccccccccccccccccaaaggcucuuuucagagccaccagaauu

SEQ ID NO: 12710 - RNA, 2297 nt, Artificial Sequence
  mRNA product Design f-4 comprising derived and/or modified sequence from HRSV(Memphis-37)__AIY60640.1__F0_DSCav1 (opt5)
gggagagucccgcagucggcguccagcggcucugcuuguucgugugugugucguugcaggccuuauucaagcuuaccauggagcugcccauccucaagaccaacgccauuacaacgauccuggcugccgugacccuuugcuucgcgagcucccagaauauuacagaagaguuuuaccaaucuaccuguagcgcugucuccaaaggcuaucugucugcccucagaacagggugguacaccagcguuaucacaauugaacuguccaacaucaaggagaauaaaugcaacggaaccgacgccaaggugaaacuuaucaagcaggaacuggauaaguauaaaaaugcugugacggagcuccagcugcugaugcagucuaccccugccgcuaacaaucgggcccgcagagagcucccgcgguucaugaacuacacacugaauaacaccaagaauaacaaugucacacuuagcaaaaagcgcaaaagacgguuucugggcuuccuccugggggugggauccgcgauugccagcggcaucgcuguuuguaaggugcuucaccuggaaggggaggucaacaagauuaaaaaugcccuccugucuaccaacaaggcugugguuucccugagcaacggagugucuguccucacguuuaaagugcuggaccuuaagaauuauaucgauaaacaacugcuccccauucugaacaagcaguccugcagcaucucuaauauugaaacagugaucgaguuccagcagaaaaacaaucgccuucuggagaucaccagagaauuuuccgucaacgccggcguuacaaccccugugagcaccuacaugcucacaaauuccgagcugcugucucucauuaacgacaugcccaucacgaaugaucaaaagaagcugaugagcaacaaugugcagauuguccggcagcaguccuauagcaucauguguauuaucaaagaagaggugcuugcguacguugugcaacugccucucuacggcgucaucgacacccccugcuggaagcugcauacaucuccucuuuguaccacaaacaccaaagaaggguccaauauuugccugacgcgcacagauagaggaugguauugugacaacgccggcagcgugucuuucuuuccgcaggcugagaccugcaagguucagagcaaucggguguucugugauaccaugaacucccucacacugcccucugaggucaaccugugcaauaucgacauuuuuaacccuaaauacgauugcaagaucaugaccagcaagacagacguguccagcucugucauuacgucccucggggccaucgugagcuguuauggaaaaaccaagugcacagcuucuaauaaaaaccgcggcaucauuaagaccuucuccaaugggugugauuacguuagcaacaaaggaguggacacagucuccgugggcaauacccuguauuacguuaacaagcaagaaggcaagucucuuuaugugaaaggggagcccaucauuaauuuuuacgacccucuggucuuccccagcgaugaguucgacgccuccaucucucaggugaacgaaaagauuaaucagagccucgccuuuaucagaaaauccgaugaacugcugcacaacgugaauguuggaaagagcacgaccaacauuaugaucacaaccaucauuaucgucauuaucgugauucuucuccugcugaucgcugugggccucuuccuguacugcaaagcgcggucuacaccggucacccuuuccaaggaccagcugagcgggaucaauaacauugccuuuucuaacugaggacuagugaagggaacacccaaauuuaauucagccuuaagcacaauuaauuaagagugaaacguaauuguacaagcaguuggucacccaccauagggcaugaucaacaccgcaaccuuuccuuuuucccccagugauucugaaaaaccccucuucccuucagcuugcuuagauguuccaaauuuaguaagcuuaaggcggccuacagaagaaaaagaaaaaaaaggccacaaaaguucccucucacuuucaguaaauaaaauaaaagcagcaacagaaauaaagaaauaaaugaaauucaaaaugaaauaaauauuguguugugcagcauuaaaaaaucaauaaaaauuaaaaaugagcaagaucuaaaaaaaaaaaaaaaaaaaaaaaaaaaaaaaaaaaaaaaaaaaaaaaaaaaaaaaaaaaaaaaaugcaucccccccccccccccccccccccccccccccaaaggcucuuuucagagccaccagaauu

SEQ ID NO: 12711 - RNA, 2297 nt, Artificial Sequence
  mRNA product Design f-4 comprising derived and/or modified sequence from HRSV(Memphis-37)__AIY60640.1__F0_DSCav1 (opt6)
gggagagucccgcagucggcguccagcggcucugcuuguucgugugugugucguugcaggccuuauucaagcuuaccauggaacucccaauccucaaaaccaaugccauaacaaccauacucgcugcaguaaccuuauguuucgcaaguagccaaaacauaaccgaagaauuuuaucaauccacaugcuccgcaguuucuaaaggauaucuaucagcauuaagaacuggaugguacacaucuguaauaacuauagaacuaagcaauauaaaagaaaacaaauguaacggaacugacgcuaaaguaaaacuuauaaaacaagaacuagauaaauacaaaaacgccguuaccgaacuacaacuauuaaugcaaucaacaccagccgcaaauaacagagcaagacgcgaauuaccaagauucaugaauuacacacuaaacaauacaaaaaauaacaauguaacacuaucaaaaaaaagaaaacgacgauucuuaggcuuccuacuaggagucggcucagcaauagcuuccggaauagccgucuguaaaguccuacaccuugaaggcgaaguaaacaaaaucaaaaacgcacuauuaucaacaaacaaagcagucguaucuuuauccaacggagucucaguccuaacauucaaaguacucgauuuaaaaaacuacaucgauaaacaacuccuucccauucuaaacaaacaauccugcucaauauccaacaucgaaacagucauagaauuucaacaaaaaaacaaccgccugcuagaaauaacaagagaauuuuccguaaaugccggcgucaccacaccaguaucaacauacaugcuaacaaacuccgaacuacucucccuaauaaacgauaugccaaucaccaacgaccaaaaaaaacuaaugucaaauaacguucaaauagucagacaacaaucauacagcauaaugugcauaauaaaagaagaagucuuagccuacguuguacaacucccauuauacggaguuaucgauacaccaugcuggaaauuacacacaucacccuuaugcaccacaaacacaaaagaaggauccaauauuugucuaacacgaacagacagaggaugguacugugauaacgcaggaucagugucauucuuuccacaagcagaaacauguaaaguucaaucuaacagaguauucugcgacaccaugaacucccuaaccuuacccucagaaguaaaucuaugcaacauagauaucuuuaacccaaaauacgacugcaaaaucaugacaucaaaaacugacguuucuucauccguuauaacuucccucggcgcuauaguguccugcuacggaaaaacuaaaugcacagcauccaacaaaaauagaggaauaauaaaaacauuuuccaacggcugcgacuauguuucaaacaaaggaguagauaccguaucagucggcaauacauuauauuauguuaacaaacaagaaggaaaaucccuauacguaaaaggagaaccuauaaucaacuucuacgacccacucguauuccccucagacgaauuugacgcaucuauaucucaaguaaaugaaaaaauaaaccaaucacucgcauuuauccgcaaaucugacgaauuacuccauaacgucaacgucggcaaaucaaccaccaacauaaugauaacaacaauuauaauaguaauaauugucauacuacuacuccuaauagcaguaggucuauuccuauacugcaaagcaagauccacccccguaacccuuuccaaagaucaacucucaggaauaaauaacauagccuuuucaaacuaaggacuagugaagggaacacccaaauuuaauucagccuuaagcacaauuaauuaagagugaaacguaauuguacaagcaguuggucacccaccauagggcaugaucaacaccgcaaccuuuccuuuuucccccagugauucugaaaaaccccucuucccuucagcuugcuuagauguuccaaauuuaguaagcuuaaggcggccuacagaagaaaaagaaaaaaaaggccacaaaaguucccucucacuuucaguaaauaaaauaaaagcagcaacagaaauaaagaaauaaaugaaauucaaaaugaaauaaauauuguguugugcagcauuaaaaaaucaauaaaaauuaaaaaugagcaagaucuaaaaaaaaaaaaaaaaaaaaaaaaaaaaaaaaaaaaaaaaaaaaaaaaaaaaaaaaaaaaaaaaugcaucccccccccccccccccccccccccccccccaaaggcucuuuucagagccaccagaauu

SEQ ID NO: 12712 - RNA, 2297 nt, Artificial Sequence
  mRNA product Design f-4 comprising derived and/or modified sequence from HRSV(Memphis-37)__AIY60640.1__F0_DSCav1 (opt11)
gggagagucccgcagucggcguccagcggcucugcuuguucgugugugugucguugcaggccuuauucaagcuuaccauggaacuccccauacucaagacuaaugccaucaccaccauccucgccgccgugacccucugcuucgcaucgucccaaaacauaacagaagaguucuaccaaagcacaugcuccgcagucuccaaaggauaccucuccgcacuacguaccggcugguacaccagcgucaucaccaucgaacuuuccaacaucaaagagaacaaaugcaacggcaccgacgccaaaguaaaacucauaaaacaagagcuagacaaauacaaaaacgccgucacagaacuccaacuacugaugcaauccacaccggccgccaacaaccgcgcucgacgugaacucccacgcuucaugaacuacacucuuaacaacaccaaaaauaacaacgucacccuauccaaaaagcgaaagcgcagauuccucggcuuccuacuuggcgucggcucggcgauagccucuggaaucgccguuugcaagguccuccaccuagaaggcgaaguaaacaaaaucaaaaacgcacuccuaagcaccaacaaagccgucgucucacuuuccaacggcgucucaguccucacauucaaaguucucgaccuaaagaacuacaucgacaagcaacuacuacccauacucaauaaacaauccugcuccaucagcaacaucgagacagucaucgaauuucaacaaaagaacaaccgccuccucgaaauuacacgcgaguucucagucaacgccggagucaccaccccagucucaacauacaugcucaccaacagcgaacuccugucucuaaucaacgacaugcccaucacuaacgaccagaagaaacucauguccaacaacguccaaaucgugcgacaacaaucauacucuaucaugugcaucaucaaagaagaaguccucgcauacgucguccagcucccacucuacggcguaaucgacacacccugcuggaaacuccacacaucaccccuaugcaccaccaacacaaaagaaggcuccaacaucugccuaacccgaaccgacagagguugguauugcgacaacgccggcucagucucauucuucccacaagccgaaaccuguaaaguccaaucaaaccgcgucuucugcgauaccaugaacucucucacacuccccuccgaagucaaucucugcaacauagacaucuucaauccaaaguacgacugcaaaauaaugaccucgaaaaccgacguaagcuccagcgucaucaccuccuuaggcgcaaucguauccugcuacggcaaaaccaaaugcaccgccucaaacaaaaacagaggcaucaucaaaacguucucgaacggaugcgacuacguuuccaauaaaggcguagauaccgucuccgucggcaacacacucuauuacgucaacaaacaagaaggcaaaucccucuacgucaaaggugaaccuaucaucaacuucuacgacccccucgucuuccccagcgacgaguucgaugccucaaucagccaagucaacgagaaaaucaaccaaucacuggcuuucauacgcaaauccgacgaacuccuccacaacgugaacgucggcaaauccacaaccaacaucaugauaaccacaauaaucaucgucauaaucguaauccuacuccuccuuauugccguaggacuauuccuauacugcaaagcccgauccacccccgucacccucucaaaagaccaacucuccggcaucaacaauauagccuucucuaacuaaggacuagugaagggaacacccaaauuuaauucagccuuaagcacaauuaauuaagagugaaacguaauuguacaagcaguuggucacccaccauagggcaugaucaacaccgcaaccuuuccuuuuucccccagugauucugaaaaaccccucuucccuucagcuugcuuagauguuccaaauuuaguaagcuuaaggcggccuacagaagaaaaagaaaaaaaaggccacaaaaguucccucucacuuucaguaaauaaaauaaaagcagcaacagaaauaaagaaauaaaugaaauucaaaaugaaauaaauauuguguugugcagcauuaaaaaaucaauaaaaauuaaaaaugagcaagaucuaaaaaaaaaaaaaaaaaaaaaaaaaaaaaaaaaaaaaaaaaaaaaaaaaaaaaaaaaaaaaaaaugcaucccccccccccccccccccccccccccccccaaaggcucuuuucagagccaccagaauu

SEQ ID NO: 12713 - RNA, 2073 nt, Artificial Sequence
  mRNA product Design f-5 comprising derived and/or modified sequence from HRSV(Memphis-37)__AIY60640.1__F0_DSCav1 (opt1)
gggagacuuucccauucuguagcagaauuugguguugccuguggucuuggucccgcggagaagcuuaccauggagcugcccauccucaagaccaacgccaucaccacgauccuggccgcggugacccugugcuucgccagcucccagaacaucaccgaggaguucuaccagagcacgugcuccgccgucagcaagggcuaccucuccgcccugcgcaccgggugguacaccagcgugaucaccaucgagcuguccaacaucaaggagaacaagugcaacggcaccgacgccaaggugaagcucaucaagcaggagcuggacaaguacaagaacgcggucacggagcugcagcuccugaugcagagcaccccggccgccaacaaccgggcccgccgggagcugccccgcuucaugaacuacacccucaacaacaccaagaacaacaacgugacgcuguccaagaagcggaagcgccgguuccugggguuccuccugggcguggggagcgcgaucgccuccggcaucgccgucugcaaggugcugcaccucgagggcgaggugaacaagaucaagaacgcccugcuguccaccaacaaggccgucgugagccucuccaacggggugagcguccugaccuucaaggugcuggaccucaagaacuacaucgacaagcagcugcugcccauccugaacaagcagagcugcuccaucagcaacaucgagaccgucaucgaguuccagcagaagaacaaccgccuccuggagaucacgcgggaguucagcgugaacgcgggcgugaccacccccgucuccaccuacaugcugacgaacagcgagcuccugucccugaucaacgacaugccgaucaccaacgaccagaagaagcucaugagcaacaacgugcagaucgugcgccagcaguccuacagcaucaugugcaucaucaaggaggagguccuggccuacguggugcagcugccccucuacggggucaucgacacccccugcuggaagcugcacaccagcccccugugcacgaccaacaccaaggagggcuccaacaucugccucacccggacggaccgcgggugguacugcgacaacgccggcagcguguccuucuucccgcaggccgagaccugcaagguccagagcaaccggguguucugcgacaccaugaacucccugacccugcccagcgaggugaaccucugcaacaucgacaucuucaaccccaaguacgacugcaagaucaugacguccaagaccgacgucagcuccagcgugaucaccucccugggcgccaucgugagcugcuacgggaagaccaagugcacggcgagcaacaagaaccgcggcaucaucaagaccuucuccaacgggugcgacuacgucagcaacaagggcguggacaccguguccgucggcaacacccuguacuacgugaacaagcaggagggcaagagccucuacgugaagggggagcccaucaucaacuucuacgacccgcuggucuuccccuccgacgaguucgacgccagcaucucccaggugaacgagaagaucaaccagagccuggccuucauccggaaguccgacgagcuccugcacaacgugaacgucggcaagagcaccacgaacaucaugaucaccaccaucaucaucgugaucaucgugauccugcugcuccugaucgccgucgggcuguuccucuacugcaaggcccgcuccacccccgugacgcugagcaaggaccagcuguccgggaucaacaacaucgcguucagcaacugaggacuaguacuggcugcaucucccuuuccucuguccuccauccuucucccaggauggugaagggggaccugguacccagugauccccaccccaggauccuaaaucaugacuuaccugcuaauaaaaacucauuggaaaagugagaagaucuaaaaaaaaaaaaaaaaaaaaaaaaaaaaaaaaaaaaaaaaaaaaaaaaaaaaaaaaaaaaaaaaugcaucccccccccccccccccccccccccccccccaaaggcucuuuucagagccaccagaauu

SEQ ID NO: 12714 - RNA, 2073 nt, Artificial Sequence
  mRNA product Design f-5 comprising derived and/or modified sequence from HRSV(Memphis-37)__AIY60640.1__F0_DSCav1 (opt1)
gggagacuuucccauucuguagcagaauuugguguugccuguggucuuggucccgcggagaagcuuaccauggagcugcccauccucaagaccaacgccaucaccacgauccuggccgcggugacccugugcuucgccagcucccagaacaucaccgaggaguucuaccagagcacgugcuccgccgucagcaagggcuaccucuccgcccugcgcaccgggugguacaccagcgugaucaccaucgagcuguccaacaucaaggagaacaagugcaacggcaccgacgccaaggugaagcucaucaagcaggagcuggacaaguacaagaacgcggucacggagcugcagcuccugaugcagagcaccccggccgccaacaaccgggcccgccgggagcugccccgcuucaugaacuacacccucaacaacaccaagaacaacaacgugacgcuguccaagaagcggaagcgccgguuccugggguuccuccugggcguggggagcgcgaucgccuccggcaucgccgucugcaaggugcugcaccucgagggcgaggugaacaagaucaagaacgcccugcugagcaccaacaaggccgucgugucccucagcaacgggguguccguccugaccuucaaggugcuggaccucaagaacuacaucgacaagcagcugcugcccauccucaacaagcagagcugcuccaucagcaacaucgagaccgugaucgaguuccagcagaagaacaaccgccugcuggagaucacgcgggaguucuccgucaacgcgggcgugaccacccccgugagcaccuacaugcucacgaacagcgagcugcugucccucaucaacgacaugccgaucaccaacgaccagaagaagcugaugagcaacaacguccagaucgugcgccagcaguccuacagcaucaugugcaucaucaaggaggaggugcuggccuacgucgugcagcucccccuguacggggugaucgacacccccugcuggaagcugcacaccagcccccucugcacgaccaacaccaaggagggcagcaacaucugccugacccggacggaccgcgggugguacugcgacaacgccggcuccgucagcuucuucccgcaggccgagaccugcaaggugcaguccaaccgggucuucugcgacaccaugaacagccugacccuccccuccgaggugaaccugugcaacaucgacaucuucaaccccaaguacgacugcaagaucaugacgagcaagaccgacguguccagcuccgucaucaccagccugggcgccaucguguccugcuacgggaagaccaagugcacggcgagcaacaagaaccgcggcaucaucaagaccuucuccaacgggugcgacuacgugagcaacaagggcgucgacaccgugagcgugggcaacacccucuacuacgucaacaagcaggaggggaagucccuguacgugaagggcgagcccaucaucaacuucuacgacccgcugguguuccccagcgacgaguucgacgccuccaucagccaggucaacgagaagaucaaccagucccucgccuucauccggaaguccgacgagcugcugcacaacgugaacguggggaaguccaccacgaacaucaugaucaccaccaucaucaucgucaucaucgugauccugcuccugcugaucgccgugggccucuuccuguacugcaaggcccgcagcacccccgucacgcuguccaaggaccagcucagcgggaucaacaacaucgcguucuccaacugaggacuaguacuggcugcaucucccuuuccucuguccuccauccuucucccaggauggugaagggggaccugguacccagugauccccaccccaggauccuaaaucaugacuuaccugcuaauaaaaacucauuggaaaagugagaagaucuaaaaaaaaaaaaaaaaaaaaaaaaaaaaaaaaaaaaaaaaaaaaaaaaaaaaaaaaaaaaaaaaugcaucccccccccccccccccccccccccccccccaaaggcucuuuucagagccaccagaauu

SEQ ID NO: 12715 - RNA, 2073 nt, Artificial Sequence
  mRNA product Design f-5 comprising derived and/or modified sequence from HRSV(Memphis-37)__AIY60640.1__F0_DSCav1 (opt2)
gggagacuuucccauucuguagcagaauuugguguugccuguggucuuggucccgcggagaagcuuaccauggagcuccccauccucaagaccaacgccaucaccaccauccucgccgccgucacccucugcuucgccuccucccagaacaucaccgaggaguucuaccaguccaccugcuccgccgucuccaagggcuaccucuccgcccuccgcaccggcugguacaccuccgucaucaccaucgagcucuccaacaucaaggagaacaagugcaacggcaccgacgccaaggucaagcucaucaagcaggagcucgacaaguacaagaacgccgucaccgagcuccagcuccucaugcaguccacccccgccgccaacaaccgcgcccgccgcgagcucccccgcuucaugaacuacacccucaacaacaccaagaacaacaacgucacccucuccaagaagcgcaagcgccgcuuccucggcuuccuccucggcgucggcuccgccaucgccuccggcaucgccgucugcaagguccuccaccucgagggcgaggucaacaagaucaagaacgcccuccucuccaccaacaaggccgucgucucccucuccaacggcgucuccguccucaccuucaagguccucgaccucaagaacuacaucgacaagcagcuccuccccauccucaacaagcaguccugcuccaucuccaacaucgagaccgucaucgaguuccagcagaagaacaaccgccuccucgagaucacccgcgaguucuccgucaacgccggcgucaccacccccgucuccaccuacaugcucaccaacuccgagcuccucucccucaucaacgacaugcccaucaccaacgaccagaagaagcucauguccaacaacguccagaucguccgccagcaguccuacuccaucaugugcaucaucaaggaggagguccucgccuacgucguccagcucccccucuacggcgucaucgacacccccugcuggaagcuccacaccuccccccucugcaccaccaacaccaaggagggcuccaacaucugccucacccgcaccgaccgcggcugguacugcgacaacgccggcuccgucuccuucuucccccaggccgagaccugcaagguccaguccaaccgcgucuucugcgacaccaugaacucccucacccuccccuccgaggucaaccucugcaacaucgacaucuucaaccccaaguacgacugcaagaucaugaccuccaagaccgacgucuccuccuccgucaucaccucccucggcgccaucgucuccugcuacggcaagaccaagugcaccgccuccaacaagaaccgcggcaucaucaagaccuucuccaacggcugcgacuacgucuccaacaagggcgucgacaccgucuccgucggcaacacccucuacuacgucaacaagcaggagggcaagucccucuacgucaagggcgagcccaucaucaacuucuacgacccccucgucuuccccuccgacgaguucgacgccuccaucucccaggucaacgagaagaucaaccagucccucgccuucauccgcaaguccgacgagcuccuccacaacgucaacgucggcaaguccaccaccaacaucaugaucaccaccaucaucaucgucaucaucgucauccuccuccuccucaucgccgucggccucuuccucuacugcaaggcccgcuccacccccgucacccucuccaaggaccagcucuccggcaucaacaacaucgccuucuccaacugaggacuaguacuggcugcaucucccuuuccucuguccuccauccuucucccaggauggugaagggggaccugguacccagugauccccaccccaggauccuaaaucaugacuuaccugcuaauaaaaacucauuggaaaagugagaagaucuaaaaaaaaaaaaaaaaaaaaaaaaaaaaaaaaaaaaaaaaaaaaaaaaaaaaaaaaaaaaaaaaugcaucccccccccccccccccccccccccccccccaaaggcucuuuucagagccaccagaauu

SEQ ID NO: 12716 - RNA, 2073 nt, Artificial Sequence
  mRNA product Design f-5 comprising derived and/or modified sequence from HRSV(Memphis-37)__AIY60640.1__F0_DSCav1 (opt3)
gggagacuuucccauucuguagcagaauuugguguugccuguggucuuggucccgcggagaagcuuaccauggagcugcccauccucaagaccaacgccauuacaacuauacuugcugcagugacgcugugcuucgccagcucccagaauaucaccgaagaguuuuaccaaucuacauguucagcggucaguaaaggcuauuugagcgcuuuaagaacugggugguacaccuccguuauuacaaucgaacugucuaacauuaaggagaauaaaugcaacggaaccgacgccaaggugaaacuaaucaagcaggaacucgauaaguauaaaaaugcaguaacugagcugcagcuucugaugcagucgaccccugccgcuaacaauagggcacggcgcgaguugccacgauucaugaacuacacacucaauaacacgaagaauaacaaugugacucugagcaaaaagcguaaaagaagguuucuggguuuccucuuaggcgucgggucagccauagcuaguggaaucgccguguguaagguucugcaccuugaaggcgaggugaacaagauuaaaaaugcguugcuguccaccaacaaggcagucgugucucuaagcaacgguguauccguucucacauuuaaagugcuggaccuuaagaauuauaucgauaaacaacuguugccgauucucaacaagcagucaugcaguaucagcaauauagaaacugucauugaguuccagcagaaaaacaaucggcuguuagagaucacccgcgaauuuucugugaacgccggggugacaacccccgucuccacguacaugcugacuaauucagagcuccuuagccugauuaacgacaugccuaucacaaaugaucaaaagaaguugaugaguaacaauguucagaucgugagacagcagucuuauuccauuauguguauaaucaaagaagagguacuagcuuacgugguccaacugccacucuacggagugauugacacccccugcuggaagcugcauacuagcccucuuuguacaaccaacacgaaagaaggcucgaauaucugccugaccaggacagaucggggcugguauugugacaacgccgggucuguuuccuucuuuccacaggcagagacuugcaaggugcagucaaaucgcgucuucugugauaccaugaacaguuugacacuccccagcgaggugaaccugugcaauauagacauuuuuaacccuaaauacgauugcaagaucaugacuuccaagaccgacguaucuagcucaguuaucacaaguuuaggagcuauuguguccuguuaugguaaaaccaagugcacugccagcaauaaaaaccgaggcaucauuaagacguucucuaaugggugugauuacgucucaaacaaaggaguggacacagucagugugggcaauacccuguauuacguuaacaagcaagaagguaagagccuauaugugaaaggggagccaauaaucaauuuuuacgacccgcucguauuccccuccgaugaguucgacgcgucuauuucgcaggucaacgaaaagaucaaucagagccuggccuuuaucagaaaauccgaugaacuuuugcacaacgugaauguuggaaagucaacuaccaacauuaugauaacaaccaucauuaucgugauuaucgucauacugcuccugcuuaucgcagugggccuguucuuguacugcaaagcuaggaguacuccuguaacacucucuaaggaccagcugagcggcauuaauaacaucgccuuuuccaacugaggacuaguacuggcugcaucucccuuuccucuguccuccauccuucucccaggauggugaagggggaccugguacccagugauccccaccccaggauccuaaaucaugacuuaccugcuaauaaaaacucauuggaaaagugagaagaucuaaaaaaaaaaaaaaaaaaaaaaaaaaaaaaaaaaaaaaaaaaaaaaaaaaaaaaaaaaaaaaaaugcaucccccccccccccccccccccccccccccccaaaggcucuuuucagagccaccagaauu

SEQ ID NO: 12717 - RNA, 2073 nt, Artificial Sequence
  mRNA product Design f-5 comprising derived and/or modified sequence from HRSV(Memphis-37)__AIY60640.1__F0_DSCav1 (opt4)
gggagacuuucccauucuguagcagaauuugguguugccuguggucuuggucccgcggagaagcuuaccauggagcugcccauccugaagaccaacgccaucaccaccauccuggccgccgugacccugugcuucgccagcagccagaacaucaccgaggaguucuaccagagcaccugcagcgccgugagcaagggcuaccugagcgcccugagaaccggcugguacaccagcgugaucaccaucgagcugagcaacaucaaggagaacaagugcaacggcaccgacgccaaggugaagcugaucaagcaggagcuggacaaguacaagaacgccgugaccgagcugcagcugcugaugcagagcacccccgccgccaacaacagagccagaagagagcugcccagauucaugaacuacacccugaacaacaccaagaacaacaacgugacccugagcaagaagagaaagagaagauuccugggcuuccugcugggcgugggcagcgccaucgccagcggcaucgccgugugcaaggugcugcaccuggagggcgaggugaacaagaucaagaacgcccugcugagcaccaacaaggccguggugagccugagcaacggcgugagcgugcugaccuucaaggugcuggaccugaagaacuacaucgacaagcagcugcugcccauccugaacaagcagagcugcagcaucagcaacaucgagaccgugaucgaguuccagcagaagaacaacagacugcuggagaucaccagagaguucagcgugaacgccggcgugaccacccccgugagcaccuacaugcugaccaacagcgagcugcugagccugaucaacgacaugcccaucaccaacgaccagaagaagcugaugagcaacaacgugcagaucgugagacagcagagcuacagcaucaugugcaucaucaaggaggaggugcuggccuacguggugcagcugccccuguacggcgugaucgacacccccugcuggaagcugcacaccagcccccugugcaccaccaacaccaaggagggcagcaacaucugccugaccagaaccgacagaggcugguacugcgacaacgccggcagcgugagcuucuucccccaggccgagaccugcaaggugcagagcaacagaguguucugcgacaccaugaacagccugacccugcccagcgaggugaaccugugcaacaucgacaucuucaaccccaaguacgacugcaagaucaugaccagcaagaccgacgugagcagcagcgugaucaccagccugggcgccaucgugagcugcuacggcaagaccaagugcaccgccagcaacaagaacagaggcaucaucaagaccuucagcaacggcugcgacuacgugagcaacaagggcguggacaccgugagcgugggcaacacccuguacuacgugaacaagcaggagggcaagagccuguacgugaagggcgagcccaucaucaacuucuacgacccccugguguuccccagcgacgaguucgacgccagcaucagccaggugaacgagaagaucaaccagagccuggccuucaucagaaagagcgacgagcugcugcacaacgugaacgugggcaagagcaccaccaacaucaugaucaccaccaucaucaucgugaucaucgugauccugcugcugcugaucgccgugggccuguuccuguacugcaaggccagaagcacccccgugacccugagcaaggaccagcugagcggcaucaacaacaucgccuucagcaacugaggacuaguacuggcugcaucucccuuuccucuguccuccauccuucucccaggauggugaagggggaccugguacccagugauccccaccccaggauccuaaaucaugacuuaccugcuaauaaaaacucauuggaaaagugagaagaucuaaaaaaaaaaaaaaaaaaaaaaaaaaaaaaaaaaaaaaaaaaaaaaaaaaaaaaaaaaaaaaaaugcaucccccccccccccccccccccccccccccccaaaggcucuuuucagagccaccagaauu

SEQ ID NO: 12718 - RNA, 2073 nt, Artificial Sequence
  mRNA product Design f-5 comprising derived and/or modified sequence from HRSV(Memphis-37)__AIY60640.1__F0_DSCav1 (opt5)
gggagacuuucccauucuguagcagaauuugguguugccuguggucuuggucccgcggagaagcuuaccauggagcugcccauccucaagaccaacgccauuacaacgauccuggcugccgugacccuuugcuucgcgagcucccagaauauuacagaagaguuuuaccaaucuaccuguagcgcugucuccaaaggcuaucugucugcccucagaacagggugguacaccagcguuaucacaauugaacuguccaacaucaaggagaauaaaugcaacggaaccgacgccaaggugaaacuuaucaagcaggaacuggauaaguauaaaaaugcugugacggagcuccagcugcugaugcagucuaccccugccgcuaacaaucgggcccgcagagagcucccgcgguucaugaacuacacacugaauaacaccaagaauaacaaugucacacuuagcaaaaagcgcaaaagacgguuucugggcuuccuccugggggugggauccgcgauugccagcggcaucgcuguuuguaaggugcuucaccuggaaggggaggucaacaagauuaaaaaugcccuccugucuaccaacaaggcugugguuucccugagcaacggagugucuguccucacguuuaaagugcuggaccuuaagaauuauaucgauaaacaacugcuccccauucugaacaagcaguccugcagcaucucuaauauugaaacagugaucgaguuccagcagaaaaacaaucgccuucuggagaucaccagagaauuuuccgucaacgccggcguuacaaccccugugagcaccuacaugcucacaaauuccgagcugcugucucucauuaacgacaugcccaucacgaaugaucaaaagaagcugaugagcaacaaugugcagauuguccggcagcaguccuauagcaucauguguauuaucaaagaagaggugcuugcguacguugugcaacugccucucuacggcgucaucgacacccccugcuggaagcugcauacaucuccucuuuguaccacaaacaccaaagaaggguccaauauuugccugacgcgcacagauagaggaugguauugugacaacgccggcagcgugucuuucuuuccgcaggcugagaccugcaagguucagagcaaucggguguucugugauaccaugaacucccucacacugcccucugaggucaaccugugcaauaucgacauuuuuaacccuaaauacgauugcaagaucaugaccagcaagacagacguguccagcucugucauuacgucccucggggccaucgugagcuguuauggaaaaaccaagugcacagcuucuaauaaaaaccgcggcaucauuaagaccuucuccaaugggugugauuacguuagcaacaaaggaguggacacagucuccgugggcaauacccuguauuacguuaacaagcaagaaggcaagucucuuuaugugaaaggggagcccaucauuaauuuuuacgacccucuggucuuccccagcgaugaguucgacgccuccaucucucaggugaacgaaaagauuaaucagagccucgccuuuaucagaaaauccgaugaacugcugcacaacgugaauguuggaaagagcacgaccaacauuaugaucacaaccaucauuaucgucauuaucgugauucuucuccugcugaucgcugugggccucuuccuguacugcaaagcgcggucuacaccggucacccuuuccaaggaccagcugagcgggaucaauaacauugccuuuucuaacugaggacuaguacuggcugcaucucccuuuccucuguccuccauccuucucccaggauggugaagggggaccugguacccagugauccccaccccaggauccuaaaucaugacuuaccugcuaauaaaaacucauuggaaaagugagaagaucuaaaaaaaaaaaaaaaaaaaaaaaaaaaaaaaaaaaaaaaaaaaaaaaaaaaaaaaaaaaaaaaaugcaucccccccccccccccccccccccccccccccaaaggcucuuuucagagccaccagaauu

SEQ ID NO: 12719 - RNA, 2073 nt, Artificial Sequence
  mRNA product Design f-5 comprising derived and/or modified sequence from HRSV(Memphis-37)__AIY60640.1__F0_DSCav1 (opt6)
gggagacuuucccauucuguagcagaauuugguguugccuguggucuuggucccgcggagaagcuuaccauggaacucccaauccucaaaaccaaugccauaacaaccauacucgcugcaguaaccuuauguuucgcaaguagccaaaacauaaccgaagaauuuuaucaauccacaugcuccgcaguuucuaaaggauaucuaucagcauuaagaacuggaugguacacaucuguaauaacuauagaacuaagcaauauaaaagaaaacaaauguaacggaacugacgcuaaaguaaaacuuauaaaacaagaacuagauaaauacaaaaacgccguuaccgaacuacaacuauuaaugcaaucaacaccagccgcaaauaacagagcaagacgcgaauuaccaagauucaugaauuacacacuaaacaauacaaaaaauaacaauguaacacuaucaaaaaaaagaaaacgacgauucuuaggcuuccuacuaggagucggcucagcaauagcuuccggaauagccgucuguaaaguccuacaccuugaaggcgaaguaaacaaaaucaaaaacgcacuauuaucaacaaacaaagcagucguaucuuuauccaacggagucucaguccuaacauucaaaguacucgauuuaaaaaacuacaucgauaaacaacuccuucccauucuaaacaaacaauccugcucaauauccaacaucgaaacagucauagaauuucaacaaaaaaacaaccgccugcuagaaauaacaagagaauuuuccguaaaugccggcgucaccacaccaguaucaacauacaugcuaacaaacuccgaacuacucucccuaauaaacgauaugccaaucaccaacgaccaaaaaaaacuaaugucaaauaacguucaaauagucagacaacaaucauacagcauaaugugcauaauaaaagaagaagucuuagccuacguuguacaacucccauuauacggaguuaucgauacaccaugcuggaaauuacacacaucacccuuaugcaccacaaacacaaaagaaggauccaauauuugucuaacacgaacagacagaggaugguacugugauaacgcaggaucagugucauucuuuccacaagcagaaacauguaaaguucaaucuaacagaguauucugcgacaccaugaacucccuaaccuuacccucagaaguaaaucuaugcaacauagauaucuuuaacccaaaauacgacugcaaaaucaugacaucaaaaacugacguuucuucauccguuauaacuucccucggcgcuauaguguccugcuacggaaaaacuaaaugcacagcauccaacaaaaauagaggaauaauaaaaacauuuuccaacggcugcgacuauguuucaaacaaaggaguagauaccguaucagucggcaauacauuauauuauguuaacaaacaagaaggaaaaucccuauacguaaaaggagaaccuauaaucaacuucuacgacccacucguauuccccucagacgaauuugacgcaucuauaucucaaguaaaugaaaaaauaaaccaaucacucgcauuuauccgcaaaucugacgaauuacuccauaacgucaacgucggcaaaucaaccaccaacauaaugauaacaacaauuauaauaguaauaauugucauacuacuacuccuaauagcaguaggucuauuccuauacugcaaagcaagauccacccccguaacccuuuccaaagaucaacucucaggaauaaauaacauagccuuuucaaacuaaggacuaguacuggcugcaucucccuuuccucuguccuccauccuucucccaggauggugaagggggaccugguacccagugauccccaccccaggauccuaaaucaugacuuaccugcuaauaaaaacucauuggaaaagugagaagaucuaaaaaaaaaaaaaaaaaaaaaaaaaaaaaaaaaaaaaaaaaaaaaaaaaaaaaaaaaaaaaaaaugcaucccccccccccccccccccccccccccccccaaaggcucuuuucagagccaccagaauu

SEQ ID NO: 12720 - RNA, 2073 nt, Artificial Sequence
  mRNA product Design f-5 comprising derived and/or modified sequence from HRSV(Memphis-37)__AIY60640.1__F0_DSCav1 (opt11)
gggagacuuucccauucuguagcagaauuugguguugccuguggucuuggucccgcggagaagcuuaccauggaacuccccauacucaagacuaaugccaucaccaccauccucgccgccgugacccucugcuucgcaucgucccaaaacauaacagaagaguucuaccaaagcacaugcuccgcagucuccaaaggauaccucuccgcacuacguaccggcugguacaccagcgucaucaccaucgaacuuuccaacaucaaagagaacaaaugcaacggcaccgacgccaaaguaaaacucauaaaacaagagcuagacaaauacaaaaacgccgucacagaacuccaacuacugaugcaauccacaccggccgccaacaaccgcgcucgacgugaacucccacgcuucaugaacuacacucuuaacaacaccaaaaauaacaacgucacccuauccaaaaagcgaaagcgcagauuccucggcuuccuacuuggcgucggcucggcgauagccucuggaaucgccguuugcaagguccuccaccuagaaggcgaaguaaacaaaaucaaaaacgcacuccuaagcaccaacaaagccgucgucucacuuuccaacggcgucucaguccucacauucaaaguucucgaccuaaagaacuacaucgacaagcaacuacuacccauacucaauaaacaauccugcuccaucagcaacaucgagacagucaucgaauuucaacaaaagaacaaccgccuccucgaaauuacacgcgaguucucagucaacgccggagucaccaccccagucucaacauacaugcucaccaacagcgaacuccugucucuaaucaacgacaugcccaucacuaacgaccagaagaaacucauguccaacaacguccaaaucgugcgacaacaaucauacucuaucaugugcaucaucaaagaagaaguccucgcauacgucguccagcucccacucuacggcguaaucgacacacccugcuggaaacuccacacaucaccccuaugcaccaccaacacaaaagaaggcuccaacaucugccuaacccgaaccgacagagguugguauugcgacaacgccggcucagucucauucuucccacaagccgaaaccuguaaaguccaaucaaaccgcgucuucugcgauaccaugaacucucucacacuccccuccgaagucaaucucugcaacauagacaucuucaauccaaaguacgacugcaaaauaaugaccucgaaaaccgacguaagcuccagcgucaucaccuccuuaggcgcaaucguauccugcuacggcaaaaccaaaugcaccgccucaaacaaaaacagaggcaucaucaaaacguucucgaacggaugcgacuacguuuccaauaaaggcguagauaccgucuccgucggcaacacacucuauuacgucaacaaacaagaaggcaaaucccucuacgucaaaggugaaccuaucaucaacuucuacgacccccucgucuuccccagcgacgaguucgaugccucaaucagccaagucaacgagaaaaucaaccaaucacuggcuuucauacgcaaauccgacgaacuccuccacaacgugaacgucggcaaauccacaaccaacaucaugauaaccacaauaaucaucgucauaaucguaauccuacuccuccuuauugccguaggacuauuccuauacugcaaagcccgauccacccccgucacccucucaaaagaccaacucuccggcaucaacaauauagccuucucuaacuaaggacuaguacuggcugcaucucccuuuccucuguccuccauccuucucccaggauggugaagggggaccugguacccagugauccccaccccaggauccuaaaucaugacuuaccugcuaauaaaaacucauuggaaaagugagaagaucuaaaaaaaaaaaaaaaaaaaaaaaaaaaaaaaaaaaaaaaaaaaaaaaaaaaaaaaaaaaaaaaaugcaucccccccccccccccccccccccccccccccaaaggcucuuuucagagccaccagaauu
